United States Patent Application Publication US 2017/0114356 A1 - sequence listing, part 24

SEQ ID NO: 31560 - DNA, 1995 bp, Zea Mays
ctcccatccgttccattcctgcttgttcttccaatcccccctcccccggcgtgcgctccctcctgtctctcttggcgacgactgggcaacggtcgcagctgtatgttcgagcccttcgccgacgacgttcaccaccaggaattttctcagctgtgccaatgatgggttgcttcactgttctcagatccaagaagaagaaaagccattttgataatcctcttgtcccaagcaagaaatcagttgatgcaagggaaagtacgtcctctagacttccggagccagaagttcatgtgccatctttgcaatcagctcctcctagttttaggaacagggtcaagatatccgagtcatcaaatgaagtttcaaacagaaacagcagggctcgcgtgctgtctgctccatcagcccttattgtggttgatcagtttggctttccatattcggaataccgagatcaagatgactccagggataaggaaggtttgacaaaggggcatcgcttttcaaatcctttgccccttcctcttccttcacgcgaaggacattcttttaggaactctggtagcttcaaagccagcaacgtaagcgggccattggagatgtctggccctctcccattgcctctaaagaaatgtgatggacttagaatcttctcttatgaggagatttcatctgcctgccaacgattttctagtgatcagtgtgtttcagaaacacttggttcaacatcatacaaggcaacatttagagatgaatttattgatacgaggaccactgaagcaacagtagctcgattactcccctccactcagagtttgaaggagtttaaaacgcaagcgaccacattggcatcgcttcagcatcccaatttatgtaaactgattggctattatgcaaaagaagattctaatgaaaggatgttggtctatgaacggctttatcatggaagcttagataagctactctttggaagatcagatggtcgtttcatggactggtctaaacgtttgaaggttgccctgggtgctgccagaggtctagctttcttgcatgatgaaggaccctttcaggccatgtacagcgagttctcaactttgaacatccaaatagataaagcaaacctttcggtggagaccttggagaagggtttactcactcccaagagcaacgtctggagctttggagtcgtgttactggagctaataactggaaggaagaaccttgatcccaattattccaaagaagaacgcaatattgtcaactggagtaggcctttccttactgatgacagtcgcttgtctcttatcatggactcccgtataaaagggcgctttcccactaaggctgctcggatagtagcagacatcattttgaaatgcctgcgtaaggatccatcggagaggcctaccatgagggatgttgtggaggccctagcaagagtccaggaaataaaggttccgtgcagatatcctctgcaagaaccttctgctgcaccaagaaaagtgatgttgaaatctacatccctcaatgggattgtgcctcaccatcctgtcataaccttctctccatcgccgccttcacataaccagcacttgatttcaccaaggtcgtcgacatctgccttgtttcatccaagggcatgctcttctaccctggacgatccgagtgtaagttctataaagaaaacaccacctattatgcgaaggtctagcgtcgaaggcttttgattgtccatattgttcctttatttccttttcttggatttatttgtttctttgttagtagtgtagcggtttttagctgtgttctgtattgtaagacaagtggcctcatatgtagtgcccttgggtctggagtaaagcagaacaggatgaattgtaaataggaccaggttgtagataccttttttttgtgctcgaattgggtggaagcagcgtgccgagtgggccttgtaacctcataatgcaataaactccgtttcccagtttctgttca

SEQ ID NO: 31561 - DNA, 2027 bp, Zea Mays
ctcccatccgttccattcctgcttgttcttccaatcccccctcccccggcgtgcgctccctcctgtctctcttggcgacgactgggcaacggtcgcagctgtatgttcgagcccttcgccgacgacgttcaccaccagatccaagaagaagaaaagccattttgataatcctcttgtcccaagcaagaaatcagttgatgcaagggaaagtacgtcctctagacttccggagccagaagttcatgtgccatctttgcaatcagctcctcctagttttaggaacagggtcaagatatccgagtcatcaaatgaagtttcaaacagaaacagcagggctcgcgtgctgtctgctccatcagcccttattgtggttgatcagtttggctttccatattcggaataccgagatcaagatgactccagggataaggaaggtttgacaaaggggcatcgcttttcaaatcctttgccccttcctcttccttcacgcgaaggacattcttttaggaactctggtagcttcaaagccagcaacgtaagcgggccattggagatgtctggccctctcccattgcctctaaagaaatgtgatggacttagaatcttctcttatgaggagatttcatctgcctgccaacgattttctagtgatcagtgtgtttcagaaacacttggttcaacatcatacaaggcaacatttagagatgaatttattgatacgaggaccactgaagcaacagtagctcgattactcccctccactcagagtttgaaggagtttaaaacgcaagcgaccacattggcatcgcttcagcatcccaatttatgtaaactgattggctattatgcaaaagaagattctaatgaaaggatgttggtctatgaacggctttatcatggaagcttagataagctactctttggaagatcagatggtcgtttcatggactggtctaaacgtttgaaggttgccctgggtgctgccagaggtctagctttcttgcatgatgaaggaccctttcaggccatgtacagcgagttctcaactttgaacatccaaatagataaaggtttcactgctaagctttcaggatatggttgtgttggcttcaataccgaggagatatctaatgcacctgtgtctgcagcaaacctttcggtggagaccttggagaagggtttactcactcccaagagcaacgtctggagctttggagtcgtgttactggagctaataactggaaggaagaaccttgatcccaattattccaaagaagaacgcaatattgtcaactggagtaggcctttccttactgatgacagtcgcttgtctcttatcatggactcccgtataaaagggcgctttcccactaaggctgctcggatagtagcagacatcattttgaaatgcctgcgtaaggatccatcggagaggcctaccatgagggatgttgtggaggccctagcaagagtccaggaaataaaggttccgtgcagatatcctctgcaagaaccttctgctgcaccaagaaaagtgatgttgaaatctacatccctcaatgggattgtgcctcaccatcctgtcataaccttctctccatcgccgccttcacataaccagcacttgatttcaccaaggtcgtcgacatctgccttgtttcatccaagggcatgctcttctaccctggacgatccgagtgtaagttctataaagaaaacaccacctattatgcgaaggtctagcgtcgaaggcttttgattgtccatattgttcctttatttccttttcttggatttatttgtttctttgttagtagtgtagcggtttttagctgtgttctgtattgtaagacaagtggcctcatatgtagtgcccttgggtctggagtaaagcagaacaggatgaattgtaaataggaccaggttgtagataccttttttttgtgctcgaattgggtggaagcagcgtgccgagtgggccttgtaacctcataatgcaataaactccgtttcccagtttctgttca

SEQ ID NO: 31562 - DNA, 3179 bp, Zea Mays
ctcccatccgttccattcctgcttgttcttccaatcccccctcccccggcgtgcgctccctcctgtctctcttggcgacgactgggcaacggtcgcagctgtatgttcgagcccttcgccgacgacgttcaccaccaggaattttctcagctgtgccaatgatgggttgcttcactgttctcagatccaagaagaagaaaagccattttgataatcctcttgtcccaagcaagaaatcagttgatgcaagggaaagtacgtcctctagacttccggagccagaagttcatgtgccatctttgcaatcagctcctcctagttttaggaacagggtcaagatatccgagtcatcaaatgaagtttcaaacagaaacagcagggctcgcgtgctgtctgctccatcagcccttattgtggttgatcagtttggctttccatattcggaataccgagatcaagatgactccagggataaggaaggtttgacaaaggggcatcgcttttcaaatcctttgccccttcctcttccttcacgcgaaggacattcttttaggaactctggtagcttcaaagccagcaacgtaagcgggccattggagatgtctggccctctcccattgcctctaaagaaatgtgatggacttagaatcttctcttatgaggagatttcatctgcctgccaacgattttctagtgatcagtgtgtttcagaaacacttggttcaacatcatacaaggcaacatttagagatgaatttattgatacgaggaccactgaagcaacagtagctcgattactcccctccactcagagtttgaaggagtttaaaacgcaagcgaccacattggcatcgcttcagcatcccaatttatgtaaactgattggctattatgcaaaagaagattctaatgaaaggatgttggtctatgaacggctttatcatggaagcttagataagctactctttggaagatcagatggtcgtttcatggactggtctaaacgtttgaaggttgccctgggtgctgccagaggtctagctttcttgcatgatgaaggaccctttcaggccatgtacagcgagttctcaactttgaacatccaaatagataaaggtttcactgctaagctttcaggatatggttgtgttggcttcaataccgaggagatatctaatgcacctgtgtctgcagcaaacctttcggtggagaccttggagaagggtttactcactcccaagagcaacgtctggagctttggagtcgtgttactggagctaataactggaaggaagaaccttgatcccaattattccaaagaagaacgcaatattgtcaactggagtaggcctttccttactgatgacagtcgcttgtctcttatcatggactcccgtataaaagggcgctttcccactaaggctgctcggatagtagcagacatcattttgaaatgcctgcgtaaggatccatcggagaggcctaccatgagggatgttgtggaggccctagcaagagtccaggaaataaaggttccgtgcagatatcctctgcaagaaccttctgctgcaccaagaaaagtgatgttgaaatctacatccctcaatgggattgtgcctcaccatcctgtcataaccttctctccatcgccgccttcacataaccagcacttgatttcaccaaggtcgtcgacatctgccttgtttcatccaagggcatgctcttctaccctggacgatccgagtaataacgcgtgtagttgctcaaattcaataaaaaaaggacaaattacatggaagaggagaagcagcccatcagccacaacatgcaatcctcagcagcagaaggcatgatgatcaagtctgcattacgagtttgtgaccaagcgcggttttggagagattttcacgaaccagccggacagatatagcaccacgcgctggctgggctctcgaatccatcatcagctccaggttccagcgctgggattgaggcggaggaaacgcatgttctccgatctaattcctggcggacgcgccggaatctgtctgccgcggtggactagctagatctctccgtgtccgccggagtccaccgaccagctgagacttccggtatttcccgcctcaaatctgccctagatcgaatggttctcttgaatctctggcgctgctgtctcggcggtaaagggtcgcttgggatcgtatttacagtcgcttaatgttattagatcgtgcaggcaaaattactgaaccaggtgctcgattcgaacccaccttccaaagctggtgtacaggtctgaagctgtttgggctttggtagggttggttctattgtgtcgtagcattcaattagtgagctaatttgaatctgtattggtcatatgaaagccaatgtcgaagtataactaatatgagtaatggccattgcactgctgttgcacctgtgaatctgaacttttgcatgtattctagtggccatttgcgttggcagttcatttgttgtctaatccagattttcgagcaattaacttgtttaaagtgtgaacaagtctgttattccacagtatcgaccatcactacctgaagataggatctcttggtcgacgctgccccaaactggtgatgttcccaactgcttgtttatgaatattcagcataagacatgtttcatcttcttctatctactcacatgatttcatccacactcaagcaatagaaggacaacaaccccaaaaaagtaactgagctaggatctttgtttctccagacagttacttttttggggttgttgtccttctattgccaggtgcaatcagaactaaaacaaaggaaatgccaatgctagtctactatcagcagcttgagtgtggagttcaggatcctagctcaactgtggcaaaccacagcacaagcattctgctgctaggatggaaagatgaactctcttgatcatcagaacaaaaaaaaaactgctcagagttcagggaatggctgataagtgaaaattcagatgactaaacttcagaaaattagaaaaacacactatttgtttgttattcagtcagagagacttgagccatgtgtttcaatgctgccctctacagctagattgagggcaccatggacacatttgcttgacaatgaggtataatatccttaggggaatctgcaggctgc

SEQ ID NO: 31563 - DNA, 930 bp, Zea Mays
agaggagaagcagcccatcagccacaacatgcaatcctcagcagcagaaggcatgatgatcaagtctgcattacgagtttgtgaccaagcgcggttttggagagattttcacgaaccagccggacagatatagcaccacgcgctggctgggctctcgaatccatcatcagctccaggttccagcgctgggattgaggcggaggaaacgcatgttctccgatctaattcctggcggacgcgccggaatctgtctgccgcggtggactagctagatctctccgtgtccgccggagtccaccgaccagctgagacttccgtatcgaccatcactacctgaagataggatctcttggtcgacgctgccccaaactggtgatgttcccaactgcttgtttatgaatattcagcataagacatgtttcatcttcttctatctactcacatgatttcatccacactcaagcaatagaaggacaacaaccccaaaaaagtaactgagctaggatctttgtttctccagacagttacttttttggggttgttgtccttctattgccaggtgcaatcagaactaaaacaaaggaaatgccaatgctagtctactatcagcagcttgagtgtggagttcaggatcctagctcaactgtggcaaaccacagcacaagcattctgctgctaggatggaaagatgaactctcttgatcatcagaacaaaaaaaaaactgctcagagttcagggaatggctgataagtgaaaattcagatgactaaacttcagaaaattagaaaaacacactatttgtttgttattcagtcagagagacttgagccatgtgtttcaatgctgccctctacagctagattgagggcaccatggacacatttgcttgacaatgaggtataatatccttaggggaatctgcaggctgc

SEQ ID NO: 31564 - DNA, 3525 bp, Zea Mays
ctactcgcttctcccctctccccactggtgactggctgactgctccacgccgcgaccacgcccaccaccgcgctgcactggccactactcccccttccccgcactgcactgcaccagaactgccccgcgcaaatggaaagagcaccgctgtgatccctccaccctcctcgtccccctagccgtgtcgcgatggccaccgccgccgccgtctgccctctcctgctcctcgccgcgctactcctcgcggtgtccgccaccacgagcgcgctcaccgacgacgtgctcgcactggtggtcttcaagatggacatctcggacccgtcgggccgcctcgcgacgtggaccgaggacgatgatcgtccctgctcctggccggccgttggctgcgacgcgcgcacgggccgcgtcacctcgctctctctcccggcggcgtcgctctcgggccgcttgccgcacgcgctgctccgcctcgacgcgctcctctccctcgcactcccgcgcaacaacctctccggccccgtgccccccaacctcctaaccgcgctcccgcggctccgcgccctcgacctctcctccaaccgcctcgccgcgcccgtccccgcgcagctcttcgcccaatgccgtgccgtccgcgccatctccctcgcgcacaaccagctctcgggctacatcccgcccgccgtcgcgtcctgcgcatcgctcgtgtccctcaacctctcgtccaatcgcctcgccggtcccatcccggacgggctctggtcgctgccttcgctccggtccctcgacctctccggcaacgagctctccgggagtgtgcccggtggattcccccggaccagctcgctacgggaggtggatttgagccgaaacctcctcgccggggagataccggcagatgttggagaggcggcgctgctgaagtcactgggtttggggcataacttgttcactggcagccttccggactcgctccggaggctggccggtctgcagttcctcggcgccggcggcaatgcgcttgcaggggagctgccagcatggatcggggaaataagggcgctggagcgccttgatttatcgggcaaccgatttgccggcaacattccctacactatcgcgaactgcaagaaccttgtggagatcgacctaagctgcaatgcgctcaccggcgatcttccctggtgggtgttcggcctaccgctgcagcgcgtctcggtggcaggcaaccagctgaatgggtgggtgaaggtggccgacgacgcagcaatggcgcttcgtgtgctggacctgtcgtgcaacgcgttctccggcgagatcccgctgcggatcactgccttcgcgggtttgcagtctcttaacctgtcctcgaattccttctcggggcagctgccggccggcattggtggattgaggctcctcgaggttctggacgtgagcgctaaccgacttgaaggaaccgtgccgccggagatcggcggtgcggtggcgctccgggacctgaggatgggaaggaattcgcttacgggacgcatcccggcacagattgggaactgcagctccctcgttgcactgttgcagagacgttgtagacagtgttgtaggacagtgatgtcgtattttctgtttgggaccccaaaccgaaaactatggggatttctcacacaataacctgacgtggccgattcctagcaccatgggaaacctgaccagcctccaagtggtcaatctatctcagaacaagctgaacgggaccctaccagtggagctatccaatctgcctagcctccacatctttgacgtctcccacaacatgctgacaggggatctgccacacagccgcttcttcaacaacatccccgagtccttcctcgtggacaattctggtctgtgtagctcacggaagaatgattcgtgcagcgcagttatgccaaagcctattgtgctcaacccaaactcctcatcaaatccctcatggcaggctacacccagtgcccctagcaacatgcatcacaagaaaatcatactgagtatctccaccctcgttgccattgcgggcggcgcggccattgctatcggagtgatcaccatatccgtgctcaatcgccgcgtccgggcccgtgcggctgccccacgctcagcacctgctactgcattgtccgatgactacctcagtcagtccccagagaatgacgctagctccgggaagcttgtcatgtttggcaagggcagccctgagttcagcgccggtgggcacgcgttgttgaacaaagactgtgagcttgggcgtggaggctttggggcagtctacaagacggtgctcagagacggacagccggtagccatcaagaagcttacagtctctagcttggtcaagtcaaaggatgacttcgagcgacaagtgaagacgctcagcaaggtgcggcaccacaatatcgtcgcgctcagaggcttctactggacttcgtcactgcagctcctcatctatgattacctacctggaggaaacctgcacaaacacctgcacgagtgcaacgaagacagcttactttcctggatggagagattcgacatcatcctcggcattgcccggggcctgacctacctgcaccagcacggcatcatccactacaatctcaagtcaagcaacgtgctgctggacagcaacggcgagccaaaggtgggtgactacggcctcgccaagctgctgccgatgctggaccggtacgtcctgagcagtaaggtccagagcgcgctcgggtacatggcgccagagtttgcgtgcaagacggtgaagatcaccgagaaatgcgacgtctatggcttcggggtgcttctgctggaggccttgacgggcaggaggcccgtggagtacttggaagacgacgtggttgtcctgtgtgacctggtcagaggcgcgctggaggaaggcaggccagaggactgcgtcgaccctcggctgcgcggcgagttccccatggacgaggccctgccggtcatcaagctgggccttgtgtgcacctctcaggtgccgtcgaaccggcctggcatgggtgaggtcgtgagcatgctcgagctggtgaggaatcctcgagatatcgccgaggatgagctggtttgagccccggccgtcgggagattctgttctagttcaccttgagagccttctcttttgtgttttttttttcttctctcggatgcatatatggttgcccgatggggaagaaaggagagggagaggggggtggttcagacttgggagagtgggaagtttgtattattgtgttgaaagctgaagggatgcaatggaaggctgtttgttgcttctctgaaattctttgatgattccttggttggatgagcttgtagatcatgtaggtatgactcgatgcaacgcaggccaggtttgctgattacctcggcataactggaggaatgttctgctgatagtgcgacttttgtttgactgattaaatggctgaagatttcttcatttaatatgtctgcatctagtgtttcctgtttttt

SEQ ID NO: 31565 - DNA, 1688 bp, Zea Mays
gccgagcccccacgcaacaaaccacccgctcacacagaccgccccaccaaaactggccaaaagccccccaaagagaccccacaaaactccccgttatcccccacccggacaatcttccttcaggcttcagctgtccgcccgcggcccacccctccgccgtctccaccattccgccgttcccaccacgccactcgccagttcggcactccctcctgtctcccccccttgccgagacggcgcggacgccccgtcgcccaccccgatggctgccactctcctccacgccgccaccgcctcgctccagagctcctcccagcccgcacgcgcgggcgccgccaccgcctttcaccccctcgcgtccaccccatccatacgcctcgcgcgctcctcgttctcgtccaatcgccgcctcgaggtttcactccgggcggtttcggccggtcactgtttcgcggggaggggagcaccccggggccgccgcgtcgtcgccgccctagcaggggagcaaactgagggttcagaggtgggcgatgacaaggataacagcaacgaggagataaagcccgaggaggctcaggaagcttggaaggtaatgctggagcagttcaaggctgaggccctgcggatgcaggccctgtcaatgcaggcatatgatgtctactccaagagggcgagggaggtcttgctggaagcctctgagaagctgaagatacaggcagacaaagcacaaaaggacctcagcgtgatcgctaccgaggttagtcaggagggacaggaatatctggtgatggcagctcggaactccccagactcgatcaaggatattacaacaacgttcagggctcttgggagattgaattggccatcagagtatgaggattatcatgttggcattccgtttgcaatagctcttgtcatcttcttcagggagttttcagttctactccagaatggttggttcccaaaaatcttcattgttcttctcagtggagtggtggcagcattttacttctatcgcattgcaactggtaaccccaaagatctgagcagcaagaatgattcagcgaattaatgcttaaatcgtatctcatgcagcactgggacgagtcagatggtcagtgggacgtagacccagaagattatggtctcttcctttccattttcttcatcggccttcaattgaggcaaagctcggtcctagcgtctaagatgtctgcgtgatgatacatggattcaaaagaattgtttgcttatctggcccacttcccgcactcctttgttcctttactcgtgtaatatactccgatgtcaggcccgcttaaacaacagtaataaacgaccttcgaaggtcatgtagttatcagttcagtttgtctggtgtttattgcatggggatagaagtgattaagtgaagcgttcaatgtttagtgaaatggctgaaaacaatcagggttagtattatgtaccttctcgtttgctcgtaaacaaacagatgataagttgtaaagggtacctgcagtggtacgatctagttgtttcctctaactctaagttaacctcttcgatggcacaaacttttagcccatacggccataccaggccatatgctacatttgttcttaaatattggtcgctcgctagttagttaattttttactaaaactcaacaaacaaaaaagaacgaaggg

SEQ ID NO: 31566 - DNA, 1667 bp, Zea Mays
gccgagcccccacgcaacaaaccacccgctcacacagaccgccccaccaaaactggccaaaagccccccaaagagaccccacaaaactccccgttatcccccacccggacaatcttccttcaggcttcagctgtccgcccgcggcccacccctccgccgtctccaccattccgccgttcccaccacgccactcgccagttcggcactccctcctgtctcccccccttgccgagacggcgcggacgccccgtcgcccaccccgatggctgccactctcctccacgccgccaccgcctcgctccagagctcctcccagcccgcacgcgcgggcgccgccaccgcctttcaccccctcgcgtccaccccatccatacgcctcgctcaggaagcttggaaggtaatgctggagcagttcaaggctgaggccctgcggatgcaggccctgtcaatgcaggcatatgatgtctactccaagagggcgagggaggtcttgctggaagcctctgagaagctgaagatacaggcagacaaagcacaaaaggacctcagcgtgatcgctaccgaggttagtcaggagggacaggaatatctggtgatggcagctcggaactccccagactcgatcaaggatattacaacaacgttcagggctcttgggagattgaattggccatcagagtatgaggattatcatgttggcattccgtttggtacctttcttacagtagggggtttcctcaacttcatgttgactggaagtacctctgctcttcgttttggtattgttcttggccttgcactgttgactctaggtatctcaagtttgagatcacatagagaaggcgaccgtcggcctcgtcttttggtgaaagggcaagctgcaatagctcttgtcatcttcttcagggagttttcagttctactccagaatggttggttcccaaaaatcttcattgttcttctcagtggagtggtggcagcattttacttctatcgcattgcaactggtaaccccaaagatctgagcagcaagaatgattcagcgaattaatgcttaaatcgtatctcatgcagcactgggacgagtcagatggtcagtgggacgtagacccagaagattatggtctcttcctttccattttcttcatcggccttcaattgaggcaaagctcggtcctagcgtctaagatgtctgcgtgatgatacatggattcaaaagaattgtttgcttatctggcccacttcccgcactcctttgttcctttactcgtgtaatatactccgatgtcaggcccgcttaaacaacagtaataaacgaccttcgaaggtcatgtagttatcagttcagtttgtctggtgtttattgcatggggatagaagtgattaagtgaagcgttcaatgtttagtgaaatggctgaaaacaatcagggttagtattatgtaccttctcgtttgctcgtaaacaaacagatgataagttgtaaagggtacctgcagtggtacgatctagttgtttcctctaactctaagttaacctcttcgatggcacaaacttttagcccatacggccataccaggccatatgctacatttgttcttaaatattggtcgctcgctagttagttaattttttactaaaactcaacaaacaaaaaagaacgaaggg

SEQ ID NO: 31567 - DNA, 1033 bp, Zea Mays
cgttgacgcatgtttatcttccaagtaaactagctacagtgctactacaagtgcagcttccaccgcgagcgcagctgccgggccaccaagcaggtgcagcagtgcagcgacggcgacggccacccgccccagtacgtcgtcatgtacttcaacgagcacacgtgcgacacggcggcctgggagcccgcggcggcggcggcggcttcctcgggggtgccgctggacgacctgtccaggtccaggctgcaggcggtactaggccagggccagcagggcgctcgcgcgctgctgctggacgaacgcggcgtccaggaggagcacgagcgccggcttctcgtctcgtcgctcgcctgcgtgctcgggggccagcagcagcagtctcctgcgggcagcggaacaaccacggccgtcgaccccgccgttaacgtggggcaggagcaggagccgccgccgccgcgggcccgcacgcctgcggccgttgacgcggccggtgagatgccgcgtatcattggcgtggacgtggcggggctggatgtcatggactacgatgtgacggacgcgctgtgtctcgcccattcctacgacgacctacctgacgacgggtttccgttttgctgagtgcgcagccgcaccacatgcatcttctcgcgaaacatacgtacggtacatgtgccaggcccgagatagttcatgtcgggcgcgacgggtcactgagcctttggtcatagaacaattaatactgtgatatatagtactgtctctactacggagtacttatctagcagtagtagtaactacacacttgcccagcttattacagccaggctttgcgtatctccagataagtttaggtcaggctggcgtgattaatttgcaagttctttttttttgtgtgtgtgttaatcagcgtgcatgccatgtactactagttcccttgttttcgttccactattacaagtgtgcaatgttttacatatattactgtggataaaaaacaaaaaaaacgcatacattgtcagtaatttcagccgtc

SEQ ID NO: 31568 - DNA, 1936 bp, Zea Mays
ctcgcggcgagttcgttcggtcgcgagggagaagaaagtgctgacgcgcgggccagagttggcagcgacacacaaacgagcgcgcacgcgcgtgaagatgaccggtgggcccatgatgtcggcgccaaaatcagctgggccggcgcggtataatttcctggtgggccgaatagggtgatgtaggcccggttaggttcttttccattttctgattttccttttctctaccccttatttagatttgtaaatttttcaaattcaaccatgaattgggtttctaaattcaaattaaatgcataattcaagatctagtatgatatgcaatatattttatttttatttatttattatttaagccattgccttttaaatgtgtaaatcccacctatttaatataaggaacatagttttatattgtataatctctataaagaaatttctcttacacatatccttatggacacttatataagtgataatttatttcatataagaactattttgttaatccttttattagaaaacttttatttttggagatgtgactttaaaagttatgggaactagaaaaaaaattccaattcaagatcttcggaaaaaaaaaatttactataatttttagaatgagattttgaggtgttacaaatcctaccccccttaaaaataatctcgtcctcgagatttgtaagaaaaaggtataactatgttatctcaacacatatggacaaacaaaatctcagcatgatgcatactttagtagcaagacatggggtcgattagaccttattattccttcttaaaataatatcatatcatccactaactaaagtaacatttagatcttacaaatagtagtaatttatatatatgtttatgtagcttggtggagctggtggtggtggtggaggttgttgttgttgttgttgtctctccaaccgcgcttgccttatttcttggcggacttgacgtatttcctcgcgttcttgtcttatctgattttgcatctcggtcaccaggtctgttaattgttgtattaccagtctttgggcagcaaccacttgatcgatttcaataggtggagggtttggaggattcatttctgtttgctgttgtgtggtaatctttcctttcctggtattgaccatgaaagttagaagcatatggtaatagttttgcaaagaaatttattcaataagcggaatgaataagctagtagctggttataatctgaagattctttagtagggcttaatctttgttttatgtccagaatggggggaaaccagtcgtataaggtgaatatccaagggtaagatagaatctgtcaagatgagagatatatatgggtgagatagactacaagatgtaggttaaaagtttgtgtgttgttaggtgggaatagaaaggttataccattcatcatggctctatgggttgggttagctcatggttgagttgatccaatgtgctaagttaagttaatacatggctagtggggtctaatctcttctactagtgtcattaatctgtttaagtggaccacattaagctagataacattagaccacactagattaggtcacatttagtaagataagatctagattagattggatatgactagattagactagtttaggttagataggtccaacagggtagaatatgtattattaagatatgttaaaatcttttgagattagttagatatgttatgataagataaaatctcttcaagataagatgaatttattaaggtaagaagaaccttttaagatgaggtggatctagtaagatatgagagaatcttataagatacgatgaatctattaagatatgggagagtcttttaagattagagggatctctatgagatagatacattttaatggaggataatctaagttgcttagttttcttatgaattctatttaag

SEQ ID NO: 31569 - DNA, 3299 bp, Zea Mays
gatttacttgcatgtttgcatctagagactacttatatagtagtagctgtcgatacgataaagattatgcaccgaagtgactatagataagggtagacgataaatgatgcgacggtagataaagatctgaaaaaatatttgtgcgctctcttccaggtgggccctttctctccccttctcccctcaccggctcaccctctcccctcgacgatacatttcacctccccggatctatctcgccgcgtcggcgcgctggtcacccgacgaagctaggaggcagtcaaggcggacgaagcgctgcaccaaatttgacgggggatcgagcacaggaggcgtagtggaaaatgtttaagtttctcaaggaggtggtcgcgggatccggatcggggctcaaggacttcccctacaccattggtgagacatacgcatccgcctggggttcatggacacaccaccgcggtacctccaaggatgatgggtcacctgtgtcaattttttctctgtcagggagcaaccctcaggacagacacatggttgctggccgtaatggtgttaagagattacgaacggtgcggcatccaaatatcttatcctttttacacagtactgaagcagaagttgcggatggacctgccatcaaacacacgatttatattgtaacagagcctgttatgccactttctgaaaagctcaaggaactgaatcttggtggtacacagagagatgagtactttgcatgggggcttcatcagatatccaaagctgtgagctttctcaataatgattgcaaacttgttcatgggaatgtatgcttagccagtgttgttgttacacaaaccctggattggaagcttcatgccttcgatgttctgtcagaatttgatgctaacaatgaagcctctggtagccccatgctgcaatttgagtggttagttgggatgcaatacaagccaatggagctgtcaaagtcagattgggcttcaattagaaaatcacctccgtgggccattgattcttggggactggggtgtttaatatatgaactcttttctggtgcaaagctggctagaacagaggaccttcgaaatactgcttcaatcccaaagtctctacttccagattaccagaggctcttgaattccacacctactcgtagactaaatccttcaaaacttattgacaacagcgagtttttccagaataagttagtagagactatccagttcatggaaattcttaatttgaaagacacctttgagaaagacagctttttccggaagcttcccaatatagctgaacagcttccccgtgagatagtcctgaaaaagctgctccctgtcttggcttcttctcttgagtttggctcagctgctgctccagccttaactgttttgttaaagatgggttcctggcttcctacggaccaatttagtatcaaggtcttgccaactattgtcaagctttttgcctccaatgaccgagctatccgagcatgtcttttgcaccacatagatcagtttggggaatcaatgtctgctcaaactgttgatgaacaagtttttcctcatgtagcaactggattttccgatactgatggtactatccgtgaactgacattaaagtcaatgctcatattagcaccaaaactatctcagcgtacaatctcaggatctctcttgaaatatctctctaagctacaggtggatgaagaacctggaatcaggacgaacactacaattcttcttggcaatattgcaagctacatgaatgatgggactaggaagagagtactgatcaatgcattcacagttcgtgcactacgtgataccttccctccggccagagcagctggaatcatggcactgagtgtcactggttcatactacgaaatgacagagattgcaactcgcatcctgcctaacattgttgtcctcacatttgacccagatagtgatgtccggaccaaggctttccaggctactgatcagttcttgcaaatagcaaagcaacaccatgaaaagcttaatacgggagacaacagggtggctgaaagtactggtgttaagttaaagcctggaaatgcaggtttacttgggtgggccatgagttctgttacacaaaagggtaaaccttctgaccacgccccaatatctactgcaaatgctaataattctcaagcatcaacagctttgactgccgctccagagactcaggcttccacaccagcgtatgcacaatccacatccagctcccttgatcaagctgcaccagcatcagcaaggtcttcagaagatgggtggggtgagcttgaggatgacaatatccatgaggagaatagtgataaagatggatgggatgatgtagacccgtttgaggacaagccatcaccatctcttctatccaacatacaggctgcacagaaacgtccagtggcgcaaccaaagcaagctgttgcaaactcatctaaatccaacccactaaaagcgccaaaatcagaagacgatcctctatggggtcctatagctgctgcaccacccaaaagcgcagcaaaacctgcagacatcaagccatcaacatcacataacgatgaggatgacctgtggggttcaatagcggcacctcctccaaaatcatctggaaagcctttgaagccagctgcagcgaatagtgacgacctatggggtgccattgcagcacctccaccaggaaccaaagccaggcccttagcctcatcaggtaagggccgaggaacaaagcctgcgcaaccaaaacttggtgctcaaagaataggaagaacatcctcaactggaatgtgatggcttatgatatcaaatgttgtacaagagtgcgaagttttcctttttgtcccccatgctttgagtctgaccaggatgtcattctttgtaaactagcaaaaggtatcaatatatggacacaattttgacaaatgtattaatattgtttcaccattgtgtattaaaatagacacatacgtttttttttgtttttgtattttttgtacatcacagctgtttcgagtaaatattattaatatatttgcccctgccttattttggcttgattactttgacatttcctttttgttgggataaaacttgtcggtgtagcgctgtatagaacttacatgtttgcccctttgtaatgggcttcaggcttcagcctcttctatataatataacacccaatccctggattagggttagagttttcattctccaacttggtactagatctaggtttaggtttatctctcttcctccccaccccatagcccctct

SEQ ID NO: 31570 - DNA, 3079 bp, Zea Mays
aaagatctgaaaaaatatttgtgcgctctcttccaggtgggccctttctctccccttctcccctcaccggctcaccctctcccctcgacgatacatttcacctccccggatctatctcgccgcgtcggcgcgctggtcacccgacgaagctaggaggcagtcaaggcggacgaagcgctgcaccaaatttgacgggggatcgagcacaggaggcgtagtggaaaatgtttaagtttctcaaggaggtggtcgcgggatccggatcggggctcaaggacttcccctacaccattggtgagacatacgcatccgcctggggttcatggacacaccaccgcggtacctccaaggatgatgggtcacctgtgtcaattttttctctgtcagggagcaaccctcaggacagacacatggttgctggccgtaatggtgttaagagattacgaacggtgcggcatccaaatatcttatcctttttacacagtactgaagcagaagttgcggatggacctgccatcaaacacacgatttatattgtaacagagcctgttatgccactttctgaaaagctcaaggaactgaatcttggtggtacacagagagatgagtactttgcatgggggcttcatcagatatccaaagctgtgagctttctcaataatgattgcaaacttgttcatgggaatgtatgcttagccagtgttgttgttacacaaaccctggattggaagcttcatgccttcgatgttctgtcagaatttgatgctaacaatgaagcctctggtagccccatgctgcaatttgagtggttagttgggatgcaatacaagccaatggagctgtcaaagtcagattgggcttcaattagaaaatcacctccgtgggccattgattcttggggactggggtgtttaatatatgaactcttttctggtgcaaagctggctagaacagaggaccttcgaaatactgcttcaatcccaaagtctctacttccagattaccagaggctcttgaattccacacctactcgtagactaaatccttcaaaacttattgacaacagcgagtttttccagaataagttagtagagactatccagttcatggaaattcttaatttgaaagacacctttgagaaagacagctttttccggaagcttcccaatatagctgaacagcttccccgtgagatagtcctgaaaaagctgctccctgtcttggcttcttctcttgagtttggctcagctgctgctccagccttaactgttttgttaaagatgggttcctggcttcctacggaccaatttagtatcaaggtcttgccaactattgtcaagctttttgcctccaatgaccgagctatccgagcatgtcttttgcaccacatagatcagtttggggaatcaatgtctgctcaaactgttgatgaacaagtttttcctcatgtagcaactggattttccgatactgatggtactatccgtgaactgacattaaagtcaatgctcatattagcaccaaaactatctcagcgtacaatctcaggatctctcttgaaatatctctctaagctacaggtggatgaagaacctggaatcaggacgaacactacaattcttcttggcaatattgcaagctacatgaatgatgggactaggaagagagtactgatcaatgcattcacagttcgtgcactacgtgataccttccctccggccagagcagctgtgatgtccggaccaaggctttccaggctactgatcagttcttgcaaatagcaaagcaacaccatgaaaagcttaatacgggagacaacagggtggctgaaagtactggtgttaagttaaagcctggaaatgcaggtttacttgggtgggccatgagttctgttacacaaaagggtaaaccttctgaccacgccccaatatctactgcaaatgctaataattctcaagcatcaacagctttgactgccgctccagagactcaggcttccacaccagcgtatgcacaatccacatccagctcccttgatcaagctgcaccagcatcagcaaggtcttcagaagatgggtggggtgagcttgaggatgacaatatccatgaggagaatagtgataaagatggatgggatgatgtagacccgtttgaggacaagccatcaccatctcttctatccaacatacaggctgcacagaaacgtccagtggcgcaaccaaagcaagctgttgcaaactcatctaaatccaacccactaaaagcgccaaaatcagaagacgatcctctatggggtcctatagctgctgcaccacccaaaagcgcagcaaaacctgcagacatcaagccatcaacatcacataacgatgaggatgacctgtggggttcaatagcggcacctcctccaaaatcatctggaaagcctttgaagccagctgcagcgaatagtgacgacctatggggtgccattgcagcacctccaccaggaaccaaagccaggcccttagcctcatcaggtaagggccgaggaacaaagcctgcgcaaccaaaacttggtgctcaaagaataggaagaacatcctcaactggaatgtgatggcttatgatatcaaatgttgtacaagagtgcgaagttttcctttttgtcccccatgctttgagtctgaccaggatgtcattctttgtaaactagcaaaaggtatcaatatatggacacaattttgacaaatgtattaatattgtttcaccattgtgtattaaaatagacacatacgtttttttttgtttttgtattttttgtacatcacagctgtttcgagtaaatattattaatatatttgcccctgccttattttggcttgattactttgacatttcctttttgttgggataaaacttgtcggtgtagcgctgtatagaacttacatgtttgcccctttgtaatgggcttcaggcttcagcctcttctatataatataacacccaatccctggattagggttagagttttcattctccaacttggtactagatctaggtttaggtttatctctcttcctccccaccccatagcccctct

SEQ ID NO: 31571 - DNA, 2272 bp, Zea Mays
aaatatttgtgcgctctcttccaggtgggccctttctctccccttctcccctcaccggctcaccctctcccctcgacgatacatttcacctccccggatctatctcgccgcgtcggcgcgctggtcacccgacgaagctaggaggcagtcaaggcggacgaagcgctgcaccaaatttgacgggggatcgagcacaggaggcgtagtggaaaatgtttaagtttctcaaggaggtggtcgcgggatccggatcggggctcaaggacttcccctacaccattggtgagacatacgcatccgcctggggttcatggacacaccaccgcggtacctccaagggagcaaccctcaggacagacacatggttgctggccgtaatggtgttaagagattacgaacggtgcggcatccaaatatcttatcctttttacacagtactgaagcagaagttgcggatggacctgccatcaaacacacgatttatattgtaacagagcctgttatgccactttctgaaaagctcaaggaactgaatcttggtggtacacagagagatgagtactttgcatgggggcttcatcagatatccaaagctgtgagctttctcaataatgattgcaaacttgttcatgggaatgtatgcttagccagtgttgttgttacacaaaccctggattggaagcttcatgccttcgatgttctgtcagaatttgatgctaacaatgaagcctctggtagccccatgctgcaatttgagtggttagttgggatgcaatacaagccaatggagctgtcaaagtcagattgggcttcaattagaaaatcacctccgtgggccattgattcttggggactggggtgtttaatatatgaactcttttctggtgcaaagctggctagaacagaggaccttcgaaatactgcttcaatcccaaagtctctacttccagattaccagaggctcttgaattccacacctactcgtagactaaatccttcaaaacttattgacaacagcgagtttttccagaataagttagtagagactatccagttcatggaaattcttaatttgaaagacacctttgagaaagacagctttttccggaagcttcccaatatagctgaacagcttccccgtgagatagtcctgaaaaagctgctccctgtcttggcttcttctcttgagtttggctcagctgctgctccagccttaactgttttgttaaagatgggttcctggcttcctacggaccaatttagtatcaaggtcttgccaactattgtcaagctttttgcctccaatgaccgagctatccgagcatgtcttttgcaccacatagatcagtttggggaatcaatgtctgctcaaactgttgatgaacaagtttttcctcatgtagcaactggattttccgatactgatggtactatccgtgaactgacattaaagtcaatgctcatattagcaccaaaactatctcagcgtacaatctcaggatctctcttgaaatatctctctaagctacaggtggatgaagaacctggaatcaggacgaacactacaattcttcttggcaatattgcaagctacatgaatgatgggactaggaagagagtactgatcaatgcattcacagttcgtgcactacgtgataccttccctccggccagagcagctggaatcatggcactgagtgtcactggttcatactacgaaatgacagagattgcaactcgcatcctgcctaacattgttgtcctcacatttgacccagatagggatctgaaatagatgatcgcgtgtaaggtttttatggcgctagaccaggcgtaccatcttgggcacatggaaggatgtgttttgatgaagattgcacaagtgtaatcagcatatttttgacacatatattgtagacagaagaaggaagggaaattaaagacatattgtagagtgtagacagaagaagcaagggaaattaaagataggaggcactagtctatcttgggttttggctcatcaccaaactcaagcccaacaggtctctgatcaccaatctgctgtataccctgtgctactgcatacctactactaggtcattgtgcaatgcctgaaagaaacacaacactaggatattaaattgattgtcttgacctctagggttaatggtgctgtatatttatacgggcagaaactgattattacaagaggaatactactcggttacaacatcccaaccgactctgattctaaatgaactgcggatgcatg

SEQ ID NO: 31572 - DNA, 1920 bp, Zea Mays
aaatatttgtgcgctctcttccaggtgggccctttctctccccttctcccctcaccggctcaccctctcccctcgacgatacatttcacctccccggatctatctcgccgcgtcggcgcgctggtcacccgacgaagctaggaggcagtcaaggcggacgaagcgctgcaccaaatttgacgggggatcgagcacaggaggcgtagtggaaaatgtttaagtttctcaaggaggtggtcgcgggatccggatcggggctcaaggacttcccctacaccattggtgagacatacgcatccgcctggggttcatggacacaccaccgcggtacctccaaggatgatgggtcacctgtgtcaattttttctctgtcagggagcaaccctcaggacagacacatggttgctggccgtaatggtgttaagagattacgaacggtgcggcatccaaatatcttatcctttttacacagtactgaagcagaagttgcggatggacctgccatcaaacacacgatttatattgtaacagagcctgttatgccactttctgaaaagctcaaggaactgaatcttggtggtacacagagagatgagtactttgcatgggggcttcatcagatatccaaagctgtgagctttctcaataatgattgcaaacttgttcatgggaatgtatgcttagccagtgttgttgttacacaaaccctggattggaagcttcatgccttcgatgttctgtcagaatttgatgctaacaatgaagcctctggtagccccatgctgcaatttgagtggttagttgggatgcaatacaagccaatggagctgtcaaagtcagattgggcttcaattagaaaatcacctccgtgggccattgattcttggggactggggtgtttaatatatgaactcttttctggtgcaaagctggctagaacagaggaccttcgaaatactgcttcaatcccaaagtctctacttccagattaccagaggctcttgaattccacacctactcgtagactaaatccttcaaaacttattgacaacagcgagtttttccagaataagttagtagagactatccagttcatggaaattcttaatttgaaagacacctttgagaaagacagctttttccggaagcttcccaatatagctgaacagcttccccgtgagatagtcctgaaaaagctgctccctgtcttggcttcttctcttgagtttggctcagctgctgctccagccttaactgttttgttaaagatgggttcctggcttcctacggaccaatttagtatcaaggtcttgccaactattgtcaagctttttgcctccaatgaccgagctatccgagcatgtcttttgcaccacatagatcagtttggggaatcaatgtctgctcaaactgttgatgaacaagtttttcctcatgtagcaactggattttccgatactgatggtactatccgtgaactgacattaaagtcaatgctcatattagcaccaaaactatctcagcgtacaatctcaggatctctcttgaaatatctctctaagctacaggtggatgaagaacctggaatcaggacgaacactacaattcttcttggcaatattgcaagctacatgaatgatgggactaggaagagagtactgatcaatgcattcacagttcgtgcactacgtgataccttccctccggccagagcagctggaatcatggcactgagtgtcactggttcatactacgaaatgacagagattgcaactcgcatcctgcctaacattgttgtcctcacatttgacccagatagtgacgagcagctccgactcccccagacggatcccacatggacaaaggaactcgacgacgcctacatccaaacaccggaagagaaggaggaagccctccaat

SEQ ID NO: 31573 - DNA, 3943 bp, Zea Mays
aaatatttgtgcgctctcttccaggtgggccctttctctccccttctcccctcaccggctcaccctctcccctcgacgatacatttcacctccccggatctatctcgccgcgtcggcgcgctggtcacccgacgaagctaggaggcagtcaaggcggacgaagcgctgcaccaaatttgacgggggatcgagcacaggaggcgtagtggaaaatgtttaagtttctcaaggaggtggtcgcgggatccggatcggggctcaaggacttcccctacaccattggtgagacatacgcatccgcctggggttcatggacacaccaccgcggtacctccaaggatgatgggtcacctgtgtcaattttttctctgtcagggagcaaccctcaggacagacacatggttgctggccgtaatggtgttaagagattacgaacggtgcggcatccaaatatcttatcctttttacacagtactgaagcagaagttgcggatggacctgccatcaaacacacgatttatattgtaacagagcctgttatgccactttctgaaaagctcaaggaactgaatcttggtggtacacagagagatgagtactttgcatgggggcttcatcagatatccaaagctgtgagctttctcaataatgattgcaaacttgttcatgggaatgtatgcttagccagtgttgttgttacacaaaccctggattggaagcttcatgccttcgatgttctgtcagaatttgatgctaacaatgaagcctctggtagccccatgctgcaatttgagtggttagttgggatgcaatacaagccaatggagctgtcaaagtcagattgggcttcaattagaaaatcacctccgtgggccattgattcttggggactggggtgtttaatatatgaactcttttctggtgcaaagctggctagaacagaggaccttcgaaatactgcttcaatcccaaagtctctacttccagattaccagaggctcttgaattccacacctactcgtagactaaatccttcaaaacttattgacaacagcgagtttttccagaataagttagtagagactatccagttcatggaaattcttaatttgaaagacacctttgagaaagacagctttttccggaagcttcccaatatagctgaacagcttccccgtgagatagtcctgaaaaagctgctccctgtcttggcttcttctcttgagtttggctcagctgctgctccagccttaactgttttgttaaagatgggttcctggcttcctacggaccaatttagtatcaaggtcttgccaactattgtcaagctttttgcctccaatgaccgagctatccgagcatgtcttttgcaccacatagatcagtttggggaatcaatgtctgctcaaactgttgatgaacaagtttttcctcatgtagcaactggattttccgatactgatggtactatccgtgaactgacattaaagtcaatgctcatattagcaccaaaactatctcagcgtacaatctcaggatctctcttgaaatatctctctaagctacaggtggatgaagaacctggaatcaggacgaacactacaattcttcttggcaatattgcaagctacatgaatgatggggtctgtctcaaagatgcaactattgtgttatttgtattcctttaattatccttttccatgttaggtactaactagatatactgaatatgttgtgttagggaatttcattgaaaatagcttttagagatattaccaaacatgccagtatgctgcatcggagcgcgcgacatcatctgttccaatacatattggtatcggatatcggaccaggctagacacacactattctaacccatgtgcaccaatcctccatgtgcaccagatatgtcctcatacctattatgctcggggaagtgtagggacggattggggaagagaggacggaaatttggaggaagaaattttctccttttaatattagatatagatatagatgtcagttgtgtatatgtttttttttgagtttcttatgctctggatgtccatttgattgaaatctgctttaaacacaaaaaggtacaaatatgaacacgtccattttctgtataggcttctgcttctgtgttcaaggtttatgtttctgttgaagacacttttttcacagctgacctgactggtactcctgattaagggtattcaacactatctattgctgcagaaacatgattacagaacagaaaagatattacgaaaaccacttctatctaggattaacctgtaatcctgtatatatatgaaaaatagaactttatccatattagcctggagatggattttatttgttaattctagcatagtgtttgcctatttgctgacaaggctttgttatataacagactaggaagagagtactgatcaatgcattcacagttcgtgcactacgtgataccttccctccggccagagcagctggaatcatggcactgagtgtcactggttcatactacgaaatgacagagattgcaactcgcatcctgcctaacattgttgtcctcacatttgacccagatagtgatgtccggaccaaggctttccaggctactgatcagttcttgcaaatagcaaagcaacaccatgaaaagcttaatacgggagacaacagggtggctgaaagtactggtgttaagttaaagcctggaaatgcaggtttacttgggtgggccatgagttctgttacacaaaagggtaaaccttctgaccacgccccaatatctactgcaaatgctaataattctcaagcatcaacagctttgactgccgctccagagactcaggcttccacaccagcgtatgcacaatccacatccagctcccttgatcaagctgcaccagcatcagcaaggtcttcagaagatgggtggggtgagcttgaggatgacaatatccatgaggagaatagtgataaagatggatgggatgatgtagacccgtttgaggacaagccatcaccatctcttctatccaacatacaggctgcacagaaacgtccagtggcgcaaccaaagcaagctgttgcaaactcatctaaatccaacccactaaaagcgccaaaatcagaagacgatcctctatggggtcctatagctgctgcaccacccaaaagcgcagcaaaacctgcagacatcaagccatcaacatcacataacgatgaggatgacctgtggggttcaatagcggcacctcctccaaaatcatctggaaagcctttgaagccagctgcagcgaatagtgacgacctatggggtgccattgcagcacctccaccaggaaccaaagccaggcccttagcctcatcaggtaagggccgaggaacaaagcctgcgcaaccaaaacttggtgctcaaagaataggaagaacatcctcaactggaatgtgatggcttatgatatcaaatgttgtacaagagtgcgaagttttcctttttgtcccccatgctttgagtctgaccaggatgtcattctttgtaaactagcaaaaggtatcaatatatggacacaattttgacaaatgtattaatattgtttcaccattgtgtattaaaatagacacatacgtttttttttgtttttgtattttttgtacatcacagctgtttcgagtaaatattattaatatatttgcccctgccttattttggcttgattactttgacatttcctttttgttgggataaaacttgtcggtgtagcgctgtatagaacttacatgtttgcccctttgtaatgggcttcaggcttcagcctcttctatataatataacacccaatccctggattagggttagagttttcattctccaacttggtactagatctaggtttaggtttatctctcttcctccccaccccatagcccctct

SEQ ID NO: 31574 - DNA, 3454 bp, Zea Mays
aaatatttgtgcgctctcttccaggtgggccctttctctccccttctcccctcaccggctcaccctctcccctcgacgatacatttcacctccccggatctatctcgccgcgtcggcgcgctggtcacccgacgaagctaggaggcagtcaaggcggacgaagcgctgcaccaaatttgacgggggatcgagcacaggaggcgtagtggaaaatgtttaagtttctcaaggaggtggtcgcgggatccggatcggggctcaaggacttcccctacaccattggtgagacatacgcatccgcctggggttcatggacacaccaccgcggtacctccaaggatgatgggtcacctgtgtcaattttttctctgtcagggagcaaccctcaggacagacacatggttgctggccgtaatggtgttaagagattacgaacggtgcggcatccaaatatcttatcctttttacacagtactgaagcagaagttgcggatggacctgccatcaaacacacgatttatattgtaacagagcctgttatgccactttctgaaaagctcaaggaactgaatcttggtggtacacagagagatgagtactttgcatgggggcttcatcagatatccaaagctgtgagctttctcaataatgattgcaaacttgttcatgggaatgtatgcttagccagtgttgttgttacacaaaccctggattggaagcttcatgccttcgatgttctgtcagaatttgatgctaacaatgaagcctctggtagccccatgctgcaatttgagtggttagttgggatgcaatacaagccaatggagctgtcaaagtcagattgggcttcaattagaaaatcacctccgtgggccattgattcttggggactggggtgtttaatatatgaactcttttctggtgcaaagctggctagaacagaggaccttcgaaatactgcttcaatcccaaagtctctacttccagattaccagaggctcttgaattccacacctactcgtagactaaatccttcaaaacttattgacaacagcgagtttttccagaataagttagtagagactatccagttcatggaaattcttaatttgaaagacacctttgagaaagacagctttttccggaagcttcccaatatagctgaacagcttccccgtgagatagtcctgaaaaagctgctccctgtcttggcttcttctcttgagtttggctcagctgctgctccagccttaactgttttgttaaagatgggttcctggcttcctacggaccaatttagtatcaaggtcttgccaactattgtcaagctttttgcctccaatgaccgagctatccgagcatgtcttttgcaccacatagatcagtttggggaatcaatgtctgctcaaactgttgatgaacaagtttttcctcatgtagcaactggattttccgatactgatggtactatccgtgaactgacattaaagtcaatgctcatattagcaccaaaactatctcagcgtacaatctcaggatctctcttgaaatatctctctaagctacaggtggatgaagaacctggaatcaggacgaacactacaattcttcttggcaatattgcaagctacatgaatgatggggcttctgcttctgtgttcaaggtttatgtttctgttgaagacacttttttcacagctgacctgactggtactcctgattaagggtattcaacactatctattgctgcagaaacatgattacagaacagaaaagatattacgaaaaccacttctatctaggattaacctgtaatcctgtatatatatgaaaaatagaactttatccatattagcctggagatggattttatttgttaattctagcatagtgtttgcctatttgctgacaaggctttgttatataacagactaggaagagagtactgatcaatgcattcacagttcgtgcactacgtgataccttccctccggccagagcagctggaatcatggcactgagtgtcactggttcatactacgaaatgacagagattgcaactcgcatcctgcctaacattgttgtcctcacatttgacccagatagtgatgtccggaccaaggctttccaggctactgatcagttcttgcaaatagcaaagcaacaccatgaaaagcttaatacgggagacaacagggtggctgaaagtactggtgttaagttaaagcctggaaatgcaggtttacttgggtgggccatgagttctgttacacaaaagggtaaaccttctgaccacgccccaatatctactgcaaatgctaataattctcaagcatcaacagctttgactgccgctccagagactcaggcttccacaccagcgtatgcacaatccacatccagctcccttgatcaagctgcaccagcatcagcaaggtcttcagaagatgggtggggtgagcttgaggatgacaatatccatgaggagaatagtgataaagatggatgggatgatgtagacccgtttgaggacaagccatcaccatctcttctatccaacatacaggctgcacagaaacgtccagtggcgcaaccaaagcaagctgttgcaaactcatctaaatccaacccactaaaagcgccaaaatcagaagacgatcctctatggggtcctatagctgctgcaccacccaaaagcgcagcaaaacctgcagacatcaagccatcaacatcacataacgatgaggatgacctgtggggttcaatagcggcacctcctccaaaatcatctggaaagcctttgaagccagctgcagcgaatagtgacgacctatggggtgccattgcagcacctccaccaggaaccaaagccaggcccttagcctcatcaggtaagggccgaggaacaaagcctgcgcaaccaaaacttggtgctcaaagaataggaagaacatcctcaactggaatgtgatggcttatgatatcaaatgttgtacaagagtgcgaagttttcctttttgtcccccatgctttgagtctgaccaggatgtcattctttgtaaactagcaaaaggtatcaatatatggacacaattttgacaaatgtattaatattgtttcaccattgtgtattaaaatagacacatacgtttttttttgtttttgtattttttgtacatcacagctgtttcgagtaaatattattaatatatttgcccctgccttattttggcttgattactttgacatttcctttttgttgggataaaacttgtcggtgtagcgctgtatagaacttacatgtttgcccctttgtaatgggcttcaggcttcagcctcttctatataatataacacccaatccctggattagggttagagttttcattctccaacttggtactagatctaggtttaggtttatctctcttcctccccaccccatagcccctct

SEQ ID NO: 31575 - DNA, 3154 bp, Zea Mays
aaatatttgtgcgctctcttccaggtgggccctttctctccccttctcccctcaccggctcaccctctcccctcgacgatacatttcacctccccggatctatctcgccgcgtcggcgcgctggtcacccgacgaagctaggaggcagtcaaggcggacgaagcgctgcaccaaatttgacgggggatcgagcacaggaggcgtagtggaaaatgtttaagtttctcaaggaggtggtcgcgggatccggatcggggctcaaggacttcccctacaccattggtgagacatacgcatccgcctggggttcatggacacaccaccgcggtacctccaaggatgatgggtcacctgtgtcaattttttctctgtcagggagcaaccctcaggacagacacatggttgctggccgtaatggtgttaagagattacgaacggtgcggcatccaaatatcttatcctttttacacagtactgaagcagaagttgcggatggacctgccatcaaacacacgatttatattgtaacagagcctgttatgccactttctgaaaagctcaaggaactgaatcttggtggtacacagagagatgagtactttgcatgggggcttcatcagatatccaaagctgtgagctttctcaataatgattgcaaacttgttcatgggaatgtatgcttagccagtgttgttgttacacaaaccctggattggaagcttcatgccttcgatgttctgtcagaatttgatgctaacaatgaagcctctggtagccccatgctgcaatttgagtggttagttgggatgcaatacaagccaatggagctgtcaaagtcagattgggcttcaattagaaaatcacctccgtgggccattgattcttggggactggggtgtttaatatatgaactcttttctggtgcaaagctggctagaacagaggaccttcgaaatactgcttcaatcccaaagattaccagaggctcttgaattccacacctactcgtagactaaatccttcaaaacttattgacaacagcgagtttttccagaataagttagtagagactatccagttcatggaaattcttaatttgaaagacacctttgagaaagacagctttttccggaagcttcccaatatagctgaacagcttccccgtgagatagtcctgaaaaagctgctccctgtcttggcttcttctcttgagtttggctcagctgctgctccagccttaactgttttgttaaagatgggttcctggcttcctacggaccaatttagtatcaaggtcttgccaactattgtcaagctttttgcctccaatgaccgagctatccgagcatgtcttttgcaccacatagatcagtttggggaatcaatgtctgctcaaactgttgatgaacaagtttttcctcatgtagcaactggattttccgatactgatggtactatccgtgaactgacattaaagtcaatgctcatattagcaccaaaactatctcagcgtacaatctcaggatctctcttgaaatatctctctaagctacaggtggatgaagaacctggaatcaggacgaacactacaattcttcttggcaatattgcaagctacatgaatgatgggactaggaagagagtactgatcaatgcattcacagttcgtgcactacgtgataccttccctccggccagagcagctggaatcatggcactgagtgtcactggttcatactacgaaatgacagagattgcaactcgcatcctgcctaacattgttgtcctcacatttgacccagatagtgatgtccggaccaaggctttccaggctactgatcagttcttgcaaatagcaaagcaacaccatgaaaagcttaatacgggagacaacagggtggctgaaagtactggtgttaagttaaagcctggaaatgcaggtttacttgggtgggccatgagttctgttacacaaaagggtaaaccttctgaccacgccccaatatctactgcaaatgctaataattctcaagcatcaacagctttgactgccgctccagagactcaggcttccacaccagcgtatgcacaatccacatccagctcccttgatcaagctgcaccagcatcagcaaggtcttcagaagatgggtggggtgagcttgaggatgacaatatccatgaggagaatagtgataaagatggatgggatgatgtagacccgtttgaggacaagccatcaccatctcttctatccaacatacaggctgcacagaaacgtccagtggcgcaaccaaagcaagctgttgcaaactcatctaaatccaacccactaaaagcgccaaaatcagaagacgatcctctatggggtcctatagctgctgcaccacccaaaagcgcagcaaaacctgcagacatcaagccatcaacatcacataacgatgaggatgacctgtggggttcaatagcggcacctcctccaaaatcatctggaaagcctttgaagccagctgcagcgaatagtgacgacctatggggtgccattgcagcacctccaccaggaaccaaagccaggcccttagcctcatcaggtaagggccgaggaacaaagcctgcgcaaccaaaacttggtgctcaaagaataggaagaacatcctcaactggaatgtgatggcttatgatatcaaatgttgtacaagagtgcgaagttttcctttttgtcccccatgctttgagtctgaccaggatgtcattctttgtaaactagcaaaaggtatcaatatatggacacaattttgacaaatgtattaatattgtttcaccattgtgtattaaaatagacacatacgtttttttttgtttttgtattttttgtacatcacagctgtttcgagtaaatattattaatatatttgcccctgccttattttggcttgattactttgacatttcctttttgttgggataaaacttgtcggtgtagcgctgtatagaacttacatgtttgcccctttgtaatgggcttcaggcttcagcctcttctatataatataacacccaatccctggattagggttagagttttcattctccaacttggtactagatctaggtttaggtttatctctcttcctccccaccccatagcccctct

SEQ ID NO: 31576 - DNA, 3318 bp, Zea Mays
aaatatttgtgcgctctcttccaggtgggccctttctctccccttctcccctcaccggctcaccctctcccctcgacgatacatttcacctccccggatctatctcgccgcgtcggcgcgctggtcacccgacgaagctaggaggcagtcaaggcggacgaagcgctgcaccaaatttgacgggggatcgagcacaggaggcgtagtggaaaatgtttaagtttctcaaggaggtggtcgcgggatccggatcggggctcaaggacttcccctacaccattggtgagacatacgcatccgcctggggttcatggacacaccaccgcggtacctccaaggatgatgggtcacctgtgtcaattttttctctgtcagggagcaaccctcaggacagacacatggttgctggccgtaatggtgttaagagattacgaacggtgcggcatccaaatatcttatcctttttacacagtactgaagcagaagttgcggatggacctgccatcaaacacacgatttatattgtaacagagcctgttatgccactttctgaaaagctcaaggaactgaatcttggtggtacacagagagatgagtactttgcatgggggcttcatcagatatccaaagctgtgagctttctcaataatgattgcaaacttgttcatgggaatgtatgcttagccagtgttgttgttacacaaaccctggattggaagcttcatgccttcgatgttctgtcagaatttgatgctaacaatgaagcctctggtagccccatgctgcaatttgagtggttagttgggatgcaatacaagccaatggagctgtcaaagtcagattgggcttcaattagaaaatcacctccgtgggccattgattcttggggactggggtgtttaatatatgaactcttttctggtgcaaagctggctagaacagaggaccttcgaaatactgcttcaatcccaaagtctctacttccagattaccagaggctcttgaattccacacctactcgtagactaaatccttcaaaacttattgacaacagcgagtttttccagaataagttagtagagactatccagttcatggaaattcttaatttgaaagacacctttgagaaagacagctttttccggaagcttcccaatatagctgaacagcttccccgtgagatagtcctgaaaaagctgctccctgtcttggcttcttctcttgagtttggctcagctgctgctccagccttaactgttttgttaaagatgggttcctggcttcctacggaccaatttagtatcaaggtcttgccaactattgtcaagctttttgcctccaatgaccgagctatccgagcatgtcttttgcaccacatagatcagtttggggaatcaatgtctgctcaaactgttgatgaacaagtttttcctcatgtagcaactggattttccgatactgatggtactatccgtgaactgacattaaagtcaatgctcatattagcaccaaaactatctcagcgtacaatctcaggatctctcttgaaatatctctctaagctacaggtgaagttcacttttggatttgaaaaggtttatactgcagttatgatagacactgctttctgtgacaggtggatgaagaacctggaatcaggacgaacactacaattcttcttggcaatattgcaagctacatgaatgatggggcttctgcttctgtgttcaaggtttatgtttctgttgaagacacttttttcacagctgacctgactggtactcctgattaaggactaggaagagagtactgatcaatgcattcacagttcgtgcactacgtgataccttccctccggccagagcagctggaatcatggcactgagtgtcactggttcatactacgaaatgacagagattgcaactcgcatcctgcctaacattgttgtcctcacatttgacccagatagtgatgtccggaccaaggctttccaggctactgatcagttcttgcaaatagcaaagcaacaccatgaaaagcttaatacgggagacaacagggtggctgaaagtactggtgttaagttaaagcctggaaatgcaggtttacttgggtgggccatgagttctgttacacaaaagggtaaaccttctgaccacgccccaatatctactgcaaatgctaataattctcaagcatcaacagctttgactgccgctccagagactcaggcttccacaccagcgtatgcacaatccacatccagctcccttgatcaagctgcaccagcatcagcaaggtcttcagaagatgggtggggtgagcttgaggatgacaatatccatgaggagaatagtgataaagatggatgggatgatgtagacccgtttgaggacaagccatcaccatctcttctatccaacatacaggctgcacagaaacgtccagtggcgcaaccaaagcaagctgttgcaaactcatctaaatccaacccactaaaagcgccaaaatcagaagacgatcctctatggggtcctatagctgctgcaccacccaaaagcgcagcaaaacctgcagacatcaagccatcaacatcacataacgatgaggatgacctgtggggttcaatagcggcacctcctccaaaatcatctggaaagcctttgaagccagctgcagcgaatagtgacgacctatggggtgccattgcagcacctccaccaggaaccaaagccaggcccttagcctcatcaggtaagggccgaggaacaaagcctgcgcaaccaaaacttggtgctcaaagaataggaagaacatcctcaactggaatgtgatggcttatgatatcaaatgttgtacaagagtgcgaagttttcctttttgtcccccatgctttgagtctgaccaggatgtcattctttgtaaactagcaaaaggtatcaatatatggacacaattttgacaaatgtattaatattgtttcaccattgtgtattaaaatagacacatacgtttttttttgtttttgtattttttgtacatcacagctgtttcgagtaaatattattaatatatttgcccctgccttattttggcttgattactttgacatttcctttttgttgggataaaacttgtcggtgtagcgctgtatagaacttacatgtttgcccctttgtaatgggcttcaggcttcagcctcttctatataatataacacccaatccctggattagggttagagttttcattctccaacttggtactagatctaggtttaggtttatctctcttcctccccaccccatagcccctct

SEQ ID NO: 31577 - DNA, 2204 bp, Zea Mays
ctcggctccagcgagaaactcacgaaaagagaggagccgggaagcaaagcgccgacgactacgccgcaagtcccaacccaacccaccctatccagaatccagggactggactgggaacgcaaggttctgggaaggcgtatgtaggcgttgccgtcttggtgcctcatcccggagctgctacttctcccctggtcgttggtcgattggagccggtagcgcgggggggatatgcacgggaatttcgggccccaggagcagattctgtggccggcgtcggttctcgccggcatcgtcatgtgcggcgccgtatatcagatgactcgacatgtcagttctcgatgtttcaaatgctacagtatgttaaataacaggcaaaaggttgagtggaacaataggggtttctctacactccatgcattggtagctgctgccgtttctttctacctggtcatgatctctgacctcttcaatgaagatgcgcacaatagcataataattgacagaaaatcatggctatccgattgcatgtttggggtctcgatcggttactttttgacagacttgacgatgatcatgctgtattttccttctttaggtggaaatgagtatctcttgcatcacggactttctatgtatgcaattggtcttgctttattgagtggcaaagcacacatgtacatcctcatggtcctcttcaccgaaatcacgactccctttgtgaacctcagatggtatttggacgttgctggtcagaagacttgcaatctttacttatacaatggtgtggctctatttgttggatggctggtacaacaactgctctcacgagtcatcaatttcttttaaagaacaaatttctatacagtcataatgcacatggttcaggaaagttgtctctaaatgctagaacattgcatagttaggttacctggcagctgtagttgctacttttactatttctgctgcttactcacaccagactgcacacagaaatatcccacactgtcaactgcaggattatccttttttaggtttttgaccagattaagtgaaaaatgtaccaattttttatatattttttcatttacaaatcaaatggaaatctaaaacttctgatggaggagcagcttccttgatatgatttgttttgaagatgtgatagctgggggtaatgattagtgatggcttcactatacaaattggtaaggatcattttggatttcttttttttatggaacacaagaagagtcattttgaattttggaatacgggtttttgtcgtaaaaaacttttatgatcttgtttgaattaaccataagcgaacagatgtgtagtctagttggtagtaccttaggtcttaaggttctaatccctacggtagcaaatttaaattaaaaaacatccctcatcggttgtgttccctgatgagccgctttcagcgaaatgcacatggtccgatggccgcagacatgtctcgtaggcacttggtggcgtctagcgcagccgacttttgaggtgtttcttgatatatgtgggagaagtttcttcctgatgcaatgccgtggggacagtttcccctggtattcgagttctttttttgaattaaccataagtatttggatgccgcttctcagttttcaaatataccctaaacattctctttaagtgacccgtttgctctgatggatagttttgattaacttgtctttcgtctgatacagattgctcggataatcttattcatatatatgttcacccatatgtattttcatcttgatcaggtatgggtatttgaattttccaccccgagaggcgagatccatcttcagcttagggttctacagcttggtggcagtgccgtcggtggttgcggtgatgaacgtattttggttctggaagatactcaaggggatggtgaaaaccctttctaggaggaagcacagcgaaaatgggagaacagattagaaggaatgaaggaaggatgctactgaactgtacacatgttcatctcaacgcacttacggcactcgcattcatttctcacacagatgtaattatcttgtcttgccgtcaaagattcaaagtcggaatcccgcaactcttaaattgttgcaacagtgccacatgcaccgttactgaatatatattggccactgtcagtgtcagcgtgctcgcttgggagctgattacacgcgcaaattttg

SEQ ID NO: 31578 - DNA, 1646 bp, Zea Mays
cagcgagaaactcacgaaaagagaggagccgggaagcaaagcgccgacgactacgccgcaagtcccaacccaacccaccctatccagaatccagggactggactgggaacgcaaggttctgggaaggcgtatgtaggcgttgccgtcttggtgcctcatcccggagctgctacttctcccctggtcgttggtcgattggagccggtagcgcgggggggatatgcacgggaatttcgggccccaggagcagattctgtggccggcgtcggttctcgccggcatcgtcatgtgcggcgccgtatatcagatgactcgacatgtcagttctcgatgtttcaaatgctacagtatgttaaataacaggcaaaaggttgagtggaacaataggggtttctctacactccatgcattggtagctgctgccgtttctttctacctggtcatgatctctgacctcttcaatgaagatgcgcacaatagcataataattgacagaaaatcatggctatccgattgcatgtttggggtctcgatcggttactttttgacagacttgacgatgatcatgctgtattttccttctttaggtggaaatgagtatctcttgcatcacggactttctatgtatgcaattggtcttgctttattgagtggcaaagcacacatgtacatcctcatggtcctcttcaccgaaatcacgactccctttgtgaacctcagatggtatttggacgttgctggtcagaagacttgcaatctttacttatacaatggtgtggctctatttgttggatggctggtacaacaactgctctcacgagtcatcaatttcttttaaagaacaaatttctatacagtcataatgcacatggttcaggaaagttgtctctaaatgctagaacattgcatagttaggttacctggcagctgtagttgctacttttactatttctgctgcttactcacaccagactgcacacagaaatatcccacactgtcaactgcaggattatccttttttaggtttttgaccagattaagtgaaaaatgtaccaattttttatatattttttcatttacaaatcaaatggaaatctaaaacttctgatggaggagcagcttccttgatatgatttgttttgaagatgtgatagctgggggtaatgattagtgatggcttcactatacaaattgattgctcggataatcttattcatatatatgttcacccatatgtattttcatcttgatcaggcgagatccatcttcagcttagggttctacagcttggtggcagtgccgtcggtggttgcggtgatgaacgtattttggttctggaagatactcaaggggatggtgaaaaccctttctaggaggaagcacagcgaaaatgggagaacagattagaaggaatgaaggaaggatgctactgaactgtacacatgttcatctcaacgcacttacggcactcgcattcatttctcacacagatgtaattatcttgtcttgccgtcaaagattcaaagtcggaatcccgcaactcttaaattgttgcaacagtgccacatgcaccgttactgaatatatattggccactgtcagtgtcagcgtgctcgcttgggagctgattacacgcgcaaattttg

SEQ ID NO: 31579 - DNA, 1047 bp, Zea Mays
cagcgagaaactcacgaaaagagaggagccgggaagcaaagcgccgacgactacgccgcaagtcccaacccaacccaccctatccagaatccaggtatatcagatgactcgacatgtcagttctcgatgtttcaaatgctacagtatgttaaataacaggcaaaaggttgagtggaacaataggggtttctctacactccatgcattggtagctgctgccgtttctttctacctggtcatgatctctgacctcttcaatgaagatgcgcacaatagcataataattgacagaaaatcatggctatccgattgcatgtttggggtctcgatcggttactttttgacagacttgacgatgatcatgctgtattttccttctttaggtggaaatgagtatctcttgcatcacggactttctatgtatgcaattggtcttgctttattgagtggcaaagcacacatgtacatcctcatggtcctcttcaccgaaatcacgactccctttgtgaacctcagatggtatttggacgttgctggtcagaagacttgcaatctttacttatacaatggtgtggctctatttgttggatggctgattgctcggataatcttattcatatatatgttcacccatatgtattttcatcttgatcaggcgagatccatcttcagcttagggttctacagcttggtggcagtgccgtcggtggttgcggtgatgaacgtattttggttctggaagatactcaaggggatggtgaaaaccctttctaggaggaagcacagcgaaaatgggagaacagattagaaggaatgaaggaaggatgctactgaactgtacacatgttcatctcaacgcacttacggcactcgcattcatttctcacacagatgtaattatcttgtcttgccgtcaaagattcaaagtcggaatcccgcaactcttaaattgttgcaacagtgccacatgcaccgttactgaatatatattggccactgtcagtgtcagcgtgctcgcttgggagctgattacacgcgcaaattttg

SEQ ID NO: 31580 - DNA, 2473 bp, Zea Mays
cagcgagaaactcacgaaaagagaggagccgggaagcaaagcgccgacgactacgccgcaagtcccaacccaacccaccctatccagaatccaggtatatcagatgactcgacatgtcagttctcgatgtttcaaatgctacagtatgttaaataacaggcaaaaggttgagtggaacaataggggtttctctacactccatgcattggtagctgctgccgtttctttctacctggtcatgatctctgacctcttcaatgaagatgcgcacaatagcataataattgacagaaaatcatggctatccgattgcatgtttggggtctcgatcggttactttttgacagacttgacgatgatcatgctgtattttccttctttaggtggaaatgagtatctcttgcatcacggactttctatgtatgcaattggtcttgctttattgagtggcaaagcacacatgtacatcctcatggtcctcttcaccgaaatcacgactccctttgtgaacctcagatggtatttggacgttgctggtcagaagacttgcaatctttacttatacaatggtgtggctctatttgttggatggctggtacaacaactgctctcacgagtcatcaatttcttttaaagaacaaatttctatacagtcataatgcacatggttcaggaaagttgtctctaaatgctagaacattgcatagttaggttacctggcagctgtagttgctacttttactatttctgctgcttactcacaccagactgcacacagaaatatcccacactgtcaactgcaggattatccttttttaggtttttgaccagattaagtgaaaaatgtaccaattttttatatattttttcatttacaaatcaaatggaaatctaaaacttctgatggaggagcagcttccttgatatgatttgttttgaagatgtgatagctgggggtaatgattagtgatggcttcactatacaaattggtaaggatcattttggatttcttttttttatggaacacaagaagagtcattttgaattttggaatacgggtttttgtcgtaaaaaacttttatgatcttgtttgaattaaccataagcgaacagatgtgtagtctagttggtagtaccttaggtcttaaggttctaatccctacggtagcaaatttaaattaaaaaacatccctcatcggttgtgttccctgatgagccgctttcagcgaaatgcacatggtccgatggccgcagacatgtctcgtaggcacttggtggcgtctagcgcagccgacttttgaggtgtttcttgatatatgtgggagaagtttcttcctgatgcaatgccgtggggacagtttcccctggtattcgagttctttttttgaattaaccataagtatttggatgccgcttctcagttttcaaatataccctaaacattctctttaagtgacccgtttgctctgatggatagttttgattaacttgtctttcgtctgatacagattgctcggataatcttattcatatatatgttcacccatatgtattttcatcttgatcaggtatgggtatttgaattttccaccccgagaggtactaccagttagcctgggcatctgtggaaatccattgacttctgacaatgtatatttttagaataagatccacagtgttttttttctgttaacattaaaggtagttcatcaatgttccgcaaaaaaataatgtagaaattgtgaaacactgaatgaagctaataaactatcaaaagttatggttgtttcagcgctttatgattatggtattttgcagctgaaaaaactggcagctacagaattatttgtacataaggtttcatcattaaaacggcttgccacagaaaacatatcttgctgtagcggcatggctgcacgcaactgctggaaaaaaatatatgacatcttgtgttatgctgctacggtgcttctgcagcagcatgaagttttttttcttcttgttaaaataggttttggtgcactcatgaattcatgaagtgtgatcgttttctattgccgttgccacccttgtttcccaggcgagatccatcttcagcttagggttctacagcttggtggcagtgccgtcggtggttgcggtgatgaacgtattttggttctggaagatactcaaggggatggtgaaaaccctttctaggaggaagcacagcgaaaatgggagaacagattagaaggaatgaaggaaggatgctactgaactgtacacatgttcatctcaacgcacttacggcactcgcattcatttctcacacagatgtaattatcttgtcttgccgtcaaagattcaaagtcggaatcccgcaactcttaaattgttgcaacagtgccacatgcaccgttactgaatatatattggccactgtcagtgtcagcgtgctcgcttgggagctgattacacgcgcaaattttg

SEQ ID NO: 31581 - DNA, 1146 bp, Zea Mays
cagcgagaaactcacgaaaagagaggagccgggaagcaaagcgccgacgactacgccgcaagtcccaacccaacccaccctatccagaatccagggactggactgggaacgcaaggttctgggaaggcgtatgtaggcgttgccgtcttggtgcctcatcccggagctgctacttctcccctggtcgttggtcgattggagccggtagcgcgggggggatatgcacgggaatttcgggccccaggagcagattctgtggccggcgtcggttctcgccggcatcgtcatgtgcggcgccgtatatcagatgactcgacatgtcagttctcgatgtttcaaatgctacagtatgttaaataacaggcaaaaggttgagtggaacaataggggtttctctacactccatgcattggtagctgctgccgtttctttctacctggtcatgatctctgacctcttcaatgaagatgcgcacaatagcataataattgacagaaaatcatggctatccgattgcatgtttggggtctcgatcggttactttttgacagacttgacgatgatcatgctgtattttccttctttaggtggaaatgagtatctcttgcatcacggactttctatgtatgcaattggtcttgctttattgagtggcaaagcacacatgtacatcctcatggtcctcttcaccgaaatcacgactccctttgtgaacctcagatggtatgggtatttgaattttccaccccgagaggcgagatccatcttcagcttagggttctacagcttggtggcagtgccgtcggtggttgcggtgatgaacgtattttggttctggaagatactcaaggggatggtgaaaaccctttctaggaggaagcacagcgaaaatgggagaacagattagaaggaatgaaggaaggatgctactgaactgtacacatgttcatctcaacgcacttacggcactcgcattcatttctcacacagatgtaattatcttgtcttgccgtcaaagattcaaagtcggaatcccgcaactcttaaattgttgcaacagtgccacatgcaccgttactgaatatatattggccactgtcagtgtcagcgtgctcgcttgggagctgattacacgcgcaaattttg

SEQ ID NO: 31582 - DNA, 1763 bp, Zea Mays
cagcgagaaactcacgaaaagagaggagccgggaagcaaagcgccgacgactacgccgcaagtcccaacccaacccaccctatccagaatccagggactggactgggaacgcaaggttctgggaaggcgtatgtaggcgttgccgtcttggtgcctcatcccggagctgctacttctcccctggtcgttggtcgattggagccggtagcgcgggggggatatgcacgggaatttcgggccccaggagcagattctgtggccggcgtcggttctcgccggcatcgtcatgtgcggcgccgtatatcagatgactcgacatgtcagttctcgatgtttcaaatgctacagtatgttaaataacaggcaaaaggttgagtggaacaataggggtttctctacactccatgcattggtagctgctgccgtttctttctacctggtcatgatctctgacctcttcaatgaagatgcgcacaatagcataataattgacagaaaatcatggctatccgattgcatgtttggggtctcgatcggttactttttgacagacttgacgatgatcatgctgtattttccttctttaggtggaaatgagtatctcttgcatcacggactttctatgtatgcaattggtcttgctttattgagtggcaaagcacacatgtacatcctcatggtcctcttcaccgaaatcacgactccctttgtgaacctcagatggtatttggacgttgctggtcagaagacttgcaatctttacttatacaatggtgtggctctatttgttggatggctgattgctcggataatcttattcatatatatgttcacccatatgtattttcatcttgatcaggtatgggtatttgaattttccaccccgagaggtactaccagttagcctgggcatctgtggaaatccattgacttctgacaatgtatatttttagaataagatccacagtgttttttttctgttaacattaaaggtagttcatcaatgttccgcaaaaaaataatgtagaaattgtgaaacactgaatgaagctaataaactatcaaaagttatggttgtttcagcgctttatgattatggtattttgcagctgaaaaaactggcagctacagaattatttgtacataaggtttcatcattaaaacggcttgccacagaaaacatatcttgctgtagcggcatggctgcacgcaactgctggaaaaaaatatatgacatcttgtgttatgctgctacggtgcttctgcagcagcatgaagttttttttcttcttgttaaaataggttttggtgcactcatgaattcatgaagtgtgatcgttttctattgccgttgccacccttgtttcccaggcgagatccatcttcagcttagggttctacagcttggtggcagtgccgtcggtggttgcggtgatgaacgtattttggttctggaagatactcaaggggatggtgaaaaccctttctaggaggaagcacagcgaaaatgggagaacagattagaaggaatgaaggaaggatgctactgaactgtacacatgttcatctcaacgcacttacggcactcgcattcatttctcacacagatgtaattatcttgtcttgccgtcaaagattcaaagtcggaatcccgcaactcttaaattgttgcaacagtgccacatgcaccgttactgaatatatattggccactgtcagtgtcagcgtgctcgcttgggagctgattacacgcgcaaattttg

SEQ ID NO: 31583 - DNA, 1018 bp, Zea Mays
cagcgagaaactcacgaaaagagaggagccgggaagcaaagcgccgacgactacgccgcaagtcccaacccaacccaccctatccagaatccaggtatatcagatgactcgacatgtcagttctcgatgtttcaaatgctacagtatgttaaataacaggcaaaaggttgagtggaacaataggggtttctctacactccatgcattggtagctgctgccgtttctttctacctggtcatgatctctgacctcttcaatgaagatgcgcacaatagcataataattgacagaaaatcatggctatccgattgcatgtttggggtctcgatcggttactttttgacagacttgacgatgatcatgctgtattttccttctttaggtggaaatgagtatctcttgcatcacggactttctatgtatgcaattggtcttgctttattgagtggcaaagcacacatgtacatcctcatggtcctcttcaccgaaatcacgactccctttgtgaacctcagatggtatttggacgttgctggtcagaagacttgcaatctttacttatacaatggtgtggctctatttgttggatggctggtatgggtatttgaattttccaccccgagaggcgagatccatcttcagcttagggttctacagcttggtggcagtgccgtcggtggttgcggtgatgaacgtattttggttctggaagatactcaaggggatggtgaaaaccctttctaggaggaagcacagcgaaaatgggagaacagattagaaggaatgaaggaaggatgctactgaactgtacacatgttcatctcaacgcacttacggcactcgcattcatttctcacacagatgtaattatcttgtcttgccgtcaaagattcaaagtcggaatcccgcaactcttaaattgttgcaacagtgccacatgcaccgttactgaatatatattggccactgtcagtgtcagcgtgctcgcttgggagctgattacacgcgcaaattttg

SEQ ID NO: 31584 - DNA, 1952 bp, Zea Mays
cagcgagaaactcacgaaaagagaggagccgggaagcaaagcgccgacgactacgccgcaagtcccaacccaacccaccctatccagaatccagggactggactgggaacgcaaggttctgggaaggcgtatgtaggcgttgccgtcttggtgcctcatcccggagctgctacttctcccctggtcgttggtcgattggagccggtagcgcgggggggatatgcacgggaatttcgggccccaggagcagattctgtggccggcgtcggttctcgccggcatcgtcatgtgcggcgccgtatatcagatgactcgacatgtcagttctcgatgtttcaaatgctacagtatgttaaataacaggcaaaaggttgagtggaacaataggggtttctctacactccatgcattggtagctgctgccgtttctttctacctggtcatgatctctgacctcttcaatgaagatgcgcacaatagcataataattgacagaaaatcatggctatccgattgcatgtttggggtctcgatcggttactttttgacagacttgacgatgatcatgctgtattttccttctttaggtggaaatgagtatgtaagtatcgctctgtcaaatagcacatgctctagttcttaacggagtttttctggttgtggtttcctctgtatcaggagctagttttcctaatattgatgtttcagctcttgcatcacggactttctatgtatgcaattggtcttgctttattgagtggcaaagcacacatgtacatcctcatggtcctcttcaccgaaatcacgactccctttgtgaacctcagatggtatttggacgttgctggtcagaagacttgcaatctttacttatacaatggtgtggctctatttgttggatggctgcttccttgatatgatttgttttgaagatgtgatagctgggggtaatgattagtgatggcttcactatacaaattggtaaggatcattttggatttcttttttttatggaacacaagaagagtcattttgaattttggaatacgggtttttgtcgtaaaaaacttttatgatcttgtttgaattaaccataagcgaacagatgtgtagtctagttggtagtaccttaggtcttaaggttctaatccctacggtagcaaatttaaattaaaaaacatccctcatcggttgtgttccctgatgagccgctttcagcgaaatgcacatggtccgatggccgcagacatgtctcgtaggcacttggtggcgtctagcgcagccgacttttgaggtgtttcttgatatatgtgggagaagtttcttcctgatgcaatgccgtggggacagtttcccctggtattcgagttctttttttgaattaaccataagtatttggatgccgcttctcagttttcaaatataccctaaacattctctttaagtgacccgtttgctctgatggatagttttgattaacttgtctttcgtctgatacagattgctcggataatcttattcatatatatgttcacccatatgtattttcatcttgatcaggcgagatccatcttcagcttagggttctacagcttggtggcagtgccgtcggtggttgcggtgatgaacgtattttggttctggaagatactcaaggggatggtgaaaaccctttctaggaggaagcacagcgaaaatgggagaacagattagaaggaatgaaggaaggatgctactgaactgtacacatgttcatctcaacgcacttacggcactcgcattcatttctcacacagatgtaattatcttgtcttgccgtcaaagattcaaagtcggaatcccgcaactcttaaattgttgcaacagtgccacatgcaccgttactgaatatatattggccactgtcagtgtcagcgtgctcgcttgggagctgattacacgcgcaaattttg

SEQ ID NO: 31585 - DNA, 2247 bp, Zea Mays
cagcgagaaactcacgaaaagagaggagccgggaagcaaagcgccgacgactacgccgcaagtcccaacccaacccaccctatccagaatccagggactggactgggaacgcaaggttctgggaaggcgtatgtaggcgttgccgtcttggtgcctcatcccggagctgctacttctcccctggtcgttggtcgattggagccggtagcgcgggggggatatgcacgggaatttcgggccccaggagcagattctgtggccggcgtcggttctcgccggcatcgtcatgtgcggcgccgtatatcagatgactcgacatgtcagttctcgatgtttcaaatgctacagtatgttaaataacaggcaaaaggttgagtggaacaataggggtttctctacactccatgcattggtagctgctgccgtttctttctacctggtcatgatctctgacctcttcaatgaagatgcgcacaatagcataataattgacagaaaatcatggctatccgattgcatgtttggggtctcgatcggttactttttgacagacttgacgatgatcatgctgtattttccttctttaggtggaaatgagtatctcttgcatcacggactttctatgtatgcaattggtcttgctttattgagtggcaaagcacacatgtacatcctcatggtcctcttcaccgaaatcacgactccctttgtgaacctcagatggtatttggacgttgctggtcagaagacttgcaatctttacttatacaatggtgtggctctatttgttggatggctggtacaacaactgctctcacgagtcatcaatttcttttaaagaacaaatttctatacagtcataatgcacatggttcaggaaagttgtctctaaatgctagaacattgcatagttaggttacctggcagctgtagttgctacttttactatttctgctgcttactcacaccagactgcacacagaaatatcccacactgtcaactgcaggattatccttttttaggtttttgaccagattaagtgaaaaatgtaccaattttttatatattttttcatttacaaatcaaatggaaatctaaaacttctgatggaggagcagcttccttgatatgatttgttttgaagatgtgatagctgggggtaatgattagtgatggcttcactatacaaattggtaaggatcattttggatttcttttttttatggaacacaagaagagtcattttgaattttggaatacgggtttttgtcgtaaaaaacttttatgatcttgtttgaattaaccataagcgaacagatgtgtagtctagttggtagtaccttaggtcttaaggttctaatccctacggtagcaaatttaaattaaaaaacatccctcatcggttgtgttccctgatgagccgctttcagcgaaatgcacatggtccgatggccgcagacatgtctcgtaggcacttggtggcgtctagcgcagccgacttttgaggtgtttcttgatatatgtgggagaagtttcttcctgatgcaatgccgtggggacagtttcccctggtattcgagttctttttttgaattaaccataagtatttggatgccgcttctcagttttcaaatataccctaaacattctctttaagtgacccgtttgctctgatggatagttttgattaacttgtctttcgtctgatacagattgctcggataatcttattcatatatatgttcacccatatgtattttcatcttgatcaggtatgggtatttgaattttccaccccgagaggtactaccagttagcctgggcatctgtggaaatccattgacttctgacaatgcgagatccatcttcagcttagggttctacagcttggtggcagtgccgtcggtggttgcggtgatgaacgtattttggttctggaagatactcaaggggatggtgaaaaccctttctaggaggaagcacagcgaaaatgggagaacagattagaaggaatgaaggaaggatgctactgaactgtacacatgttcatctcaacgcacttacggcactcgcattcatttctcacacagatgtaattatcttgtcttgccgtcaaagattcaaagtcggaatcccgcaactcttaaattgttgcaacagtgccacatgcaccgttactgaatatatattggccactgtcagtgtcagcgtgctcgcttgggagctgattacacgcgcaaattttg

SEQ ID NO: 31586 - DNA, 1241 bp, Zea Mays
cagcgagaaactcacgaaaagagaggagccgggaagcaaagcgccgacgactacgccgcaagtcccaacccaacccaccctatccagaatccagggactggactgggaacgcaaggttctgggaaggcgtatgtaggcgttgccgtcttggtgcctcatcccggagctgctacttctcccctggtcgttggtcgattggagccggtagcgcgggggggatatgcacgggaatttcgggccccaggagcagattctgtggccggcgtcggttctcgccggcatcgtcatgtatatcagatgactcgacatgtcagttctcgatgtttcaaatgctacagtatgttaaataacaggcaaaaggttgagtggaacaataggggtttctctacactccatgcattggtagctgctgccgtttctttctacctggtcatgatctctgacctcttcaatgaagatgcgcacaatagcataataattgacagaaaatcatggctatccgattgcatgtttggggtctcgatcggttactttttgacagacttgacgatgatcatgctgtattttccttctttaggtggaaatgagtatctcttgcatcacggactttctatgtatgcaattggtcttgctttattgagtggcaaagcacacatgtacatcctcatggtcctcttcaccgaaatcacgactccctttgtgaacctcagatggtatttggacgttgctggtcagaagacttgcaatctttacttatacaatggtgtggctctatttgttggatggctgattgctcggataatcttattcatatatatgttcacccatatgtattttcatcttgatcaggcgagatccatcttcagcttagggttctacagcttggtggcagtgccgtcggtggttgcggtgatgaacgtattttggttctggaagatactcaaggggatggtgaaaaccctttctaggaggaagcacagcgaaaatgggagaacagattagaaggaatgaaggaaggatgctactgaactgtacacatgttcatctcaacgcacttacggcactcgcattcatttctcacacagatgtaattatcttgtcttgccgtcaaagattcaaagtcggaatcccgcaactcttaaattgttgcaacagtgccacatgcaccgttactgaatatatattggccactgtcagtgtcagcgtgctcgcttgggagctgattacacgcgcaaattttg

SEQ ID NO: 31587 - DNA, 1703 bp, Zea Mays
cagcgagaaactcacgaaaagagaggagccgggaagcaaagcgccgacgactacgccgcaagtcccaacccaacccaccctatccagaatccagggactggactgggaacgcaaggttctgggaaggcgtatgtaggcgttgccgtcttggtgcctcatcccggagctgctacttctcccctggtcgttggtcgattggagccggtagcgcgggggggatatgcacgggaatttcgggccccaggagcagattctgtggccggcgtcggttctcgccggcatcgtcatgtgcggcgccgtatatcagatgactcgacatgtcagttctcgatgtttcaaatgctacagtatgttaaataacaggcaaaaggttgagtggaacaataggggtttctctacactccatgcattggtagctgctgccgtttctttctacctggtcatgatctctgacctcttcaatgaagatgcgcacaatagcataataattgacagaaaatcatggctatccgattgcatgtttggggtctcgatcggttactttttgacagacttgacgatgatcatgctgtattttccttctttaggtggaaatgagtatctcttgcatcacggactttctatgtatgcaattggtcttgctttattgagtggcaaagcacacatgtacatcctcatggtcctcttcaccgaaatcacgactccctttgtgaacctcagatggtatttggacgttgctggtcagaagacttgcaatctttacttatacaatggtgtggctctatttgttggatggctggtatgggtatttgaattttccaccccgagaggtactaccagttagcctgggcatctgtggaaatccattgacttctgacaatgtatatttttagaataagatccacagtgttttttttctgttaacattaaaggtagttcatcaatgttccgcaaaaaaataatgtagaaattgtgaaacactgaatgaagctaataaactatcaaaagttatggttgtttcagcgctttatgattatggtattttgcagctgaaaaaactggcagctacagaattatttgtacataaggtttcatcattaaaacggcttgccacagaaaacatatcttgctgtagcggcatggctgcacgcaactgctggaaaaaaatatatgacatcttgtgttatgctgctacggtgcttctgcagcagcatgaagttttttttcttcttgttaaaataggttttggtgcactcatgaattcatgaagtgtgatcgttttctattgccgttgccacccttgtttcccaggcgagatccatcttcagcttagggttctacagcttggtggcagtgccgtcggtggttgcggtgatgaacgtattttggttctggaagatactcaaggggatggtgaaaaccctttctaggaggaagcacagcgaaaatgggagaacagattagaaggaatgaaggaaggatgctactgaactgtacacatgttcatctcaacgcacttacggcactcgcattcatttctcacacagatgtaattatcttgtcttgccgtcaaagattcaaagtcggaatcccgcaactcttaaattgttgcaacagtgccacatgcaccgttactgaatatatattggccactgtcagtgtcagcgtgctcgcttgggagctgattacacgcgcaaattttg

SEQ ID NO: 31588 - DNA, 1191 bp, Zea Mays
cagcgagaaactcacgaaaagagaggagccgggaagcaaagcgccgacgactacgccgcaagtcccaacccaacccaccctatccagaatccagggactggactgggaacgcaaggttctgggaaggcgtatgtaggcgttgccgtcttggtgcctcatcccggagctgctacttctcccctggtcgttggtcgattggagccggtagcgcgggggggatatgcacgggaatttcgggccccaggagcagattctgtggccggcgtcggttctcgccggcatcgtcatgtgcggcgccgtatatcagatgactcgacatgtcagttctcgatgtttcaaatgctacagtatgttaaataacaggcaaaaggttgagtggaacaataggggtttctctacactccatgcattggtagctgctgccgtttctttctacctggtcatgatctctgacctcttcaatgaagatgcgcacaatagcataataattgacagaaaatcatggctatccgattgcatgtttggggtctcgatcggttactttttgacagacttgacgatgatcatgctgtattttccttctttaggtggaaatgagtatctcttgcatcacggactttctatgtatgcaattggtcttgctttattgagtggcaaagcacacatgtacatcctcatggtcctcttcaccgaaatcacgactccctttgtgaacctcagatggtatttggacgttgctggtcagaagacttgcaatctttacttatacaatggtgtggctctatttgttggatggctggcgagatccatcttcagcttagggttctacagcttggtggcagtgccgtcggtggttgcggtgatgaacgtattttggttctggaagatactcaaggggatggtgaaaaccctttctaggaggaagcacagcgaaaatgggagaacagattagaaggaatgaaggaaggatgctactgaactgtacacatgttcatctcaacgcacttacggcactcgcattcatttctcacacagatgtaattatcttgtcttgccgtcaaagattcaaagtcggaatcccgcaactcttaaattgttgcaacagtgccacatgcaccgttactgaatatatattggccactgtcagtgtcagcgtgctcgcttgggagctgattacacgcgcaaattttg

SEQ ID NO: 31589 - DNA, 2357 bp, Zea Mays
cagcgagaaactcacgaaaagagaggagccgggaagcaaagcgccgacgactacgccgcaagtcccaacccaacccaccctatccagaatccagggactggactgggaacgcaaggttctgggaaggcgtatgtaggcgttgccgtcttggtgcctcatcccggagctgctacttctcccctggtcgttggtcgattggagccggtagcgcgggggggatatgcacgggaatttcgggccccaggagcagattctgtggccggcgtcggttctcgccggcatcgtcatgtgcggcgccgtatatcagatgactcgacatgtcagttctcgatgtttcaaatgctacagtatgttaaataacaggcaaaaggttgagtggaacaataggggtttctctacactccatgcattggtagctgctgccgtttctttctacctggtcatgatctctgacctcttcaatgaagatgcgcacaatagcataataattgacagaaaatcatggctatccgattgcatgtttggggtctcgatcggttactttttgacagacttgacgatgatcatgctgtattttccttctttaggtggaaatgagtatctcttgcatcacggactttctatgtatgcaattggtcttgctttattgagtggcaaagcacacatgtacatcctcatggtcctcttcaccgaaatcacgactccctttgtgaacctcagatggtatttggacgttgctggtcagaagacttgcaatctttacttatacaatggtgtggctctatttgttggatggctgcttccttgatatgatttgttttgaagatgtgatagctgggggtaatgattagtgatggcttcactatacaaattggtaaggatcattttggatttcttttttttatggaacacaagaagagtcattttgaattttggaatacgggtttttgtcgtaaaaaacttttatgatcttgtttgaattaaccataagcgaacagatgtgtagtctagttggtagtaccttaggtcttaaggttctaatccctacggtagcaaatttaaattaaaaaacatccctcatcggttgtgttccctgatgagccgctttcagcgaaatgcacatggtccgatggccgcagacatgtctcgtaggcacttggtggcgtctagcgcagccgacttttgaggtgtttcttgatatatgtgggagaagtttcttcctgatgcaatgccgtggggacagtttcccctggtattcgagttctttttttgaattaaccataagtatttggatgccgcttctcagttttcaaatataccctaaacattctctttaagtgacccgtttgctctgatggatagttttgattaacttgtctttcgtctgatacagattgctcggataatcttattcatatatatgttcacccatatgtattttcatcttgatcaggtatgggtatttgaattttccaccccgagaggtactaccagttagcctgggcatctgtggaaatccattgacttctgacaatgtatatttttagaataagatccacagtgttttttttctgttaacattaaaggtagttcatcaatgttccgcaaaaaaataatgtagaaattgtgaaacactgaatgaagctaataaactatcaaaagttatggttgtttcagcgctttatgattatggtattttgcagctgaaaaaactggcagctacagaattatttgtacataaggtttcatcattaaaacggcttgccacagaaaacatatcttgctgtagcggcatggctgcacgcaactgctggaaaaaaatatatgacatcttgtgttatgctgctacggtgcttctgcagcagcatgaagttttttttcttcttgttaaaataggttttggtgcactcatgaattcatgaagtgtgatcgttttctattgccgttgccacccttgtttcccaggcgagatccatcttcagcttagggttctacagcttggtggcagtgccgtcggtggttgcggtgatgaacgtattttggttctggaagatactcaaggggatggtgaaaaccctttctaggaggaagcacagcgaaaatgggagaacagattagaaggaatgaaggaaggatgctactgaactgtacacatgttcatctcaacgcacttacggcactcgcattcatttctcacacagatgtaattatcttgtcttgccgtcaaagattcaaagtcggaatcccgcaactcttaaattgttgcaacagtgccacatgcaccgttactgaatatatattggccactgtcagtgtcagcgtgctcgcttgggagctgattacacgcgcaaattttg

SEQ ID NO: 31590 - DNA, 1961 bp, Zea Mays
cagcgagaaactcacgaaaagagaggagccgggaagcaaagcgccgacgactacgccgcaagtcccaacccaacccaccctatccagaatccaggtatatcagatgactcgacatgtcagttctcgatgtttcaaatgctacagtatgttaaataacaggcaaaaggttgagtggaacaataggggtttctctacactccatgcattggtagctgctgccgtttctttctacctggtcatgatctctgacctcttcaatgaagatgcgcacaatagcataataattgacagaaaatcatggctatccgattgcatgtttggggtctcgatcggttactttttgacagacttgacgatgatcatgctgtattttccttctttaggtggaaatgagtatctcttgcatcacggactttctatgtatgcaattggtcttgctttattgagtggcaaagcacacatgtacatcctcatggtcctcttcaccgaaatcacgactccctttgtgaacctcagatggtatttggacgttgctggtcagaagacttgcaatctttacttatacaatggtgtggctctatttgttggatggctggtacaacaactgctctcacgagtcatcaatttcttttaaagaacaaatttctatacagtcataatgcacatggttcaggaaagttgtctctaaatgctagaacattgcatagttaggttacctggcagctgtagttgctacttttactatttctgctgcttactcacaccagactgcacacagaaatatcccacactgtcaactgcaggattatccttttttaggtttttgaccagattaagtgaaaaatgtaccaattttttatatattttttcatttacaaatcaaatggaaatctaaaacttctgatggaggagcagcttccttgatatgatttgttttgaagatgtgatagctgggggtaatgattagtgatggcttcactatacaaattggtaaggatcattttggatttcttttttttatggaacacaagaagagtcattttgaattttggaatacgggtttttgtcgtaaaaaacttttatgatcttgtttgaattaaccataagcgaacagatgtgtagtctagttggtagtaccttaggtcttaaggttctaatccctacggtagcaaatttaaattaaaaaacatccctcatcggttgtgttccctgatgagccgctttcagcgaaatgcacatggtccgatggccgcagacatgtctcgtaggcacttggtggcgtctagcgcagccgacttttgaggtgtttcttgatatatgtgggagaagtttcttcctgatgcaatgccgtggggacagtttcccctggtattcgagttctttttttgaattaaccataagtatttggatgccgcttctcagttttcaaatataccctaaacattctctttaagtgacccgtttgctctgatggatagttttgattaacttgtctttcgtctgatacagattgctcggataatcttattcatatatatgttcacccatatgtattttcatcttgatcaggcgagatccatcttcagcttagggttctacagcttggtggcagtgccgtcggtggttgcggtgatgaacgtattttggttctggaagatactcaaggggatggtgaaaaccctttctaggaggaagcacagcgaaaatgggagaacagattagaaggaatgaaggaaggatgctactgaactgtacacatgttcatctcaacgcacttacggcactcgcattcatttctcacacagatgtaattatcttgtcttgccgtcaaagattcaaagtcggaatcccgcaactcttaaattgttgcaacagtgccacatgcaccgttactgaatatatattggccactgtcagtgtcagcgtgctcgcttgggagctgattacacgcgcaaattttg

SEQ ID NO: 31591 - DNA, 1001 bp, Zea Mays
ctacaaggctacaataacgcgtcaaggtatatcagatgactcgacatgtcagttctcgatgtttcaaatgctacagtatgttaaataacaggcaaaaggttgagtggaacaataggggtttctctacactccatgcattggtagctgctgccgtttctttctacctggtcatgatctctgacctcttcaatgaagatgcgcacaatagcataataattgacagaaaatcatggctatccgattgcatgtttggggtctcgatcggttactttttgacagacttgacgatgatcatgctgtattttccttctttaggtggaaatgagtatctcttgcatcacggactttctatgtatgcaattggtcttgctttattgagtggcaaagcacacatgtacatcctcatggtcctcttcaccgaaatcacgactccctttgtgaacctcagatggtatttggacgttgctggtcagaagacttgcaatctttacttatacaatggtgtggctctatttgttggatggctggtatgggtatttgaattttccaccccgagaggtactaccagttagcctgggcatctgtggaaatccattgacttctgacaatgcgagatccatcttcagcttagggttctacagcttggtggcagtgccgtcggtggttgcggtgatgaacgtattttggttctggaagatactcaaggggatggtgaaaaccctttctaggaggaagcacagcgaaaatgggagaacagattagaaggaatgaaggaaggatgctactgaactgtacacatgttcatctcaacgcacttacggcactcgcattcatttctcacacagatgtaattatcttgtcttgccgtcaaagattcaaagtcggaatcccgcaactcttaaattgttgcaacagtgccacatgcaccgttactgaatatatattggccactgtcagtgtcagcgtgctcgcttgggagctgattacacgcgcaaattttg

SEQ ID NO: 31592 - DNA, 1883 bp, Zea Mays
gccgtcggcgttggggaattgggagtggccgactggggaagccacggcggcaacaccgtcttcgagggctgtcgggataggacgggaggcgaaccagcagaagcgcgagcgagcgtgtgggtaacggctcacggcttctctgcaccaccgccgacccgaggagcacacttaggtggatcggcgagctcatgaagatatgctagtcctcttgctgatcctagagcaatcctgagcctcttcttccaatccagttcatcaaaagaaaagaaccttgctcctttcagctgtggagcacctccactatcttttttagcgattccccatgaagctaaaaattgaatatgcatgaggtcaacaggcactctggataattctaccctaaacagatggcagcatgcatcctatatcctcgtcaaatgcaatatatcaaggcttaccatcttgggggttcgtctgaccgaaacttggccggaggtataccaagagcaagaacaggagtagcaactgctgcatcgccgccatgccgagctaggcctccaaacaagttgcagcagaccactgctaacttcgatgggacgatggttatccttggagaagtctatgcaatgaggtagctaatggacgagtcagctgctaccaaatggcgccgctcttcttcctgaggttggaaccaggcaaagcaaatagcgtttcaagcaaaacaaccttgcatcaccagattcagaagaatctctcgtcaattattgcctggtctgcttaccgggtccaagcaatggatatgctcataggaacgcacgtatgcaagggtatgggaggccttaaacaaggctacagagagctcagttgaactgatcaaaacacggaaatggttgaagaaaaaatgtttctgtattcctcgttgatagtggggcagttgcttcttgtcatcttgtggctggggcctcatcggagtatcccttctaagctttgacccggtcatggctattaattaattagattagtacggccacaggtcggacttttgtgccataggcccacagttcagaaacgtgttatgctgcgctactgctgctagcagttatgatgtggatttggcatcatgacaaggatattacgtaaatatacttcggtccccttgaacgcaccacccatcgtgttaccatgaatcggtttgttcttaggagacctgatggttcatgttcagtaaatttgatttgatgatgaggcagggtttctctcacctgcacagacacaaagcttcaaatcgcaagtcagaaagcatgtgcagacgattatactgctctccttgatccttggaagttcgcagatggttcggaaaggcctggccgttctttttttttcccccttttcgcagatgctattcgttcaccaacacgaatgggtccggaaggccaggttttggatgcacctgctcaactggttcctttgtcgggaagcttgccgtgcagataaattttttatgcatgatgttccagaaaatgcagataaaggacggcttccacacagaaggttcgttctgcacggagacaaagtgtggccggcaggctgatgtttgcattggccgatgaaatgaactgttcgcttcaacttaaagtcagttgttgtatctacaatctatagagacaaaacactataagaatagtagaagccggtacgaattaaagcagactgaaagatttctatatagtaattgtccgtcttttctctcccgctctttcagtgcgtggttgcaattttctattatttcttgactgccactgatcccgtcgtatatgttgcctaagtaaatgttggtgaacatagtttggcagtaccttcctttttttcttgtgtggatgatgaaatgcgggtcttggcctctt

SEQ ID NO: 31593 - DNA, 2279 bp, Zea Mays
ggcggcaacaccgtcttcgagggctgtcgggataggacgggaggcgaaccagcagaagcgcgagcgagcgtgtgggtaacggctcacggcttctctgcaccaccgccgacccgaggagcacacttaggtggatcggcgagctcatgaagatatgctagtcctcttgctgatcctagagcaatcctgagcctcttcttccaatccagttcatcaaaagaaaagaaccttgctcctttcagctgtggagcacctccactatcttttttagcgattccccatgaagctaaaaattgaatatgcatgagaatagtgcacgaagactggccaaaatcatgaatatcagcagaagaatggacagtgccttcattttgagagctacaaacactctgaacctcagggttccacaaagctgttgtgaatgtgaatacttcaaggagtggagctttctaaggtttacaactgatcaccaaagccttggtcttttattgaatgttcccttgagtaggaacaggtaataggtctttggtgccttggtggctcggtgcaagtcacaaactcacaatgctgtcaacacattcctttaaacttttgaacgtggacgtattcgtgacaactggtgtctgttttgttatttaaatttgtgtagcctgctcatccttacagtgtatgctgaggtggactgaaataacgatgtcaatgctttggaagctctgctaatgacatagttactttcattgtttctgcaggtcaacaggcactctggataattctaccctaaacagatggcagcatgcatcctatatcctcgtcaaatgcaatatatcaaggcttaccatcttgggggttcgtctgaccgaaacttggccggaggtataccaagagcaagaacaggagtagcaactgctgcatcgccgccatgccgagctaggcctccaaacaagttgcagcagaccactgctaacttcgatgggacgatggttatccttggagaagtctatgcaatgaggtagctaatggacgagtcagctgctaccaaatggcgccgctcttcttcctgaggttggaaccaggcaaagcaaatagcgtttcaagcaaaacaaccttgcatcaccagattcagaagaatctctcgtcaattattgcctggtctgcttaccgggtccaagcaatggatatgctcataggaacgcacgtatgcaagggtatgggaggccttaaacaaggctacagagagctcagttgaactgatcaaaacacggaaatggttgaagaaaaaatgtttctgtattcctcgttgatagtggggcagttgcttcttgtcatcttgtggctggggcctcatcggagtatcccttctaagctttgacccggtcatggctattaattaattagattagtacggccacaggtcggacttttgtgccataggcccacagttcagaaacgtgttatgctgcgctactgctgctagcagttatgatgtggatttggcatcatgacaaggatattacgtaaatatacttcggtccccttgaacgcaccacccatcgtgttaccatgaatcggtttgttcttaggagacctgatggttcatgttcagtaaatttgatttgatgatgaggcagggtttctctcacctgcacagacacaaagcttcaaatcgcaagtcagaaagcatgtgcagacgattatactgctctccttgatccttggaagttcgcagatggttcggaaaggcctggccgttctttttttttcccccttttcgcagatgctattcgttcaccaacacgaatgggtccggaaggccaggttttggatgcacctgctcaactggttcctttgtcgggaagcttgccgtgcagataaattttttatgcatgatgttccagaaaatgcagataaaggacggcttccacacagaaggttcgttctgcacggagacaaagtgtggccggcaggctgatgtttgcattggccgatgaaatgaactgttcgcttcaacttaaagtcagttgttgtatctacaatctatagagacaaaacactataagaatagtagaagccggtacgaattaaagcagactgaaagatttctatatagtaattgtccgtcttttctctcccgctctttcagtgcgtggttgcaattttctattatttcttgactgccactgatcccgtcgtatatgttgcctaagtaaatgttggtgaacatagtttggcagtaccttcctttttttcttgtgtggatgatgaaatgcgggtcttggcctctt

SEQ ID NO: 31594 - DNA, 2216 bp, Zea Mays
ggcaacaccgtcttcgagggctgtcgggataggacgggaggcgaaccagcagaagcgcgagcgagcgtgtgggtaacggctcacggcttctctgcaccaccgccgacccgaggagcacacttaggtggatcggcgagctcatgaagatatgctagtcctcttgctgatcctagagcaatcctgagcctcttcttccaatccagttcatcaaaagaaaagaaccttgctcctttcagctgtggagcacctccactatcttttttagcgattccccatgaagctaaaaattgaatatgcatgagaatagtgcacgaagactggccaaaatcatgaatatcagcagaagaatggacagtgccttcattttgagagctacaaacactctgaacctcagggttccacaaagctgttgtgaatgtgaatacttcaaggagtggagctttctaaggtaataggtctttggtgccttggtggctcggtgcaagtcacaaactcacaatgctgtcaacacattcctttaaacttttgaacgtggacgtattcgtgacaactggtgtctgttttgttatttaaatttgtgtagcctgctcatccttacagtgtatgctgaggtggactgaaataacgatgtcaatgctttggaagctctgctaatgacatagttactttcattgtttctgcaggtcaacaggcactctggataattctaccctaaacagatggcagcatgcatcctatatcctcgtcaaatgcaatatatcaaggcttaccatcttgggggttcgtctgaccgaaacttggccggaggtataccaagagcaagaacaggagtagcaactgctgcatcgccgccatgccgagctaggcctccaaacaagttgcagcagaccactgctaacttcgatgggacgatggttatccttggagaagtctatgcaatgaggtagctaatggacgagtcagctgctaccaaatggcgccgctcttcttcctgaggttggaaccaggcaaagcaaatagcgtttcaagcaaaacaaccttgcatcaccagattcagaagaatctctcgtcaattattgcctggtctgcttaccgggtccaagcaatggatatgctcataggaacgcacgtatgcaagggtatgggaggccttaaacaaggctacagagagctcagttgaactgatcaaaacacggaaatggttgaagaaaaaatgtttctgtattcctcgttgatagtggggcagttgcttcttgtcatcttgtggctggggcctcatcggagtatcccttctaagctttgacccggtcatggctattaattaattagattagtacggccacaggtcggacttttgtgccataggcccacagttcagaaacgtgttatgctgcgctactgctgctagcagttatgatgtggatttggcatcatgacaaggatattacgtaaatatacttcggtccccttgaacgcaccacccatcgtgttaccatgaatcggtttgttcttaggagacctgatggttcatgttcagtaaatttgatttgatgatgaggcagggtttctctcacctgcacagacacaaagcttcaaatcgcaagtcagaaagcatgtgcagacgattatactgctctccttgatccttggaagttcgcagatggttcggaaaggcctggccgttctttttttttcccccttttcgcagatgctattcgttcaccaacacgaatgggtccggaaggccaggttttggatgcacctgctcaactggttcctttgtcgggaagcttgccgtgcagataaattttttatgcatgatgttccagaaaatgcagataaaggacggcttccacacagaaggttcgttctgcacggagacaaagtgtggccggcaggctgatgtttgcattggccgatgaaatgaactgttcgcttcaacttaaagtcagttgttgtatctacaatctatagagacaaaacactataagaatagtagaagccggtacgaattaaagcagactgaaagatttctatatagtaattgtccgtcttttctctcccgctctttcagtgcgtggttgcaattttctattatttcttgactgccactgatcccgtcgtatatgttgcctaagtaaatgttggtgaacatagtttggcagtaccttcctttttttcttgtgtggatgatgaaatgcgggtcttggcctctt

SEQ ID NO: 31595 - DNA, 2294 bp, Zea Mays
gagggctgtcgggataggacgggaggcgaaccagcagaagcgcgagcgagcgtgtgggtaacggctcacggcttctctgcaccaccgccgacccgaggagcacacttaggtctacctgcaacctgcatttcctctccctctccctctccctctcggctcctctgcagcaccgccggccacgtcctcgaggaccacactggaggtggatcggcgagctcatgaagatatgctagtcctcttgctgatcctagagcaatcctgagcctcttcttccaatccagttcatcaaaagaaaagaaccttgctcctttcagctgtggagcacctccactatcttttttagcgattccccatgaagctaaaaattgaatatgcatgagaatagtgcacgaagactggccaaaatcatgaatatcagcagaagaatggacagtgccttcattttgagagctacaaacactctgaacctcagggttccacaaagctgttgtgaatgtgaatacttcaaggagtggagctttctaaggtaataggtctttggtgccttggtggctcggtgcaagtcacaaactcacaatgctgtcaacacattcctttaaacttttgaacgtggacgtattcgtgacaactggtgtctgttttgttatttaaatttgtgtagcctgctcatccttacagtgtatgctgaggtggactgaaataacgatgtcaatgctttggaagctctgctaatgacatagttactttcattgtttctgcaggtcaacaggcactctggataattctaccctaaacagatggcagcatgcatcctatatcctcgtcaaatgcaatatatcaaggcttaccatcttgggggttcgtctgaccgaaacttggccggaggtataccaagagcaagaacaggagtagcaactgctgcatcgccgccatgccgagctaggcctccaaacaagttgcagcagaccactgctaacttcgatgggacgatggttatccttggagaagtctatgcaatgaggtagctaatggacgagtcagctgctaccaaatggcgccgctcttcttcctgaggttggaaccaggcaaagcaaatagcgtttcaagcaaaacaaccttgcatcaccagattcagaagaatctctcgtcaattattgcctggtctgcttaccgggtccaagcaatggatatgctcataggaacgcacgtatgcaagggtatgggaggccttaaacaaggctacagagagctcagttgaactgatcaaaacacggaaatggttgaagaaaaaatgtttctgtattcctcgttgatagtggggcagttgcttcttgtcatcttgtggctggggcctcatcggagtatcccttctaagctttgacccggtcatggctattaattaattagattagtacggccacaggtcggacttttgtgccataggcccacagttcagaaacgtgttatgctgcgctactgctgctagcagttatgatgtggatttggcatcatgacaaggatattacgtaaatatacttcggtccccttgaacgcaccacccatcgtgttaccatgaatcggtttgttcttaggagacctgatggttcatgttcagtaaatttgatttgatgatgaggcagggtttctctcacctgcacagacacaaagcttcaaatcgcaagtcagaaagcatgtgcagacgattatactgctctccttgatccttggaagttcgcagatggttcggaaaggcctggccgttctttttttttcccccttttcgcagatgctattcgttcaccaacacgaatgggtccggaaggccaggttttggatgcacctgctcaactggttcctttgtcgggaagcttgccgtgcagataaattttttatgcatgatgttccagaaaatgcagataaaggacggcttccacacagaaggttcgttctgcacggagacaaagtgtggccggcaggctgatgtttgcattggccgatgaaatgaactgttcgcttcaacttaaagtcagttgttgtatctacaatctatagagacaaaacactataagaatagtagaagccggtacgaattaaagcagactgaaagatttctatatagtaattgtccgtcttttctctcccgctctttcagtgcgtggttgcaattttctattatttcttgactgccactgatcccgtcgtatatgttgcctaagtaaatgttggtgaacatagtttggcagtaccttcctttttttcttgtgtggatgatgaaatgcgggtcttggcctctt

SEQ ID NO: 31596 - DNA, 2351 bp, Zea Mays
ggctgtcgggataggacgggaggcgaaccagcagaagcgcgagcgagcgtgtgggtaacggctcacggcttctctgcaccaccgccgacccgaggagcacacttaggtctacctgcaacctgcatttcctctccctctccctctccctctcggctcctctgcagcaccgccggccacgtcctcgaggaccacactggaggtggatcggcgagctcatgaagatatgctagtcctcttgctgatcctagagcaatcctgagcctcttcttccaatccagttcatcaaaagaaaagaaccttgctcctttcagctgtggagcacctccactatcttttttagcgattccccatgaagctaaaaattgaatatgcatgagaatagtgcacgaagactggccaaaatcatgaatatcagcagaagaatggacagtgccttcattttgagagctacaaacactctgaacctcagggttccacaaagctgttgtgaatgtgaatacttcaaggagtggagctttctaaggtttacaactgatcaccaaagccttggtcttttattgaatgttcccttgagtaggaacaggtaataggtctttggtgccttggtggctcggtgcaagtcacaaactcacaatgctgtcaacacattcctttaaacttttgaacgtggacgtattcgtgacaactggtgtctgttttgttatttaaatttgtgtagcctgctcatccttacagtgtatgctgaggtggactgaaataacgatgtcaatgctttggaagctctgctaatgacatagttactttcattgtttctgcaggtcaacaggcactctggataattctaccctaaacagatggcagcatgcatcctatatcctcgtcaaatgcaatatatcaaggcttaccatcttgggggttcgtctgaccgaaacttggccggaggtataccaagagcaagaacaggagtagcaactgctgcatcgccgccatgccgagctaggcctccaaacaagttgcagcagaccactgctaacttcgatgggacgatggttatccttggagaagtctatgcaatgaggtagctaatggacgagtcagctgctaccaaatggcgccgctcttcttcctgaggttggaaccaggcaaagcaaatagcgtttcaagcaaaacaaccttgcatcaccagattcagaagaatctctcgtcaattattgcctggtctgcttaccgggtccaagcaatggatatgctcataggaacgcacgtatgcaagggtatgggaggccttaaacaaggctacagagagctcagttgaactgatcaaaacacggaaatggttgaagaaaaaatgtttctgtattcctcgttgatagtggggcagttgcttcttgtcatcttgtggctggggcctcatcggagtatcccttctaagctttgacccggtcatggctattaattaattagattagtacggccacaggtcggacttttgtgccataggcccacagttcagaaacgtgttatgctgcgctactgctgctagcagttatgatgtggatttggcatcatgacaaggatattacgtaaatatacttcggtccccttgaacgcaccacccatcgtgttaccatgaatcggtttgttcttaggagacctgatggttcatgttcagtaaatttgatttgatgatgaggcagggtttctctcacctgcacagacacaaagcttcaaatcgcaagtcagaaagcatgtgcagacgattatactgctctccttgatccttggaagttcgcagatggttcggaaaggcctggccgttctttttttttcccccttttcgcagatgctattcgttcaccaacacgaatgggtccggaaggccaggttttggatgcacctgctcaactggttcctttgtcgggaagcttgccgtgcagataaattttttatgcatgatgttccagaaaatgcagataaaggacggcttccacacagaaggttcgttctgcacggagacaaagtgtggccggcaggctgatgtttgcattggccgatgaaatgaactgttcgcttcaacttaaagtcagttgttgtatctacaatctatagagacaaaacactataagaatagtagaagccggtacgaattaaagcagactgaaagatttctatatagtaattgtccgtcttttctctcccgctctttcagtgcgtggttgcaattttctattatttcttgactgccactgatcccgtcgtatatgttgcctaagtaaatgttggtgaacatagtttggcagtaccttcctttttttcttgtgtggatgatgaaatgcgggtcttggcctctt

SEQ ID NO: 31597 - DNA, 1989 bp, Zea Mays
gtcgggataggacgggaggcgaaccagcagaagcgcgagcgagcgtgtgggtaacggctcacggcttctctgcaccaccgccgacccgaggagcacacttaggtctacctgcaacctgcatttcctctccctctccctctccctctcggctcctctgcagcaccgccggccacgtcctcgaggaccacactggaggtggatcggcgagctcatgaagatatgctagtcctcttgctgatcctagagcaatcctgagcctcttcttccaatccagttcatcaaaagaaaagaaccttgctcctttcagctgtggagcacctccactatcttttttagcgattccccatgaagctaaaaattgaatatgcatgagtgtatgctgaggtggactgaaataacgatgtcaatgctttggaagctctgctaatgacatagttactttcattgtttctgcaggtcaacaggcactctggataattctaccctaaacagatggcagcatgcatcctatatcctcgtcaaatgcaatatatcaaggcttaccatcttgggggttcgtctgaccgaaacttggccggaggtataccaagagcaagaacaggagtagcaactgctgcatcgccgccatgccgagctaggcctccaaacaagttgcagcagaccactgctaacttcgatgggacgatggttatccttggagaagtctatgcaatgaggtagctaatggacgagtcagctgctaccaaatggcgccgctcttcttcctgaggttggaaccaggcaaagcaaatagcgtttcaagcaaaacaaccttgcatcaccagattcagaagaatctctcgtcaattattgcctggtctgcttaccgggtccaagcaatggatatgctcataggaacgcacgtatgcaagggtatgggaggccttaaacaaggctacagagagctcagttgaactgatcaaaacacggaaatggttgaagaaaaaatgtttctgtattcctcgttgatagtggggcagttgcttcttgtcatcttgtggctggggcctcatcggagtatcccttctaagctttgacccggtcatggctattaattaattagattagtacggccacaggtcggacttttgtgccataggcccacagttcagaaacgtgttatgctgcgctactgctgctagcagttatgatgtggatttggcatcatgacaaggatattacgtaaatatacttcggtccccttgaacgcaccacccatcgtgttaccatgaatcggtttgttcttaggagacctgatggttcatgttcagtaaatttgatttgatgatgaggcagggtttctctcacctgcacagacacaaagcttcaaatcgcaagtcagaaagcatgtgcagacgattatactgctctccttgatccttggaagttcgcagatggttcggaaaggcctggccgttctttttttttcccccttttcgcagatgctattcgttcaccaacacgaatgggtccggaaggccaggttttggatgcacctgctcaactggttcctttgtcgggaagcttgccgtgcagataaattttttatgcatgatgttccagaaaatgcagataaaggacggcttccacacagaaggttcgttctgcacggagacaaagtgtggccggcaggctgatgtttgcattggccgatgaaatgaactgttcgcttcaacttaaagtcagttgttgtatctacaatctatagagacaaaacactataagaatagtagaagccggtacgaattaaagcagactgaaagatttctatatagtaattgtccgtcttttctctcccgctctttcagtgcgtggttgcaattttctattatttcttgactgccactgatcccgtcgtatatgttgcctaagtaaatgttggtgaacatagtttggcagtaccttcctttttttcttgtgtggatgatgaaatgcgggtcttggcctctt

SEQ ID NO: 31598 - DNA, 1903 bp, Zea Mays
gggataggacgggaggcgaaccagcagaagcgcgagcgagcgtgtgggtaacggctcacggcttctctgcaccaccgccgacccgaggagcacacttaggtctacctgcaacctgcatttcctctccctctccctctccctctcggctcctctgcagcaccgccggccacgtcctcgaggaccacactggaggtggatcggcgagctcatgaagatatgctagtcctcttgctgatcctagagcaatcctgagcctcttcttccaatccagttcatcaaaagaaaagaaccttgctcctttcagctgtggagcacctccactatcttttttagcgattccccatgaagctaaaaattgaatatgcatgaggtcaacaggcactctggataattctaccctaaacagatggcagcatgcatcctatatcctcgtcaaatgcaatatatcaaggcttaccatcttgggggttcgtctgaccgaaacttggccggaggtataccaagagcaagaacaggagtagcaactgctgcatcgccgccatgccgagctaggcctccaaacaagttgcagcagaccactgctaacttcgatgggacgatggttatccttggagaagtctatgcaatgaggtagctaatggacgagtcagctgctaccaaatggcgccgctcttcttcctgaggttggaaccaggcaaagcaaatagcgtttcaagcaaaacaaccttgcatcaccagattcagaagaatctctcgtcaattattgcctggtctgcttaccgggtccaagcaatggatatgctcataggaacgcacgtatgcaagggtatgggaggccttaaacaaggctacagagagctcagttgaactgatcaaaacacggaaatggttgaagaaaaaatgtttctgtattcctcgttgatagtggggcagttgcttcttgtcatcttgtggctggggcctcatcggagtatcccttctaagctttgacccggtcatggctattaattaattagattagtacggccacaggtcggacttttgtgccataggcccacagttcagaaacgtgttatgctgcgctactgctgctagcagttatgatgtggatttggcatcatgacaaggatattacgtaaatatacttcggtccccttgaacgcaccacccatcgtgttaccatgaatcggtttgttcttaggagacctgatggttcatgttcagtaaatttgatttgatgatgaggcagggtttctctcacctgcacagacacaaagcttcaaatcgcaagtcagaaagcatgtgcagacgattatactgctctccttgatccttggaagttcgcagatggttcggaaaggcctggccgttctttttttttcccccttttcgcagatgctattcgttcaccaacacgaatgggtccggaaggccaggttttggatgcacctgctcaactggttcctttgtcgggaagcttgccgtgcagataaattttttatgcatgatgttccagaaaatgcagataaaggacggcttccacacagaaggttcgttctgcacggagacaaagtgtggccggcaggctgatgtttgcattggccgatgaaatgaactgttcgcttcaacttaaagtcagttgttgtatctacaatctatagagacaaaacactataagaatagtagaagccggtacgaattaaagcagactgaaagatttctatatagtaattgtccgtcttttctctcccgctctttcagtgcgtggttgcaattttctattatttcttgactgccactgatcccgtcgtatatgttgcctaagtaaatgttggtgaacatagtttggcagtaccttcctttttttcttgtgtggatgatgaaatgcgggtcttggcctctt

SEQ ID NO: 31599 - DNA, 1787 bp, Zea Mays
gaaccagcagaagcgcgagcgagcgtgtgggtaacggctcacggcttctctgcaccaccgccgacccgaggagcacacttaggtctacctgcaacctgcatttcctctccctctccctctccctctcggctcctctgcagcaccgccggccacgtcctcgaggaccacactggaggtggatcggcgagctcatgaagatatgctagtcctcttgctgatcctagagcaatcctgagcctcttcttccaatccaggtcaacaggcactctggataattctaccctaaacagatggcagcatgcatcctatatcctcgtcaaatgcaatatatcaaggcttaccatcttgggggttcgtctgaccgaaacttggccggaggtataccaagagcaagaacaggagtagcaactgctgcatcgccgccatgccgagctaggcctccaaacaagttgcagcagaccactgctaacttcgatgggacgatggttatccttggagaagtctatgcaatgaggtagctaatggacgagtcagctgctaccaaatggcgccgctcttcttcctgaggttggaaccaggcaaagcaaatagcgtttcaagcaaaacaaccttgcatcaccagattcagaagaatctctcgtcaattattgcctggtctgcttaccgggtccaagcaatggatatgctcataggaacgcacgtatgcaagggtatgggaggccttaaacaaggctacagagagctcagttgaactgatcaaaacacggaaatggttgaagaaaaaatgtttctgtattcctcgttgatagtggggcagttgcttcttgtcatcttgtggctggggcctcatcggagtatcccttctaagctttgacccggtcatggctattaattaattagattagtacggccacaggtcggacttttgtgccataggcccacagttcagaaacgtgttatgctgcgctactgctgctagcagttatgatgtggatttggcatcatgacaaggatattacgtaaatatacttcggtccccttgaacgcaccacccatcgtgttaccatgaatcggtttgttcttaggagacctgatggttcatgttcagtaaatttgatttgatgatgaggcagggtttctctcacctgcacagacacaaagcttcaaatcgcaagtcagaaagcatgtgcagacgattatactgctctccttgatccttggaagttcgcagatggttcggaaaggcctggccgttctttttttttcccccttttcgcagatgctattcgttcaccaacacgaatgggtccggaaggccaggttttggatgcacctgctcaactggttcctttgtcgggaagcttgccgtgcagataaattttttatgcatgatgttccagaaaatgcagataaaggacggcttccacacagaaggttcgttctgcacggagacaaagtgtggccggcaggctgatgtttgcattggccgatgaaatgaactgttcgcttcaacttaaagtcagttgttgtatctacaatctatagagacaaaacactataagaatagtagaagccggtacgaattaaagcagactgaaagatttctatatagtaattgtccgtcttttctctcccgctctttcagtgcgtggttgcaattttctattatttcttgactgccactgatcccgtcgtatatgttgcctaagtaaatgttggtgaacatagtttggcagtaccttcctttttttcttgtgtggatgatgaaatgcgggtcttggcctctt

SEQ ID NO: 31600 - DNA, 2366 bp, Zea Mays
agcaggaattctgcctgtaaatctgtttgaattcattgccctgcagagtatatttcattgctagttcattgcatcagtataggcaaagcagcagcagaggtaacaagaacagagttgggattatgattttctatcaatttaatagttcttacaagaatgagagctgcaccaagtttcctaattcttcggggatgcctcctgtgaagctgcacccagccaagattctgaagattacaacgcattagaatagtgcacgaagactggccaaaatcatgaatatcagcagaagaatggacagtgccttcattttgagagctacaaacactctgaacctcagggttccacaaagctgttgtgaatgtgaatacttcaaggagtggagctttctaaggtttacaactgatcaccaaagccttggtcttttattgaatgttcccttgagtaggaacaggtaataggtctttggtgccttggtggctcggtgcaagtcacaaactcacaatgctgtcaacacattcctttaaacttttgaacgtggacgtattcgtgacaactggtgtctgttttgttatttaaatttgtgtagcctgctcatccttacaggttgtaacttcatgtcgctgggatacagtttttttttgtcatttttaatacttttgcatttgcatgtcatgtagttgatattgttttttcattgatccagtgtatgctgaggtggactgaaataacgatgtcaatgctttggaagctctgctaatgacatagttactttcattgtttctgcaggtttctttcttgttttgcccacatcttaaattgaactttgtttattggtcaacaggcactctggataattctaccctaaacagatggcagcatgcatcctatatcctcgtcaaatgcaatatatcaaggcttaccatcttgggggttcgtctgaccgaaacttggccggaggtataccaagagcaagaacaggagtagcaactgctgcatcgccgccatgccgagctaggcctccaaacaagttgcagcagaccactgctaacttcgatgggacgatggttatccttggagaagtctatgcaatgaggtagctaatggacgagtcagctgctaccaaatggcgccgctcttcttcctgaggttggaaccaggcaaagcaaatagcgtttcaagcaaaacaaccttgcatcaccagattcagaagaatctctcgtcaattattgcctggtctgcttaccgggtccaagcaatggatatgctcataggaacgcacgtatgcaagggtatgggaggccttaaacaaggctacagagagctcagttgaactgatcaaaacacggaaatggttgaagaaaaaatgtttctgtattcctcgttgatagtggggcagttgcttcttgtcatcttgtggctggggcctcatcggagtatcccttctaagctttgacccggtcatggctattaattaattagattagtacggccacaggtcggacttttgtgccataggcccacagttcagaaacgtgttatgctgcgctactgctgctagcagttatgatgtggatttggcatcatgacaaggatattacgtaaatatacttcggtccccttgaacgcaccacccatcgtgttaccatgaatcggtttgttcttaggagacctgatggttcatgttcagtaaatttgatttgatgatgaggcagggtttctctcacctgcacagacacaaagcttcaaatcgcaagtcagaaagcatgtgcagacgattatactgctctccttgatccttggaagttcgcagatggttcggaaaggcctggccgttctttttttttcccccttttcgcagatgctattcgttcaccaacacgaatgggtccggaaggccaggttttggatgcacctgctcaactggttcctttgtcgggaagcttgccgtgcagataaattttttatgcatgatgttccagaaaatgcagataaaggacggcttccacacagaaggttcgttctgcacggagacaaagtgtggccggcaggctgatgtttgcattggccgatgaaatgaactgttcgcttcaacttaaagtcagttgttgtatctacaatctatagagacaaaacactataagaatagtagaagccggtacgaattaaagcagactgaaagatttctatatagtaattgtccgtcttttctctcccgctctttcagtgcgtggttgcaattttctattatttcttgactgccactgatcccgtcgtatatgttgcctaagtaaatgttggtgaacatagtttggcagtaccttcctttttttcttgtgtggatgatgaaatgcgggtcttggcctctt

SEQ ID NO: 31601 - DNA, 1676 bp, Zea Mays
ctcctgtgaagctgcacccagccaagattctgaagattacaacgcattaggttgtatgtgtggctgttgggaagagggttgaaggagggccgtgcgggaaccgtgatgaacttgagaagagcaccatgcctggcgaagaacaggtcaacaggcactctggataattctaccctaaacagatggcagcatgcatcctatatcctcgtcaaatgcaatatatcaaggcttaccatcttgggggttcgtctgaccgaaacttggccggaggtataccaagagcaagaacaggagtagcaactgctgcatcgccgccatgccgagctaggcctccaaacaagttgcagcagaccactgctaacttcgatgggacgatggttatccttggagaagtctatgcaatgaggtagctaatggacgagtcagctgctaccaaatggcgccgctcttcttcctgaggttggaaccaggcaaagcaaatagcgtttcaagcaaaacaaccttgcatcaccagattcagaagaatctctcgtcaattattgcctggtctgcttaccgggtccaagcaatggatatgctcataggaacgcacgtatgcaagggtatgggaggccttaaacaaggctacagagagctcagttgaactgatcaaaacacggaaatggttgaagaaaaaatgtttctgtattcctcgttgatagtggggcagttgcttcttgtcatcttgtggctggggcctcatcggagtatcccttctaagctttgacccggtcatggctattaattaattagattagtacggccacaggtcggacttttgtgccataggcccacagttcagaaacgtgttatgctgcgctactgctgctagcagttatgatgtggatttggcatcatgacaaggatattacgtaaatatacttcggtccccttgaacgcaccacccatcgtgttaccatgaatcggtttgttcttaggagacctgatggttcatgttcagtaaatttgatttgatgatgaggcagggtttctctcacctgcacagacacaaagcttcaaatcgcaagtcagaaagcatgtgcagacgattatactgctctccttgatccttggaagttcgcagatggttcggaaaggcctggccgttctttttttttcccccttttcgcagatgctattcgttcaccaacacgaatgggtccggaaggccaggttttggatgcacctgctcaactggttcctttgtcgggaagcttgccgtgcagataaattttttatgcatgatgttccagaaaatgcagataaaggacggcttccacacagaaggttcgttctgcacggagacaaagtgtggccggcaggctgatgtttgcattggccgatgaaatgaactgttcgcttcaacttaaagtcagttgttgtatctacaatctatagagacaaaacactataagaatagtagaagccggtacgaattaaagcagactgaaagatttctatatagtaattgtccgtcttttctctcccgctctttcagtgcgtggttgcaattttctattatttcttgactgccactgatcccgtcgtatatgttgcctaagtaaatgttggtgaacatagtttggcagtaccttcctttttttcttgtgtggatgatgaaatgcgggtcttggcctctt

SEQ ID NO: 31602 - DNA, 2003 bp, Zea Mays
agaagagcaccatgcctggcgaagaacagaatagtgcacgaagactggccaaaatcatgaatatcagcagaagaatggacagtgccttcattttgagagctacaaacactctgaacctcagggttccacaaagctgttgtgaatgtgaatacttcaaggagtggagctttctaaggtttacaactgatcaccaaagccttggtcttttattgaatgttcccttgagtaggaacaggtaataggtctttggtgccttggtggctcggtgcaagtcacaaactcacaatgctgtcaacacattcctttaaacttttgaacgtggacgtattcgtgacaactggtgtctgttttgttatttaaatttgtgtagcctgctcatccttacagtgtatgctgaggtggactgaaataacgatgtcaatgctttggaagctctgctaatgacatagttactttcattgtttctgcaggtcaacaggcactctggataattctaccctaaacagatggcagcatgcatcctatatcctcgtcaaatgcaatatatcaaggcttaccatcttgggggttcgtctgaccgaaacttggccggaggtataccaagagcaagaacaggagtagcaactgctgcatcgccgccatgccgagctaggcctccaaacaagttgcagcagaccactgctaacttcgatgggacgatggttatccttggagaagtctatgcaatgaggtagctaatggacgagtcagctgctaccaaatggcgccgctcttcttcctgaggttggaaccaggcaaagcaaatagcgtttcaagcaaaacaaccttgcatcaccagattcagaagaatctctcgtcaattattgcctggtctgcttaccgggtccaagcaatggatatgctcataggaacgcacgtatgcaagggtatgggaggccttaaacaaggctacagagagctcagttgaactgatcaaaacacggaaatggttgaagaaaaaatgtttctgtattcctcgttgatagtggggcagttgcttcttgtcatcttgtggctggggcctcatcggagtatcccttctaagctttgacccggtcatggctattaattaattagattagtacggccacaggtcggacttttgtgccataggcccacagttcagaaacgtgttatgctgcgctactgctgctagcagttatgatgtggatttggcatcatgacaaggatattacgtaaatatacttcggtccccttgaacgcaccacccatcgtgttaccatgaatcggtttgttcttaggagacctgatggttcatgttcagtaaatttgatttgatgatgaggcagggtttctctcacctgcacagacacaaagcttcaaatcgcaagtcagaaagcatgtgcagacgattatactgctctccttgatccttggaagttcgcagatggttcggaaaggcctggccgttctttttttttcccccttttcgcagatgctattcgttcaccaacacgaatgggtccggaaggccaggttttggatgcacctgctcaactggttcctttgtcgggaagcttgccgtgcagataaattttttatgcatgatgttccagaaaatgcagataaaggacggcttccacacagaaggttcgttctgcacggagacaaagtgtggccggcaggctgatgtttgcattggccgatgaaatgaactgttcgcttcaacttaaagtcagttgttgtatctacaatctatagagacaaaacactataagaatagtagaagccggtacgaattaaagcagactgaaagatttctatatagtaattgtccgtcttttctctcccgctctttcagtgcgtggttgcaattttctattatttcttgactgccactgatcccgtcgtatatgttgcctaagtaaatgttggtgaacatagtttggcagtaccttcctttttttcttgtgtggatgatgaaatgcgggtcttggcctctt

SEQ ID NO: 31603 - DNA, 2002 bp, Zea Mays
aaagagcaccacgcccgacaaagaacagaatagtgcacgaagactggccaaaatcatgaatatcagcagaagaatggacagtgccttcattttgagagctacaaacactctgaacctcagggttccacaaagctgttgtgaatgtgaatacttcaaggagtggagctttctaaggtttacaactgatcaccaaagccttggtcttttattgaatgttcccttgagtaggaacaggtaataggtctttggtgccttggtggctcggtgcaagtcacaaactcacaatgctgtcaacacattcctttaaacttttgaacgtggacgtattcgtgacaactggtgtctgttttgttatttaaatttgtgtagcctgctcatccttacagtgtatgctgaggtggactgaaataacgatgtcaatgctttggaagctctgctaatgacatagttactttcattgtttctgcaggtcaacaggcactctggataattctaccctaaacagatggcagcatgcatcctatatcctcgtcaaatgcaatatatcaaggcttaccatcttgggggttcgtctgaccgaaacttggccggaggtataccaagagcaagaacaggagtagcaactgctgcatcgccgccatgccgagctaggcctccaaacaagttgcagcagaccactgctaacttcgatgggacgatggttatccttggagaagtctatgcaatgaggtagctaatggacgagtcagctgctaccaaatggcgccgctcttcttcctgaggttggaaccaggcaaagcaaatagcgtttcaagcaaaacaaccttgcatcaccagattcagaagaatctctcgtcaattattgcctggtctgcttaccgggtccaagcaatggatatgctcataggaacgcacgtatgcaagggtatgggaggccttaaacaaggctacagagagctcagttgaactgatcaaaacacggaaatggttgaagaaaaaatgtttctgtattcctcgttgatagtggggcagttgcttcttgtcatcttgtggctggggcctcatcggagtatcccttctaagctttgacccggtcatggctattaattaattagattagtacggccacaggtcggacttttgtgccataggcccacagttcagaaacgtgttatgctgcgctactgctgctagcagttatgatgtggatttggcatcatgacaaggatattacgtaaatatacttcggtccccttgaacgcaccacccatcgtgttaccatgaatcggtttgttcttaggagacctgatggttcatgttcagtaaatttgatttgatgatgaggcagggtttctctcacctgcacagacacaaagcttcaaatcgcaagtcagaaagcatgtgcagacgattatactgctctccttgatccttggaagttcgcagatggttcggaaaggcctggccgttctttttttttcccccttttcgcagatgctattcgttcaccaacacgaatgggtccggaaggccaggttttggatgcacctgctcaactggttcctttgtcgggaagcttgccgtgcagataaattttttatgcatgatgttccagaaaatgcagataaaggacggcttccacacagaaggttcgttctgcacggagacaaagtgtggccggcaggctgatgtttgcattggccgatgaaatgaactgttcgcttcaacttaaagtcagttgttgtatctacaatctatagagacaaaacactataagaatagtagaagccggtacgaattaaagcagactgaaagatttctatatagtaattgtccgtcttttctctcccgctctttcagtgcgtggttgcaattttctattatttcttgactgccactgatcccgtcgtatatgttgcctaagtaaatgttggtgaacatagtttggcagtaccttcctttttttcttgtgtggatgatgaaatgcgggtcttggcctctt

SEQ ID NO: 31604 - DNA, 2028 bp, Zea Mays
ctacccctcctcccctacgctcccccgtcccctcctccctctcttttcaaactcactcggtcactccatatttcgttaccatttcccacctccggaaaatacttttttgcatttttatcccctcgttctcctttccccgcgctctctccctctctctccgatccaaactaccgacaaacgccgccacccgaattcgaaaccctaggcggccgctgtaaaacacgtgtggctgtagtgcctctcgttcgtcggagccggcccgcgtcggtggcggcagccggccatgtcgacggaggacgagaagctcctcaaggaggcgaagaagttgccgtgggacgagcggctgcagcataagaactggaaggtgaggaatgacgcaaacatcgacctcgccgccctatgcgactccatcaccgaccctaaggacgcccgcctccgcgagttcgggccgttgtttaagaagacggttgcagattccaatgcgccggtacaggagaaggcgctcgacgcccttctcgcgttccagcgagctgctgacgccgatgcatcaagatacgcgaaggaggtttgtgatgcaattgtggccaagtgcctcactggccgaccaaagactgtcgagaaagctcaagctgcattcctcctatgggtggaactggaggcagcagaggtcttccttgaatctatggagaaggctgtgaagaacaaagtggctaaagcagttgtacctgctattgatgtgatgtttcaagcactcagcgaatttggaactaaggtagtgccacccaaaaagattctgaagatgcttccggagctgtttgaccatccagaccagaatgtccgggcttcttctaagggtttgacactagagctttgtcggtggattggcaaagaccctgtaaagtctattttgttcgagaagatgagggatactatgaaaaaggagctggaagcagagttggcaaacgtgtctggatttgctaagccaactcgaaaaataagatctgaacaagagaaggaacttgaggaggaggctgtgccagagacaagtggggctaacacttctgaagaggctgtggcagatgcccctgtggagatcgatgaatacgaccttgttgatcctgtagacattttaaccccactagaaaagtctggattttgggacggtgtgaaagcaactaaatggtcagagagaagggatgctgtggcagagctaaccaagcttgcgtcagcaaaaaaaattgctcctggtgattttcatgaaatttgccggacactaaagaagctcatcacagatgttaatttggctgtttcggtggaagctactcaggcaatagggaatttagctagaggtttaagagcccatttttctggaaatgcccgaatgctcctttcggttttacttgaaaaattgaaagaaaaaaagccgacaatgacagaagcactatctcaaacacttcaagcgatgcacaagtctggctgttttacacttattgatgtgattgaagatgttcgagtggctgtaaaaaacaaggtgccccttgttcgttcctcaacgctgacctgggttgcattttgcattgaaacaagcaataaagcgactgtactaaagttgcacaaggaatatgttcctatctgcatggagtgcttgaatgatggtactccagaagtacgagatgcttctttttctgttttaactgccatagccaagatggttggtatgaaaccattggaacgatccctggagaaattagatgatgtgaggaaaaagaagttgtcagatatgataggttcttccagtgacactgttctgagttcagggacagtattatatgaagatgtttgcaacctgtcagccttcttctcccaagtgcctatttacagttcttatgctgcgttgttttttttgaaattaccatttgtgattgtgttttgttagttatggcttaaaaaatattttatgttgttactgagtaaacaacaacaaaaagccttttagttttaagcaagtcggggtaggctagaattgga

SEQ ID NO: 31605 - DNA, 2053 bp, Zea Mays
acccctcctcccctacgctcccccgtcccctcctccctctcttttcaaactcactcggtcactccatatttcgttaccatttcccacctccggaaaatacttttttgcatttttatcccctcgttctcctttccccgcgctctctccctctctctccgatccaaactaccgacaaacgccgccacccgaattcgaaaccctaggcggccgctgtaaaacacgtgtggctgtagtgcctctcgttcgtcggagccggcccgcgtcggtggcggcagccggccatgtcgacggaggacgagaagctcctcaaggaggcgaagaagttgccgtgggacgagcggctgcagcataagaactggaaggtgaggaatgacgcaaacatcgacctcgccgccctatgcgactccatcaccgaccctaaggacgcccgcctccgcgagttcgggccgttgtttaagaagacggttgcagattccaatgcgccggtacaggagaaggcgctcgacgcccttctcgcgttccagcgagctgctgacgccgatgcatcaagatacgcgaaggaggtttgtgatgcaattgtggccaagtgcctcactggccgaccaaagactgtcgagaaagctcaagctgcattcctcctatgggtggaactggaggcagcagaggtcttccttgaatctatggagaaggctgtgaagaacaaagtggctaaagcagttgtacctgctattgatgtgatgtttcaagcactcagcgaatttggaactaaggtagtgccacccaaaaagattctgaagatgcttccggagctgtttgaccatccagaccagaatgtccgggcttcttctaagggtttgacactagagctttgtcggtggattggcaaagaccctgtaaagtctattttgttcgagaagatgagggatactatgaaaaaggagctggaagcagagttggcaaacgtgtctggatttgctaagccaactcgaaaaataagatctgaacaagagaaggaacttgaggaggaggctgtgccagagacaagtggggctaacacttctgaagaggctgtggcagatgcccctgtggagatcgatgaatacgaccttgttgatcctgtagacattttaaccccactagaaaagtctggattttgggacggtgtgaaagcaactaaatggtcagagagaagggatgctgtggcagagctaaccaagcttgcgtcagcaaaaaaaattgctcctggtgattttcatgaaatttgccggacactaaagaagctcatcacagatgttaatttggctgtttcggtggaagctactcaggcaatagggaatttagctagaggtttaagagcccatttttctggaaatgcccgaatgctcctttcggttttacttgaaaaattgaaagaaaaaaagccgacaatgacagaagcactatctcaaacacttcaagcgatgcacaagtctggctgttttacacttattgatgtgattgaagatgttcgagtggctgtaaaaaacaaggtgccccttgttcgttcctcaacgctgacctgggttgcattttgcattgaaacaagcaataaagcgactgtactaaagttgcacaaggaatatgttcctatctgcatggagtgcttgaatgatggtactccagaagtacgagatgcttctttttctgttttaactgccatagccaagatggttggtatgaaaccattggaacgatccctggagaaattagatgatgtgaggaaaaagaagttgtcagatatgataggttcttccagtgacactgttctgagttcagggacagctccaatcacaacatctggagcagccacatctgctcgtggggttgccatcttcttccacatgttgttcgggtcatcttcttccttccaagtgccctctttgatggtcctttccgtgaagacttctgacgtctctgctttcagttttcatcactttgttttttcaatcttggcttgtttatccctacggacacacatggaaatggaagaccaccaccagaagcttatgttgag

SEQ ID NO: 31606 - DNA, 1893 bp, Zea Mays
acccctcctcccctacgctcccccgtcccctcctccctctcttttcaaactcactcggtcactccatatttcgttaccatttcccacctccggaaaatacttttttgcatttttatcccctcgttctcctttccccgcgctctctccctctctctccgatccaaactaccgacaaacgccgccacccgaattcgaaaccctaggcggccgctgtaaaacacgtgtggctgtagtgcctctcgttcgtcggagccggcccgcgtcggtggcggcagccggccatgtcgacggaggacgagaagctcctcaaggaggcgaagaagttgccgtgggacgagcggctgcagcataagaactggaaggtgaggaatgacgcaaacatcgacctcgccgccctatgcgactccatcaccgaccctaaggacgcccgcctccgcgagttcgggccgttgtttaagaagacggttgcagattccaatgcgccggtacaggagaaggcgctcgacgcccttctcgcgttccagcgagctgctgacgccgatgcatcaagatacgcgaaggaggtttgtgatgcaattgtggccaagtgcctcactggccgaccaaagactgtcgagaaagctcaagctgcattcctcctatgggtggaactggaggcagcagaggtcttccttgaatctatggagaaggctgtgaagaacaaagtggctaaagcagttgtacctgctattgatgtgatgtttcaagcactcagcgaatttggaactaaggtagtgccacccaaaaagattctgaagatgcttccggagctgtttgaccatccagaccagaatgtccgggcttcttctaagggtttgacactagagctttgtcggtggattggcaaagaccctgtaaagtctattttgttcgagaagatgagggatactatgaaaaaggagctggaagcagagttggcaaacgtgtctggatttgctaagccaactcgaaaaataagatctgaacaagagaaggaacttgaggaggaggctgtgccagagacaagtggggctaacacttctgaagaggctgtggcagatgcccctgtggagatcgatgaatacgaccttgttgatcctgtagacattttaaccccactagaaaagtctggattttgggacggtgtgaaagcaactaaatggtcagagagaagggatgctgtggcagagctaaccaagcttgcgtcagcaaaaaaaattgctcctggtgattttcatgaaatttgccggacactaaagaagctcatcacagatgttaatttggctgtttcggtggaagctactcaggcaatagggaatttagctagaggtttaagagcccatttttctggaaatgcccgaatgctcctttcggttttacttgaaaaattgaaagaaaaaaagccgacaatgacagaagcactatctcaaacacttcaagcgatgcacaagtctggctgttttacacttattgatgtgattgaagatgttcgagtggctgtaaaaaacaaggtgccccttgttcgttcctcaacgctgacctgggttgcattttgcattgaaacaagcaataaagcgactgtactaaagttgcacaaggaatatgttcctatctgcatggagtgcttgaatgatggtactccagaagtacgagatgcttctttttctgttttaactgccatagccaagatggttggtatgaaaccattggaacgatccctggagaaattagatgatgtgaggaaaaagaagttgtcagatatgataggttcttccagtgacactgttctgagttcagggacagctccaatcacaacatctggagcagccacatctgctcgtggggttgcagatagcatgtcaatgaagaattctg

SEQ ID NO: 31607 - DNA, 6260 bp, Zea Mays
ctctcttttcaaactcactcggtcactccatatttcgttaccatttcccacctccggaaaatacttttttgcatttttatcccctcgttctcctttccccgcgctctctccctctctctccgatccaaactaccgacaaacgccgccacccgaattcgaaaccctaggcggccgctgtaaaacacgtgtggctgtagtgcctctcgttcgtcggagccggcccgcgtcggtggcggcagccggccatgtcgacggaggacgagaagctcctcaaggaggcgaagaagttgccgtgggacgagcggctgcagcataagaactggaaggtgaggaatgacgcaaacatcgacctcgccgccctatgcgactccatcaccgaccctaaggacgcccgcctccgcgagttcgggccgttgtttaagaagacggttgcagattccaatgcgccggtacaggagaaggcgctcgacgcccttctcgcgttccagcgagctgctgacgccgatgcatcaagatacgcgaaggaggtttgtgatgcaattgtggccaagtgcctcactggccgaccaaagactgtcgagaaagctcaagctgcattcctcctatgggtggaactggaggcagcagaggtcttccttgaatctatggagaaggctgtgaagaacaaagtggctaaagcagttgtacctgctattgatgtgatgtttcaagcactcagcgaatttggaactaaggtagtgccacccaaaaagattctgaagatgcttccggagctgtttgaccatccagaccagaatgtccgggcttcttctaagggtttgacactagagctttgtcggtggattggcaaagaccctgtaaagtctattttgttcgagaagatgagggatactatgaaaaaggagctggaagcagagttggcaaacgtgtctggatttgctaagccaactcgaaaaataagatctgaacaagagaaggaacttgaggaggaggctgtgccagagacaagtggggctaacacttctgaagaggctgtggcagatgcccctgtggagatcgatgaatacgaccttgttgatcctgtagacattttaaccccactagaaaagtctggattttgggacggtgtgaaagcaactaaatggtcagagagaagggatgctgtggcagagctaaccaagcttgcgtcagcaaaaaaaattgctcctggtgattttcatgaaatttgccggacactaaagaagctcatcacagatgttaatttggctgtttcggtggaagctactcaggcaatagggaatttagctagaggtttaagagcccatttttctggaaatgcccgaatgctcctttcggttttacttgaaaaattgaaagaaaaaaagccgacaatgacagaagcactatctcaaacacttcaagcgatgcacaagtctggctgttttacacttattgatgtgattgaagctattggcatactcaagcaagaggtggaaagtcttacggaacttgataagtctgctgaacttctgattcgtttgttgtgtgctgtgcctggatggagcgaaaagaatgttcaggtacaacaacaagttatagaggtcatcacctatgtcgcctcgactgtaaacaaatttccaaagcgatgtgtggttctatgccttcttggtgtaagtgaaagggttgctgatattaaaacacggacctatgcaatgaaatgtctcactgccttttgtgaggcagtaggtcctggatttgtgtttgacaggctttacaaaataatgaaggagcacaagaatcccaaggttcttagtgatggtattctttggatggtctctgctgtggaagactttgggatctccaatttaaagctaaaggacatgattgatttttgcaaagacatcggtcttcagtctagtgctgctgtaacaagaaatgctactataaaactaattgggatgctacataagtttgtgggcccagatattaaaggctttttaagtgatgttaaaccagcacttctaagtgccctggatactgaatatgagaaaaatccttttgagggtgctgctgctgctccaaagagaacagttcgagttctggatactgcatcttctgtatctgccggcttgtctgatgggctgccacgggaagacattagttctaagataacacctactttactaaaaaatcttggcagtccagactggaaggtacgactggagtctatagacacagtcacaaaaattatggaggaggctaataaacgtatccagcctacaggaacagctgagctgttcagtgcacttagaggccgtctttacgacagcaacaaaaatttagtaatggcaaccttgtccaccattggtggtcttgcatctgctatgggaccttctgttgaaaagtcaagcaagggtattttggcagatgtgctgaagtgtcttggtgacaataagaagcacatgcgagaatgcacattgactgctctagattcgtgggttgctgcagcccaacttgaaaagatggttccatatattatagtgtctttgggtgatcagaaaacaggttcagaagggcgaaaagatctctttgattggttgtctaagcatgtttcaaaaatgggtgattcatctgaggctttgccattgttgaagccatctgcatcttctttgatggataaatcttctgaagtccgcaaagctgctgaatcctttatgaatgaaattctcaggatctgtggccaagaagtggtgggaaggaacttgaaagatttgccatcacctactttggccattgtatcagaaaggctgaaactgtctactgtacatgaaggattttctgaatctgttaaggtggtgtcaacaagcatgagtttgccatcaaaagctggtttaaagaacaataaacatggtcctaacgatcgtggttctaatgtgggcaaacctgtgtcccaaagaggacttccacagagagcatctgttactatggtttctactcaagattcttctcaatcccaggcattatttaacataaaggactcaaacaaggaagagcgggagaggcgtgttttggttagaaaattcaaattcgaagaacctcgtcgagagcagattgatgaactaaagattgatttgtttaagcatttccgagaagatgtaagcttgcgattatggaactcagattttaagaggcaaatagatggtattgaattgctacaaaaggcacttctttcgagtgggaaagaagcgattgaacttcttgacatactattaaggtggattgtcttacgcttttgtgaatctaacacaacatgtttgttgaaggttcttgactttctacctgagctttttgatattttaaaagaccagtcttacatgttgacagaagctgaagctgcaatttttcttccttgcctcatagagaagtctggtcataacattgaaaaagtcagggaaaaaatgggggatctgataaagcaaatggtcaacatttattctcttcccaaattacttccctatattcttgaggggctccgctcaaagaataaccggacaaggatagaatgtgttgatattattggatacttcattgaccatcatgggactgaggttggtgggttgatgaaaaacttgccatttgttgcagcactgacagcagagcgtgatggtgagattaggaaagctgcccttaatacgcttgcaacagcctacaagagccttggggatgatgtatggcgatatgttggaaaactctcagatgcccaaagaagcatgctcgatgataggtttaaatggaaggcaagagaaatggataaaaggagagaaggaaggcctggtgacgctcgagcagctttgaggcgttcggttagggagaatgggtctgatatagcagaacaaagtggagaagtagtctcccgttcagtgacaggatcaatgatctcaagggacctcggatatgcagatgctcatatggataggcacatggtacctaggcagattccagctgcaactggtcctgcggactggcatgaagctcttgacatagttgcattaggtttgcctgagcagtccgttgaaggtatgaaagttatatgccatgagctaacacaggcagctgatcctgaaagcacggtgcttgaagatcttattaaggaagctgacagattagtgtcatgcttggctgttatggttccaaaaaccttcaattttagcttatctggggcttcttcaaggtcttgcaaatatgtcttaaacacactcatgcagacatttcagatcaaacgtcttgctcatgctgtgaaggagggtacccttgacaaccttattacggagttacttctttggctcttagatgaaagggttcctcttatggatgatggcagccaattactcaaagcactaaatgttttgatgcttaaaatcctggataatgctgagagaacatcctcgtttgttgtgctgattaatttgctgaggcctttggacccttcaagatggccatcgcctacaccaatggagtctcttgctgtaaaaaatcagaagttttcagacttagttgtcaaatgtttaattaagttgacaaaggttcttcagagtacaatatatgaagttgaccttgatcgaattcttcagagcatccatatttatttacaagaactgggaatggaagaaatacggagaagggctggtgctgatgataagccattaagaatggtcaaaaccgtcttgcatgaacttgtgaagcttcggggaacggcaataaagggtcacctttcgatggttcctatagatgctgaacctcagccaataattctagcatacattgatcttaatctccagacccttgctgctgctagaatgttgacgccatcgggacctatgggtcaaactcactggggtgatgctgcttcaaacaatccaaatccatctactcactcagcagacgcgcaattgaagcaagagcttgctgctgtcttcaagaaaatcggcgacaagcaaacatgtactattggcttctacgaactgtatcggataactcagctctacccaaaggttgatatatttgctcagcttcagaatgctagtgaagcatttagaacctatatcagggatgggctagctcaggtggagaagaatgcagcagctggaagaacgccttctagtcttccactgtccacgccacccccaatagcagcaataccttctccaaaattggcaccgtccccagttcacacaaaatcaattggtagcaaaacagattataacgaagataatgccagtggtgagacacaacctttcagaggtcaaggtgacgccactgaccaacaaactgatagataccagacctcaggtacattggatgctcttagggaaaggatgaaaagcattcaagctgcagctataggtcattttgacggagctcaggctcggccgttggcaagtatgaacggaagtaatatgctgcatgggggaacacgattggacggtgagccccagcaacaaagtaatattccacccatggatgagcgagctctctctgggctacaagcacgaatggagaggctaaagagcgggtctatggaatcactatagattgataacagtactgagaaataccatccgttgtaattcattgtaaatttgaggcatagtgatgctgtttgtagataggtatttgaatgtcggaagaagtacgtctcacggggccgacatttcgtaacccctgtgccaggtcaatccattcttgcggagcctttgattgcagttttagacaagagctagccagatgttttctttgtagctactctctgaagggctaattagggttgacaaatttcgccgtactgtattagttttcctgtggtgtacagcaatagacttttaagttctaaattaactgaaaatgttagttgtgaaatatatgttttttatagaatgtatattcgtacggcttagtggtcggtgtggaaaattgttagtgttggaatgtcaaatgaaatggttagaccaacttccagccgtccgtgtacgcgtcgatcgaaactattcatcctttcagcacactattatgctgctgcttgtcagtggttcgaagtcctgataccatctacttcgttgttcattatgcggcaactgattattattagcttcctatcagcaacttattatttttttattaaactgcaactgaacatgcttaaatttgtatcagtgatgcggccattgctcgcaaaggtcaagctcaccagcatatgtagttgg

SEQ ID NO: 31608 - DNA, 4954 bp, Zea Mays
tgtttttatcagcttattagaataactcacaattccgacacttggttgagaccgcaaaaaaggaaaactaatcggtgacagttttatttgtttgctaaacgtcactcctattttctgttgtaaagctttaagaacttaagaagaaacatctacattgagaatataacaatactctttgtggcagctattggcatactcaagcaagaggtggaaagtcttacggaacttgataagtctgctgaacttctgattcgtttgttgtgtgctgtgcctggatggagcgaaaagaatgttcaggtacaacaacaagttatagaggtcatcacctatgtcgcctcgactgtaaacaaatttccaaagcgatgtgtggttctatgccttcttggtgtaagtgaaagggttgctgatattaaaacacggacctatgcaatgaaatgtctcactgccttttgtgaggcagtaggtcctggatttgtgtttgacaggctttacaaaataatgaaggagcacaagaatcccaaggttcttagtgatggtattctttggatggtctctgctgtggaagactttgggatctccaatttaaagctaaaggacatgattgatttttgcaaagacatcggtcttcagtctagtgctgctgtaacaagaaatgctactataaaactaattgggatgctacataagtttgtgggcccagatattaaaggctttttaagtgatgttaaaccagcacttctaagtgccctggatactgaatatgagaaaaatccttttgagggtgctgctgctgctccaaagagaacagttcgagttctggatactgcatcttctgtatctgccggcttgtctgatgggctgccacgggaagacattagttctaagataacacctactttactaaaaaatcttggcagtccagactggaaggtacgactggagtctatagacacagtcacaaaaattatggaggaggctaataaacgtatccagcctacaggaacagctgagctgttcagtgcacttagaggccgtctttacgacagcaacaaaaatttagtaatggcaaccttgtccaccattggtggtcttgcatctgctatgggaccttctgttgaaaagtcaagcaagggtattttggcagatgtgctgaagtgtcttggtgacaataagaagcacatgcgagaatgcacattgactgctctagattcgtgggttgctgcagcccaacttgaaaagatggttccatatattatagtgtctttgggtgatcagaaaacaggttcagaagggcgaaaagatctctttgattggttgtctaagcatgtttcaaaaatgggtgattcatctgaggctttgccattgttgaagccatctgcatcttctttgatggataaatcttctgaagtccgcaaagctgctgaatcctttatgaatgaaattctcaggatctgtggccaagaagtggtgggaaggaacttgaaagatttgccatcacctactttggccattgtatcagaaaggctgaaactgtctactgtacatgaaggattttctgaatctgttaaggtggtgtcaacaagcatgagtttgccatcaaaagctggtttaaagaacaataaacatggtcctaacgatcgtggttctaatgtgggcaaacctgtgtcccaaagaggacttccacagagagcatctgttactatggtttctactcaagattcttctcaatcccaggcattatttaacataaaggactcaaacaaggaagagcgggagaggcgtgttttggttagaaaattcaaattcgaagaacctcgtcgagagcagattgatgaactaaagattgatttgtttaagcatttccgagaagatgtaagcttgcgattatggaactcagattttaagaggcaaatagatggtattgaattgctacaaaaggcacttctttcgagtgggaaagaagcgattgaacttcttgacatactattaaggtggattgtcttacgcttttgtgaatctaacacaacatgtttgttgaaggttcttgactttctacctgagctttttgatattttaaaagaccagtcttacatgttgacagaagctgaagctgcaatttttcttccttgcctcatagagaagtctggtcataacattgaaaaagtcagggaaaaaatgggggatctgataaagcaaatggtcaacatttattctcttcccaaattacttccctatattcttgaggggctccgctcaaagaataaccggacaaggatagaatgtgttgatattattggatacttcattgaccatcatgggactgaggttggtgggttgatgaaaaacttgccatttgttgcagcactgacagcagagcgtgatggtgagattaggaaagctgcccttaatacgcttgcaacagcctacaagagccttggggatgatgtatggcgatatgttggaaaactctcagatgcccaaagaagcatgctcgatgataggtttaaatggaaggcaagagaaatggataaaaggagagaaggaaggcctggtgacgctcgagcagctttgaggcgttcggttagggagaatgggtctgatatagcagaacaaagtggagaagtagtctcccgttcagtgacaggatcaatgatctcaagggacctcggatatgcagatgctcatatggataggcacatggtacctaggcagattccagctgcaactggtcctgcggactggcatgaagctcttgacatagttgcattaggtttgcctgagcagtccgttgaaggtatgaaagttatatgccatgagctaacacaggcagctgatcctgaaagcacggtgcttgaagatcttattaaggaagctgacagattagtgtcatgcttggctgttatgcttatctggggcttcttcaaggtcttgcaaatatgtcttaaacacactcatgcagacatttcagatcaaacgtcttgctcatgctgtgaaggagggtacccttgacaaccttattacggagttacttctttggctcttagatgaaagggttcctcttatggatgatggcagccaattactcaaagcactaaatgttttgatgcttaaaatcctggataatgctgagagaacatcctcgtttgttgtgctgattaatttgctgaggcctttggacccttcaagatggccatcgcctacaccaatggagtctcttgctgtaaaaaatcagaagttttcagacttagttgtcaaatgtttaattaagttgacaaaggttcttcagagtacaatatatgaagttgaccttgatcgaattcttcagagcatccatatttatttacaagaactgggaatggaagaaatacggagaagggctggtgctgatgataagccattaagaatggtcaaaaccgtcttgcatgaacttgtgaagcttcggggaacggcaataaagggtcacctttcgatggttcctatagatgctgaacctcagccaataattctagcatacattgatcttaatctccagacccttgctgctgctagaatgttgacgccatcgggacctatgggtcaaactcactggggtgatgctgcttcaaacaatccaaatccatctactcactcagcagacgcgcaattgaagcaagagcttgctgctgtcttcaagaaaatcggcgacaagcaaacatgtactattggcttctacgaactgtatcggataactcagctctacccaaaggttgatatatttgctcagcttcagaatgctagtgaagcatttagaacctatatcagggatgggctagctcaggtggagaagaatgcagcagctggaagaacgccttctagtcttccactgtccacgccacccccaatagcagcaataccttctccaaaattggcaccgtccccagttcacacaaaatcaattggtagcaaaacagattataacgaagataatgccagtggtgagacacaacctttcagaggtcaaggtgacgccactgaccaacaaactgatagataccagacctcaggtacattggatgctcttagggaaaggatgaaaagcattcaagctgcagctataggtcattttgacggagctcaggctcggccgttggcaagtatgaacggaagtaatatgctgcatgggggaacacgattggacggtgagccccagcaacaaagtaatattccacccatggatgagcgagctctctctgggctacaagcacgaatggagaggctaaagagcgggtctatggaatcactatagattgataacagtactgagaaataccatccgttgtaattcattgtaaatttgaggcatagtgatgctgtttgtagataggtatttgaatgtcggaagaagtacgtctcacggggccgacatttcgtaacccctgtgccaggtcaatccattcttgcggagcctttgattgcagttttagacaagagctagccagatgttttctttgtagctactctctgaagggctaattagggttgacaaatttcgccgtactgtattagttttcctgtggtgtacagcaatagacttttaagttctaaattaactgaaaatgttagttgtgaaatatatgttttttatagaatgtatattcgtacggcttagtggtcggtgtggaaaattgttagtgttggaatgtcaaatgaaatggttagaccaacttccagccgtccgtgtacgcgtcgatcgaaactattcatcctttcagcacactattatgctgctgcttgtcagtggttcgaagtcctgataccatctacttcgttgttcattatgcggcaactgattattattagcttcctatcagcaacttattatttttttattaaactgcaactgaacatgcttaaatttgtatcagtgatgcggccattgctcgcaaaggtcaagctcaccagcatatgtagttgg

SEQ ID NO: 31609 - DNA, 4968 bp, Zea Mays
tgtttttatcagcttattagaataactcacaattccgacacttggttgagaccgcaaaaaaggaaaactaatcggtgacagttttatttgtttgctaaacgtcactcctattttctgttgtaaagctttaagaacttaagaagaaacatctacattgagaatataacaatactctttgtggcagctattggcatactcaagcaagaggtggaaagtcttacggaacttgataagtctgctgaacttctgattcgtttgttgtgtgctgtgcctggatggagcgaaaagaatgttcaggtacaacaacaagttatagaggtcatcacctatgtcgcctcgactgtaaacaaatttccaaagcgatgtgtggttctatgccttcttggtgtaagtgaaagggttgctgatattaaaacacggacctatgcaatgaaatgtctcactgccttttgtgaggcagtaggtcctggatttgtgtttgacaggctttacaaaataatgaaggagcacaagaatcccaaggttcttagtgatggtattctttggatggtctctgctgtggaagactttgggatctccaatttaaagctaaaggacatgattgatttttgcaaagacatcggtcttcagtctagtgctgctgtaacaagaaatgctactataaaactaattgggatgctacataagtttgtgggcccaggctttttaagtgatgttaaaccagcacttctaagtgccctggatactgaatatgagaaaaatccttttgagggtgctgctgctgctccaaagagaacagttcgagttctggatactgcatcttctgtatctgccggcttgtctgatgggctgccacgggaagacattagttctaagataacacctactttactaaaaaatcttggcagtccagactggaaggtacgactggagtctatagacacagtcacaaaaattatggaggaggctaataaacgtatccagcctacaggaacagctgagctgttcagtgcacttagaggccgtctttacgacagcaacaaaaatttagtaatggcaaccttgtccaccattggtggtcttgcatctgctatgggaccttctgttgaaaagtcaagcaagggtattttggcagatgtgctgaagtgtcttggtgacaataagaagcacatgcgagaatgcacattgactgctctagattcgtgggttgctgcagcccaacttgaaaagatggttccatatattatagtgtctttgggtgatcagaaaacaggttcagaagggcgaaaagatctctttgattggttgtctaagcatgtttcaaaaatgggtgattcatctgaggctttgccattgttgaagccatctgcatcttctttgatggataaatcttctgaagtccgcaaagctgctgaatcctttatgaatgaaattctcaggatctgtggccaagaagtggtgggaaggaacttgaaagatttgccatcacctactttggccattgtatcagaaaggctgaaactgtctactgtacatgaaggattttctgaatctgttaaggtggtgtcaacaagcatgagtttgccatcaaaagctggtttaaagaacaataaacatggtcctaacgatcgtggttctaatgtgggcaaacctgtgtcccaaagaggacttccacagagagcatctgttactatggtttctactcaagattcttctcaatcccaggcattatttaacataaaggactcaaacaaggaagagcgggagaggcgtgttttggttagaaaattcaaattcgaagaacctcgtcgagagcagattgatgaactaaagattgatttgtttaagcatttccgagaagatgtaagcttgcgattatggaactcagattttaagaggcaaatagatggtattgaattgctacaaaaggcacttctttcgagtgggaaagaagcgattgaacttcttgacatactattaaggtggattgtcttacgcttttgtgaatctaacacaacatgtttgttgaaggttcttgactttctacctgagctttttgatattttaaaagaccagtcttacatgttgacagaagctgaagctgcaatttttcttccttgcctcatagagaagtctggtcataacattgaaaaagtcagggaaaaaatgggggatctgataaagcaaatggtcaacatttattctcttcccaaattacttccctatattcttgaggggctccgctcaaagaataaccggacaaggatagaatgtgttgatattattggatacttcattgaccatcatgggactgaggttggtgggttgatgaaaaacttgccatttgttgcagcactgacagcagagcgtgatggtgagattaggaaagctgcccttaatacgcttgcaacagcctacaagagccttggggatgatgtatggcgatatgttggaaaactctcagatgcccaaagaagcatgctcgatgataggtttaaatggaaggcaagagaaatggataaaaggagagaaggaaggcctggtgacgctcgagcagctttgaggcgttcggttagggagaatgggtctgatatagcagaacaaagtggagaagtagtctcccgttcagtgacaggatcaatgatctcaagggacctcggatatgcagatgctcatatggataggcacatggtacctaggcagattccagctgcaactggtcctgcggactggcatgaagctcttgacatagttgcattaggtttgcctgagcagtccgttgaaggtatgaaagttatatgccatgagctaacacaggcagctgatcctgaaagcacggtgcttgaagatcttattaaggaagctgacagattagtgtcatgcttggctgttatggttccaaaaaccttcaattttagcttatctggggcttcttcaaggtcttgcaaatatgtcttaaacacactcatgcagacatttcagatcaaacgtcttgctcatgctgtgaaggagggtacccttgacaaccttattacggagttacttctttggctcttagatgaaagggttcctcttatggatgatggcagccaattactcaaagcactaaatgttttgatgcttaaaatcctggataatgctgagagaacatcctcgtttgttgtgctgattaatttgctgaggcctttggacccttcaagatggccatcgcctacaccaatggagtctcttgctgtaaaaaatcagaagttttcagacttagttgtcaaatgtttaattaagttgacaaaggttcttcagagtacaatatatgaagttgaccttgatcgaattcttcagagcatccatatttatttacaagaactgggaatggaagaaatacggagaagggctggtgctgatgataagccattaagaatggtcaaaaccgtcttgcatgaacttgtgaagcttcggggaacggcaataaagggtcacctttcgatggttcctatagatgctgaacctcagccaataattctagcatacattgatcttaatctccagacccttgctgctgctagaatgttgacgccatcgggacctatgggtcaaactcactggggtgatgctgcttcaaacaatccaaatccatctactcactcagcagacgcgcaattgaagcaagagcttgctgctgtcttcaagaaaatcggcgacaagcaaacatgtactattggcttctacgaactgtatcggataactcagctctacccaaaggttgatatatttgctcagcttcagaatgctagtgaagcatttagaacctatatcagggatgggctagctcaggtggagaagaatgcagcagctggaagaacgccttctagtcttccactgtccacgccacccccaatagcagcaataccttctccaaaattggcaccgtccccagttcacacaaaatcaattggtagcaaaacagattataacgaagataatgccagtggtgagacacaacctttcagaggtcaaggtgacgccactgaccaacaaactgatagataccagacctcaggtacattggatgctcttagggaaaggatgaaaagcattcaagctgcagctataggtcattttgacggagctcaggctcggccgttggcaagtatgaacggaagtaatatgctgcatgggggaacacgattggacggtgagccccagcaacaaagtaatattccacccatggatgagcgagctctctctgggctacaagcacgaatggagaggctaaagagcgggtctatggaatcactatagattgataacagtactgagaaataccatccgttgtaattcattgtaaatttgaggcatagtgatgctgtttgtagataggtatttgaatgtcggaagaagtacgtctcacggggccgacatttcgtaacccctgtgccaggtcaatccattcttgcggagcctttgattgcagttttagacaagagctagccagatgttttctttgtagctactctctgaagggctaattagggttgacaaatttcgccgtactgtattagttttcctgtggtgtacagcaatagacttttaagttctaaattaactgaaaatgttagttgtgaaatatatgttttttatagaatgtatattcgtacggcttagtggtcggtgtggaaaattgttagtgttggaatgtcaaatgaaatggttagaccaacttccagccgtccgtgtacgcgtcgatcgaaactattcatcctttcagcacactattatgctgctgcttgtcagtggttcgaagtcctgataccatctacttcgttgttcattatgcggcaactgattattattagcttcctatcagcaacttattatttttttattaaactgcaactgaacatgcttaaatttgtatcagtgatgcggccattgctcgcaaaggtcaagctcaccagcatatgtagttgg

SEQ ID NO: 31610 - DNA, 4936 bp, Zea Mays
tgtttttatcagcttattagaataactcacaattccgacacttggttgagaccgcaaaaaaggaaaactaatcggtgacagttttatttgtttgctaaacgtcactcctattttctgttgtaaagctttaagaacttaagaagaaacatctacattgagaatataacaatactctttgtggcagctattggcatactcaagcaagaggtggaaagtcttacggaacttgataagtctgctgaacttctgattcgtttgttgtgtgctgtgcctggatggagcgaaaagaatgttcaggtacaacaacaagttatagaggtcatcacctatgtcgcctcgactgtaaacaaatttccaaagcgatgtgtggttctatgccttcttggtgtaagtgaaagggttgctgatattaaaacacggacctatgcaatgaaatgtctcactgccttttgtgaggcagtaggtcctggatttgtgtttgacaggctttacaaaataatgaaggagcacaagaatcccaaggttcttagtgatggtattctttggatggtctctgctgtggaagactttgggatctccaatttaaagctaaaggacatgattgatttttgcaaagacatcggtcttcagtctagtgctgctgtaacaagaaatgctactataaaactaattgggatgctacataagtttgtgggcccaggtcatcttttcttcttattttaacatgctacgatagttgccaggtcatgttcttgaaataatccatcttgcagatattaaaggctttttaagtgatgttaaaccagcacttctaagtgccctggatactgaatatgagaaaaatccttttgagggtgctgctgctgctccaaagagaacagttcgagttctggatactgcatcttctgtatctgccggcttgtctgatgggctgccacgggaagacattagttctaagataacacctactttactaaaaaatcttggcagtccagactggaaggtacgactggagtctatagacacagtcacaaaaattatggaggaggctaataaacgtatccagcctacaggaacagctgagctgttcagtgcacttagaggccgtctttacgacagcaacaaaaatttagtaatggcaaccttgtccaccattggtggtcttgcatctgctatgggaccttctgttgaaaagtcaagcaagggtattttggcagatgtgctgaagtgtcttggtgacaataagaagcacatgcgagaatgcacattgactgctctagattcgtgggttgctgcagcccaacttgaaaagatggttccatatattatagtgtctttgggtgatcagaaaacaggttcagaagggcgaaaagatctctttgattggttgtctaagcatgtttcaaaaatgggtgattcatctgaggctttgccattgttgaagccatctgcatcttctttgatggataaatcttctgaagtccgcaaagctgctgaatcctttatgaatgaaattctcaggatctgtggccaagaagtggtgggaaggaacttgaaagatttgccatcacctactttggccattgtatcagaaaggctgaaactgtctactgtacatgaaggattttctgaatctgttaaggtggtgtcaacaagcatgagtttgccatcaaaagctggtttaaagaacaataaacatggtcctaacgatcgtggttctaatgtgggcaaacctgtgtcccaaagaggacttccacagagagcatctgttactatggtttctactcaagattcttctcaatcccaggcattatttaacataaaggactcaaacaagagcgggagaggcgtgttttggttagaaaattcaaattcgaagaacctcgtcgagagcagattgatgaactaaagattgatttgtttaagcatttccgagaagatgtaagcttgcgattatggaactcagattttaagaggcaaatagatggtattgaattgctacaaaaggcacttctttcgagtgggaaagaagcgattgaacttcttgacatactattaagaagctgaagctgcaatttttcttccttgcctcatagagaagtctggtcataacattgaaaaagtcagggaaaaaatgggggatctgataaagcaaatggtcaacatttattctcttcccaaattacttccctatattcttgaggggctccgctcaaagaataaccggacaaggatagaatgtgttgatattattggatacttcattgaccatcatgggactgaggttggtgggttgatgaaaaacttgccatttgttgcagcactgacagcagagcgtgatggtgagattaggaaagctgcccttaatacgcttgcaacagcctacaagagccttggggatgatgtatggcgatatgttggaaaactctcagatgcccaaagaagcatgctcgatgataggtttaaatggaaggcaagagaaatggataaaaggagagaaggaaggcctggtgacgctcgagcagctttgaggcgttcggttagggagaatgggtctgatatagcagaacaaagtggagaagtagtctcccgttcagtgacaggatcaatgatctcaagggacctcggatatgcagatgctcatatggataggcacatggtacctaggcagattccagctgcaactggtcctgcggactggcatgaagctcttgacatagttgcattaggtttgcctgagcagtccgttgaaggtatgaaagttatatgccatgagctaacacaggcagctgatcctgaaagcacggtgcttgaagatcttattaaggaagctgacagattagtgtcatgcttggctgttatggttccaaaaaccttcaattttagcttatctggggcttcttcaaggtcttgcaaatatgtcttaaacacactcatgcagacatttcagatcaaacgtcttgctcatgctgtgaaggagggtacccttgacaaccttattacggagttacttctttggctcttagatgaaagggttcctcttatggatgatggcagccaattactcaaagcactaaatgttttgatgcttaaaatcctggataatgctgagagaacatcctcgtttgttgtgctgattaatttgctgaggcctttggacccttcaagatggccatcgcctacaccaatggagtctcttgctgtaaaaaatcagaagttttcagacttagttgtcaaatgtttaattaagttgacaaaggttcttcagagtacaatatatgaagttgaccttgatcgaattcttcagagcatccatatttatttacaagaactgggaatggaagaaatacggagaagggctggtgctgatgataagccattaagaatggtcaaaaccgtcttgcatgaacttgtgaagcttcggggaacggcaataaagggtcacctttcgatggttcctatagatgctgaacctcagccaataattctagcatacattgatcttaatctccagacccttgctgctgctagaatgttgacgccatcgggacctatgggtcaaactcactggggtgatgctgcttcaaacaatccaaatccatctactcactcagcagacgcgcaattgaagcaagagcttgctgctgtcttcaagaaaatcggcgacaagcaaacatgtactattggcttctacgaactgtatcggataactcagctctacccaaaggttgatatatttgctcagcttcagaatgctagtgaagcatttagaacctatatcagggatgggctagctcaggtggagaagaatgcagcagctggaagaacgccttctagtcttccactgtccacgccacccccaatagcagcaataccttctccaaaattggcaccgtccccagttcacacaaaatcaattggtagcaaaacagattataacgaagataatgccagtggtgagacacaacctttcagaggtcaaggtgacgccactgaccaacaaactgatagataccagacctcaggtacattggatgctcttagggaaaggatgaaaagcattcaagctgcagctataggtcattttgacggagctcaggctcggccgttggcaagtatgaacggaagtaatatgctgcatgggggaacacgattggacggtgagccccagcaacaaagtaatattccacccatggatgagcgagctctctctgggctacaagcacgaatggagaggctaaagagcgggtctatggaatcactatagattgataacagtactgagaaataccatccgttgtaattcattgtaaatttgaggcatagtgatgctgtttgtagataggtatttgaatgtcggaagaagtacgtctcacggggccgacatttcgtaacccctgtgccaggtcaatccattcttgcggagcctttgattgcagttttagacaagagctagccagatgttttctttgtagctactctctgaagggctaattagggttgacaaatttcgccgtactgtattagttttcctgtggtgtacagcaatagacttttaagttctaaattaactgaaaatgttagttgtgaaatatatgttttttatagaatgtatattcgtacggcttagtggtcggtgtggaaaattgttagtgttggaatgtcaaatgaaatggttagaccaacttccagccgtccgtgtacgcgtcgatcgaaactattcatcctttcagcacactattatgctgctgcttgtcagtggttcgaagtcctgataccatctacttcgttgttcattatgcggcaactgattattattagcttcctatcagcaacttattatttttttattaaactgcaactgaacatgcttaaatttgtatcagtgatgcggccattgctcgcaaaggtcaagctcaccagcatatgtagttgg

SEQ ID NO: 31611 - DNA, 6389 bp, Zea Mays
aacgagacccccaagtcccaactgccttgatggccaaggaaacaggcctgccagccagccgcctttcgaaaccgagcaccagggagcagacgcggtctctggaacccaggttccagcgagcaaaccatctaaccaggcgctgagaattctgtgcggaggaggcggatggcaatggtggcggcggcggaggggagcgggcgcagggacgccgaggcggagctcaacctgccgccagggttccggttccacccaacggatgaggagctcgtggtgtactatctctgcaggaaggtagcgcggcagcaggtgcccgtgcccatcatcgcggaagtggatctttacaagttcgatccgtgggatctgcccgagaaggcgttgtttggtcgcaaggagtggtacttctttacgccgcgggaccgcaagtacccaaacggctcgcgccccaaccgcactgccggaaaggggtactggaaggcgactggggccgacaagtcgatcgtgcccatgggcagcaccagggcggcggggatcaagaaggcgctggtgttctactctggcaaggcgcccaggggcgtcaagacggactggattatgcatgagtaccgcgtcgctcaagcggaccacaccctggggaagaagggctcacagaagctggacgagtgggtgttgtgccggctgtataacaagagaaacaattgggacaaggtgaaggtcgaggagcaggagttggaggcggcgccgcgccgacagcatcacttgcagagcgcggaggattccatgtctaacagtttccagacgcacgactcggacatcgacaacgtcttcgagctacaaaattgctacggtaacaacatggtgcaagggcaggccatgacccccaggaacgacattggcgtcgtgacggtgaaggaggacaacgactggttcaccgacatgaatctggatgatttgcaggcatcctacaacatggcccatacgacgaaccattcaacagttacgttccaatctttcttcttaaaactccaccccttttgcccacaccggactaccggagacgcccacgtccgcgctgctggccaatgcggcccaattctacacggcttgaacctaggtagccacgagccctcagcccctcactccgtcacccaccagccgccgctacgtgacgaggtctcccgtgtgacacagactgccgtccttcgcctggcgagtggtgacctgcgacctccgtctccggctgccgtcctctgccatggtccgtggaccgtagtccggcagcagcagggctccagcctctgcccgaccgcttgcccgccaccggcgtctgctacctccgcatccggcctctgggcaccggtctcccgtctctgcccccggcgttcatcgtccggtctccgacaccaggccctcagctacagcagtacagcaccagttcccgcaacagcgaggtcatcgacgccgccatctaggacggctcttaaggtgtgcgcgcccttttctgcgtcgccaaattcaccgtgctttactgatttctagcatttgatgcttgcttagaggaattttgtggaccactacctccatgacatggctccatcccttccacctcttgcggcaacgaagcccaccattccgtcccgtcagtaaccctcgcctccgcgacctaattgctctccttctgagacaccaagacaggaggagccatctcctccaaatccacacccaatttattgcccaccaggtgttcgaccaaagtcccgcgccgtggcgcgccttcctcaaggcctactcccacggtcctttccccctggaagctctgcacctcttcaagcacgcgcgccagcacctggctgatgacacatttgtcttcacgttcgtgctcaaggcttgtgcgggtctggggtggcatcgagctggtgcacagctccatgcgctcgttgtccagaaggggttcgagttccatgcctatgtgcacaccgcccttatcaatgtgtatgtcatgtccaggtgcttggtggaagcacgcaaggtgttcgatgaaatgccagtgaagaatgtagtttcgtggaatgtgatgatcactggctttgctggatggggtgaggttgagtatgcgaggcttctgtttgatcagatgccctgcaggaatgttgtctcatggactgggctgattgatggatatacacgtgcttgtctttatgcagaggctcttactcttctccgccacatgatggcaggaggcattagcccgagtgagataactgttttagcagttattcctgcgatatctaatcttggagggatccttatgggtgagatgctgaatggctattgtgagaagaagggtatcatgtcagatgcccgggttgggaattcactcatagacttgtatgctaagattggctctgtgcaaaactcgctaaaggtgtttgatgaaatgctggatagaagaaatttggtgtcatggacatcaataatttctggttttgcaatgcatgggctgtcagttgaggcacttgagctgtttgcagagatgagaagagcagggattaagcccaacagaatcaccttcttgagtgtcatcaatgcctgcagtcatgggggtctggtagagcaagggttagcgtttttcaaaagcatggtttatgagtacaatatagatccagagatcaagcattttgggtgcatcatagacatgctaggtagggctggacgtttgtgtgaggctgagcaaataatagaagggttgcctatggaggttaatgtaactgtatggaggatactgttgggttgttgcagtaagtatggagaagttgcgatgggggagagggcaataaagatgatatcagacttagaaagagaatctggaggtgattttgcagtattgtccaatgtacttactgagcttggtaggttcagtgatgctgaacaagcacggaagttactggatcagaggaaaattgttaaggttcctgggcttgctttggttggcgagattcagtagtctcaaaattgttcagtctgatgggggaagctctaaaatttctttgcaaccttaccatgttaattatcttccagtagcataccaacttcattaaatctcccagccaaatggtgggttattgcactcttttacctttttatcttccatgtaaagagagaaaatttaaatttattgtttcttggctgctaaatagattgtcataaatcatatgcctgcagttccatatttgttactcaatgctaccattgtgccatgtcagtttgttttctttttatgtcctgataataagcctcgaaggcatgctgtatttcttcactggtttctactttctagcttcaaaatgacagtttcgcccagtacaactgtttgttagaccttttacatatcttatgattctttgcagttgcaggaagcaggtgaagtgaacctcatgtccagttcttgctcctctttaactagtaactagatcatttgtagtgatggaagctgtaaagaagctccatgctcatctcgttgtttctggcctgcacaactgtcaatatgcaatgtccaaggttatcagattgtatgctcttcatcaatcagatttggtttctgctcataaagtatttaagcagattgagtcaccaacaacttttctttggaatactcttctaaggggtcttgctcagagtgatgcaccaaaagatgcaattgttttttacaagaaagctcaggaaaagggtatgaagccagacaacctgacatttccttttgtgttgaaggcttgtgcaaaaacttgtgctccaaaggaaggtgaacagatgcacaaccatgttataaaacttggatttcttctggacatctttgtttccaattctctgatttatctatatgctgcttgtggtgctctggcctgtgcaagatccgtctttaatgagatgctagttaaggatgttgtgtcctggaattccttgattggtggatacagccagcacaatagacttaaagaggtattgacattattcaagctaatgcaggctgaagaagtgcaagctgataaggttacaatggtcaaggtgatttcagcttgcactcatctaggagactggagcatggcagattgtatggttaggtacatcgagcataatcatattgaagtggatgtgtacttggggaatactttgattgactattactgtagaattgggcagctgcaatcagctgaaaaggtgttttctcagatgaaggataagaacactgtgacactgaatgcaatgatcactgcatatgcaaagggtgggaatttggtctcagcgaagaaaatattcgatcaaattcctaacaaagatttgatttcctggagttctatgatatgtgcatactcgcaagctagtcacttctctgattctctggagctcttcaggcagatgcagagagccaaggtaaaaccagatgctgtcgtgattgccagtgtactttctgcttgcgcacacttgggtgcacttgatcttggtaagtggattcatgactatgtgaggagaaacaatatcaaagctgataccattatggaaaactctctgattgacatgtttgcaaagtgcgggtgcgtgcaggaggcactacaagtgttcacggatatggaggagaaggacaccttgtcgtggaactcaatcatactaggactagcaaacaatgggtttgaggatgaggcgctggacatttttcacagtatgcttactgaaggtcccagacccaatgaggttactttccttggtgtgctgatcgcttgtgccaacaggcaactagttgaggaagggcttgaccactttgaaaggatgaaatcagttcacaacttggaaccacagatgaagcattacggatgcgttgttgatattctcagccgtgctggtcagctggagaaggcggttagttttatcagtgagatgcccctggctcctgaccctgtggtttggaggatactgttaggggcgtgcaggacacatggtaacgtggctgttgccgagatggccaccaagaagctcagtgaactagaccccggtaacagtgcggactccatgttgctgagcaatatttatgcaagtgctgatcgatggagcgacgccatgaacgtcaggcgatggacggctgataatgcagtgaggaagtcgcccgcttgtagtgttgttgattcagctagctcgacgaatagttaggacccaccgaattgccttcgttgtcaggtctaattttgtcaacagcactgtctattatggtagtaacctcgtctcaatttggtcaggggaatacatggcgccggagccgtgacgccccagtggtgtcttaagatgtgtcgaccctttcagggccttggaattgacagaacaaagggccccggaaataccagcctgactcccagctaggtctaatgcaggcctgtcttctactgatggaatgttgaagaaatctttatcagcatccgagagtgtattttctcagacgctgacatgtattttgcgaagtcgttcttcgccttgctgctgatgcacttaaagagaggcgcagcaaggccactttgatagagttcatcgtctactatggataaggcctggtgcgagtgttaattctctcgagtttatgtttgttcgtcggcgcatagcttctgtttaggtaggtgagtccgagctcgtgcctgaccgcgatgacagtgtgctcgagctcgggatcgtcaggaagctcacgaccagctgcgccaaggccgggaggagcatctccctcgcgctcgaggcctttccctgcgacatccaggagcagctcaatcggttcatggatggcagaatcgatggcatactttgaggctttatacatctcactgggcaccagagcgatggcaggagtatgaaccacttttgaattactgtcgtgataatggaataaagcttgttgcatgtgggactccacttgaggtggtaagaactgtgcaaacagaaggaattagaagcctttcaaaagctcaaagaaagctttatgctcctccagctggctcaggcttcatttctggctttacatccatctcaggccgatcattgatagacaaaatttcatcaacttgtggttccccttttggcccaagctcatatttatcagcacaggcaagagtagtcgatgattataccatgtccgagacaataatgaaagaaattactgatggagatccttcaggaatgctcgttgttgtaactggtgcgagtcatgtaatgtatgggccacgaggaattgtagtttttttttataaaaagtaacttcatttgataacatacaagaaaggtatgatattttttttctaagatggcaaacgcttgtacgtgaataatatattaataaaacttgatttgatttttagaccatc

SEQ ID NO: 31612 - DNA, 4790 bp, Zea Mays
aacgagacccccaagtcccaactgccttgatggccaaggaaacaggcctgccagccagccgcctttcgaaaccgagcaccagggagcagacgcggtctctggaacccaggttccagcgagcaaaccatctaaccaggcgctgagaattctgtgcggaggaggcggatggcaatggtggcggcggcggaggggagcgggcgcagggacgccgaggcggagctcaacctgccgccagggttccggttccacccaacggatgaggagctcgtggtgtactatctctgcaggaaggtagcgcggcagcaggtgcccgtgcccatcatcgcggaagtggatctttacaagttcgatccgtgggatctgcccggcgttgtttggtcgcaaggagtggtacttctttacgccgcgggaccgcaagtacccaaacggctcgcgccccaaccgcactgccggaaaggggtactggaaggcgactggggccgacaagtcgatcgtgcccatgggcagcaccagggcggcggggatcaagaaggcgctggtgttctactctggcaaggcgcccaggggcgtcaagacggactggattatgcatgagtaccgcgtcgctcaagcggaccacaccctggggaagaagggctcacagaagctggacgagtgggtgttgtgccggctgtataacaagagaaacaattgggacaaggtgaaggtcgaggagcaggagttggaggcggcgccgcgccgacagcatcacttgcagagcgcggaggattccatgtctaacagtttccagacgcacgactcggacatcgacaacgtcttcgagctacaaaattgctacggtaacaacatggtgcaagggcaggccatgacccccaggaacgacattggcgtcgtgacggtgaaggaggacaacgactggttcaccgacatgaatctggatgatttgcaggcatcctacaacatggcccatacgacgaaccattcaacagttacgttccaatctttcttcttaaaactccaccccttttgcccacaccggactaccggagacgcccacgtccgcgctgctggccaatgcggcccaattctacacggcttgaacctaggtagccacgagccctcagcccctcactccgtcacccaccagccgccgctacgtgacgaggtctcccgtgtgacacagactgccgtccttcgcctggcgagtggtgacctgcgacctccgtctccggctgccgtcctctgccatggtccgtggaccgtagtccggcagcagcagggctccagcctctgcccgaccgcttgcccgccaccggcgtctgctacctccgcatccggcctctgggcaccggtctcccgtctctgcccccggcgttcatcgtccggtctccgacaccaggccctcagctacagcagtacagcaccagttcccgcaacagcgaggtcatcgacgccgccatctaggacggctcttaagttgcaggaagcaggtgaagtgaacctcatgtccagttcttgctcctctttaactagtaactagatcatttgtagtgatggaagctgtaaagaagctccatgctcatctcgttgtttctggcctgcacaactgtcaatatgcaatgtccaaggttatcagattgtatgctcttcatcaatcagatttggtttctgctcataaagtatttaagcagattgagtcaccaacaacttttctttggaatactcttctaaggggtcttgctcagagtgatgcaccaaaagatgcaattgttttttacaagaaagctcaggaaaagggtatgaagccagacaacctgacatttccttttgtgttgaaggcttgtgcaaaaacttgtgctccaaaggaaggtgaacagatgcacaaccatgttataaaacttggatttcttctggacatctttgtttccaattctctgatttatctatatgctgcttgtggtgctctggcctgtgcaagatccgtctttaatgagatgctagttaaggatgttgtgtcctggaattccttgattggtggatacagccagcacaatagacttaaagaggtattgacattattcaagctaatgcaggctgaagaagtgcaagctgataaggttacaatggtcaaggtgatttcagcttgcactcatctaggagactggagcatggcagattgtatggttaggtacatcgagcataatcatattgaagtggatgtgtacttggggaatactttgattgactattactgtagaattgggcagctgcaatcagctgaaaaggtgttttctcagatgaaggataagaacactgtgacactgaatgcaatgatcactgcatatgcaaagggtgggaatttggtctcagcgaagaaaatattcgatcaaattcctaacaaagatttgatttcctggagttctatgatatgtgcatactcgcaagctagtcacttctctgattctctggagctcttcaggcagatgcagagagccaaggtaaaaccagatgctgtcgtgattgccagtgtactttctgcttgcgcacacttgggtgcacttgatcttggtaagtggattcatgactatgtgaggagaaacaatatcaaagctgataccattatggaaaactctctgattgacatgtttgcaaagtgcgggtgcgtgcaggaggcactacaagtgttcacggatatggaggagaaggacaccttgtcgtggaactcaatcatactaggactagcaaacaatgggtttgaggatgaggcgctggacatttttcacagtatgcttactgaaggtcccagacccaatgaggttactttccttggtgtgctgatcgcttgtgccaacaggcaactagttgaggaagggcttgaccactttgaaaggatgaaatcagttcacaacttggaaccacagatgaagcattacggatgcgttgttgatattctcagccgtgctggtcagctggagaaggcggttagttttatcagtgagatgcccctggctcctgaccctgtggtttggaggatactgttaggggcgtgcaggacacatggtaacgtggctgttgccgagatggccaccaagaagctcagtgaactagaccccggtaacagtgcggactccatgttgctgagcaatatttatgcaagtgctgatcgatggagcgacgccatgaacgtcaggcgatggacggctgataatgcagtgaggaagtcgcccgcttgtagtgttgttgattcagctagctcgacgaatagttaggacccaccgaattgccttcgttgtcaggtctaattttgtcaacagcactgtctattatggtagtaacctcgtctcaatttggtcaggggaatacatggcgccggagccgtgacgccccagtggtgtcttaagatgtgtcgaccctttcagggccttggaattgacagaacaaagggccccggaaataccagcctgactcccagctaggtctaatgcaggcctgtcttctactgatggaatgttgaagaaatctttatcagcatccgagagtgtattttctcagacgctgacatgtattttgcgaagtcgttcttcgccttgctgctgatgcacttaaagagaggcgcagcaaggccactttgatagagttcatcgtctactatggataaggcctggtgcgagtgttaattctctcgagtttatgtttgttcgtcggcgcatagcttctgtttaggtaggtgagtccgagctcgtgcctgaccgcgatgacagtgtgctcgagctcgggatcgtcaggaagctcacgaccagctgcgccaaggccgggaggagcatctccctcgcgctcgaggcctttccctgcgacatccaggagcagctcaatcggttcatggatggcagaatcgatggcatactttgaggctttatacatctcactgggcaccagagcgatggcaggagtatgaaccacttttgaattactgtcgtgataatggaataaagcttgttgcatgtgggactccacttgaggtaattattaattgattctcacgataactgtatgtgattcaggcatattggagtcacgagtaatcttgtttatttatacttctgaattgtgggatcgtaacattctagaattgtaatttaaaattgatttgcattattcaaacaagaaagttttttcttgtaccacgtataatatcttttccaggttaagcacctctgtcacactccttttcaacccttccctagtaaatctctgatatgatgcatatttgatatgtaaatgtactatgtaagcttagcttaccctacattactgtgtgaatattatccaagactttttcttgactaggtggtaagaactgtgcaaacagaaggaattagaagcctttcaaaagctcaaagaaagctttatgctcctccagctggctcaggcttcatttctggctttacatccatctcaggccgatcattgatagacaaaatttcatcaacttgtggttccccttttggcccaagctcatatttatcagcacaggcaagagtagtcgatgattataccatgtccgagacaataatgaaagaaattactgatggagatccttcaggaatgctcgttgttgtaactggtgcgagtcatgtaatgtatgggccacgaggaattgtagtttttttttataaaaagtaacttcatttgataacatacaagaaaggtatgatattttttttctaagatggcaaacgcttgtacgtgaataatatattaataaaacttgatttgatttttagaccatc

SEQ ID NO: 31613 - DNA, 6384 bp, Zea Mays
aacgagacccccaagtcccaactgccttgatggccaaggaaacaggcctgccagccagccgcctttcgaaaccgagcaccagggagcagacgcggtctctggaacccaggttccagcgagcaaaccatctaaccaggcgctgagaattctgtgcggaggaggcggatggcaatggtggcggcggcggaggggagcgggcgcagggacgccgaggcggagctcaacctgccgccagggttccggttccacccaacggatgaggagctcgtggtgtactatctctgcaggaaggtagcgcggcagcaggtgcccgtgcccatcatcgcggaagtggatctttacaagttcgatccgtgggatctgcccggcgttgtttggtcgcaaggagtggtacttctttacgccgcgggaccgcaagtacccaaacggctcgcgccccaaccgcactgccggaaaggggtactggaaggcgactggggccgacaagtcgatcgtgcccatgggcagcaccagggcggcggggatcaagaaggcgctggtgttctactctggcaaggcgcccaggggcgtcaagacggactggattatgcatgagtaccgcgtcgctcaagcggaccacaccctggggaagaagggctcacagaagctggacgagtgggtgttgtgccggctgtataacaagagaaacaattgggacaaggtgaaggtcgaggagcaggagttggaggcggcgccgcgccgacagcatcacttgcagagcgcggaggattccatgtctaacagtttccagacgcacgactcggacatcgacaacgtcttcgagctacaaaattgctacggtaacaacatggtgcaagggcaggccatgacccccaggaacgacattggcgtcgtgacggtgaaggaggacaacgactggttcaccgacatgaatctggatgatttgcaggcatcctacaacatggcccatacgacgaaccattcaacagttacgttccaatctttcttcttaaaactccaccccttttgcccacaccggactaccggagacgcccacgtccgcgctgctggccaatgcggcccaattctacacggcttgaacctaggtagccacgagccctcagcccctcactccgtcacccaccagccgccgctacgtgacgaggtctcccgtgtgacacagactgccgtccttcgcctggcgagtggtgacctgcgacctccgtctccggctgccgtcctctgccatggtccgtggaccgtagtccggcagcagcagggctccagcctctgcccgaccgcttgcccgccaccggcgtctgctacctccgcatccggcctctgggcaccggtctcccgtctctgcccccggcgttcatcgtccggtctccgacaccaggccctcagctacagcagtacagcaccagttcccgcaacagcgaggtcatcgacgccgccatctaggacggctcttaaggtgtgcgcgcccttttctgcgtcgccaaattcaccgtgctttactgatttctagcatttgatgcttgcttagaggaattttgtggaccactacctccatgacatggctccatcccttccacctcttgcggcaacgaagcccaccattccgtcccgtcagtaaccctcgcctccgcgacctaattgctctccttctgagacaccaagacaggaggagccatctcctccaaatccacacccaatttattgcccaccaggtgttcgaccaaagtcccgcgccgtggcgcgccttcctcaaggcctactcccacggtcctttccccctggaagctctgcacctcttcaagcacgcgcgccagcacctggctgatgacacatttgtcttcacgttcgtgctcaaggcttgtgcgggtctggggtggcatcgagctggtgcacagctccatgcgctcgttgtccagaaggggttcgagttccatgcctatgtgcacaccgcccttatcaatgtgtatgtcatgtccaggtgcttggtggaagcacgcaaggtgttcgatgaaatgccagtgaagaatgtagtttcgtggaatgtgatgatcactggctttgctggatggggtgaggttgagtatgcgaggcttctgtttgatcagatgccctgcaggaatgttgtctcatggactgggctgattgatggatatacacgtgcttgtctttatgcagaggctcttactcttctccgccacatgatggcaggaggcattagcccgagtgagataactgttttagcagttattcctgcgatatctaatcttggagggatccttatgggtgagatgctgaatggctattgtgagaagaagggtatcatgtcagatgcccgggttgggaattcactcatagacttgtatgctaagattggctctgtgcaaaactcgctaaaggtgtttgatgaaatgctggatagaagaaatttggtgtcatggacatcaataatttctggttttgcaatgcatgggctgtcagttgaggcacttgagctgtttgcagagatgagaagagcagggattaagcccaacagaatcaccttcttgagtgtcatcaatgcctgcagtcatgggggtctggtagagcaagggttagcgtttttcaaaagcatggtttatgagtacaatatagatccagagatcaagcattttgggtgcatcatagacatgctaggtagggctggacgtttgtgtgaggctgagcaaataatagaagggttgcctatggaggttaatgtaactgtatggaggatactgttgggttgttgcagtaagtatggagaagttgcgatgggggagagggcaataaagatgatatcagacttagaaagagaatctggaggtgattttgcagtattgtccaatgtacttactgagcttggtaggttcagtgatgctgaacaagcacggaagttactggatcagaggaaaattgttaaggttcctgggcttgctttggttggcgagattcagtagtctcaaaattgttcagtctgatgggggaagctctaaaatttctttgcaaccttaccatgttaattatcttccagtagcataccaacttcattaaatctcccagccaaatggtgggttattgcactcttttacctttttatcttccatgtaaagagagaaaatttaaatttattgtttcttggctgctaaatagattgtcataaatcatatgcctgcagttccatatttgttactcaatgctaccattgtgccatgtcagtttgttttctttttatgtcctgataataagcctcgaaggcatgctgtatttcttcactggtttctactttctagcttcaaaatgacagtttcgcccagtacaactgtttgttagaccttttacatatcttatgattctttgcagttgcaggaagcaggtgaagtgaacctcatgtccagttcttgctcctctttaactagtaactagatcatttgtagtgatggaagctgtaaagaagctccatgctcatctcgttgtttctggcctgcacaactgtcaatatgcaatgtccaaggttatcagattgtatgctcttcatcaatcagatttggtttctgctcataaagtatttaagcagattgagtcaccaacaacttttctttggaatactcttctaaggggtcttgctcagagtgatgcaccaaaagatgcaattgttttttacaagaaagctcaggaaaagggtatgaagccagacaacctgacatttccttttgtgttgaaggcttgtgcaaaaacttgtgctccaaaggaaggtgaacagatgcacaaccatgttataaaacttggatttcttctggacatctttgtttccaattctctgatttatctatatgctgcttgtggtgctctggcctgtgcaagatccgtctttaatgagatgctagttaaggatgttgtgtcctggaattccttgattggtggatacagccagcacaatagacttaaagaggtattgacattattcaagctaatgcaggctgaagaagtgcaagctgataaggttacaatggtcaaggtgatttcagcttgcactcatctaggagactggagcatggcagattgtatggttaggtacatcgagcataatcatattgaagtggatgtgtacttggggaatactttgattgactattactgtagaattgggcagctgcaatcagctgaaaaggtgttttctcagatgaaggataagaacactgtgacactgaatgcaatgatcactgcatatgcaaagggtgggaatttggtctcagcgaagaaaatattcgatcaaattcctaacaaagatttgatttcctggagttctatgatatgtgcatactcgcaagctagtcacttctctgattctctggagctcttcaggcagatgcagagagccaaggtaaaaccagatgctgtcgtgattgccagtgtactttctgcttgcgcacacttgggtgcacttgatcttggtaagtggattcatgactatgtgaggagaaacaatatcaaagctgataccattatggaaaactctctgattgacatgtttgcaaagtgcgggtgcgtgcaggaggcactacaagtgttcacggatatggaggagaaggacaccttgtcgtggaactcaatcatactaggactagcaaacaatgggtttgaggatgaggcgctggacatttttcacagtatgcttactgaaggtcccagacccaatgaggttactttccttggtgtgctgatcgcttgtgccaacaggcaactagttgaggaagggcttgaccactttgaaaggatgaaatcagttcacaacttggaaccacagatgaagcattacggatgcgttgttgatattctcagccgtgctggtcagctggagaaggcggttagttttatcagtgagatgcccctggctcctgaccctgtggtttggaggatactgttaggggcgtgcaggacacatggtaacgtggctgttgccgagatggccaccaagaagctcagtgaactagaccccggtaacagtgcggactccatgttgctgagcaatatttatgcaagtgctgatcgatggagcgacgccatgaacgtcaggcgatggacggctgataatgcagtgaggaagtcgcccgcttgtagtgttgttgattcagctagctcgacgaatagttaggacccaccgaattgccttcgttgtcaggtctaattttgtcaacagcactgtctattatggtagtaacctcgtctcaatttggtcaggggaatacatggcgccggagccgtgacgccccagtggtgtcttaagatgtgtcgaccctttcagggccttggaattgacagaacaaagggccccggaaataccagcctgactcccagctaggtctaatgcaggcctgtcttctactgatggaatgttgaagaaatctttatcagcatccgagagtgtattttctcagacgctgacatgtattttgcgaagtcgttcttcgccttgctgctgatgcacttaaagagaggcgcagcaaggccactttgatagagttcatcgtctactatggataaggcctggtgcgagtgttaattctctcgagtttatgtttgttcgtcggcgcatagcttctgtttaggtaggtgagtccgagctcgtgcctgaccgcgatgacagtgtgctcgagctcgggatcgtcaggaagctcacgaccagctgcgccaaggccgggaggagcatctccctcgcgctcgaggcctttccctgcgacatccaggagcagctcaatcggttcatggatggcagaatcgatggcatactttgaggctttatacatctcactgggcaccagagcgatggcaggagtatgaaccacttttgaattactgtcgtgataatggaataaagcttgttgcatgtgggactccacttgaggtggtaagaactgtgcaaacagaaggaattagaagcctttcaaaagctcaaagaaagctttatgctcctccagctggctcaggcttcatttctggctttacatccatctcaggccgatcattgatagacaaaatttcatcaacttgtggttccccttttggcccaagctcatatttatcagcacaggcaagagtagtcgatgattataccatgtccgagacaataatgaaagaaattactgatggagatccttcaggaatgctcgttgttgtaactggtgcgagtcatgtaatgtatgggccacgaggaattgtagtttttttttataaaaagtaacttcatttgataacatacaagaaaggtatgatattttttttctaagatggcaaacgcttgtacgtgaataatatattaataaaacttgatttgatttttagaccatc

SEQ ID NO: 31614 - DNA, 4462 bp, Zea Mays
aacgagacccccaagtcccaactgccttgatggccaaggaaacaggcctgccagccagccgcctttcgaaaccgagcaccagggagcagacgcggtctctggaacccaggttccagcgagcaaaccatctaaccaggcgctgagaattctgtgcggaggaggcggatggcaatggtggcggcggcggaggggagcgggcgcagggacgccgaggcggagctcaacctgccgccagggttccggttccacccaacggatgaggagctcgtggtgtactatctctgcaggaaggtagcgcggcagcaggtgcccgtgcccatcatcgcggaagtggatctttacaagttcgatccgtgggatctgcccggcgttgtttggtcgcaaggagtggtacttctttacgccgcgggaccgcaagtacccaaacggctcgcgccccaaccgcactgccggaaaggggtactggaaggcgactggggccgacaagtcgatcgtgcccatgggcagcaccagggcggcggggatcaagaaggcgctggtgttctactctggcaaggcgcccaggggcgtcaagacggactggattatgcatgagtaccgcgtcgctcaagcggaccacaccctggggaagaagggctcacagaagctggacgagtgggtgttgtgccggctgtataacaagagaaacaattgggacaaggtgaaggtcgaggagcaggagttggaggcggcgccgcgccgacagcatcacttgcagagcgcggaggattccatgtctaacagtttccagacgcacgactcggacatcgacaacgtcttcgagctacaaaattgctacggtaacaacatggtgcaagggcaggccatgacccccaggaacgacattggcgtcgtgacggtgaaggaggacaacgactggttcaccgacatgaatctggatgatttgcaggcatcctacaacatggcccatacgacgaaccattcaacagttacgttccaatctttcttcttaaaactccaccccttttgcccacaccggactaccggagacgcccacgtccgcgctgctggccaatgcggcccaattctacacggcttgaacctaggtagccacgagccctcagcccctcactccgtcacccaccagccgccgctacgtgacgaggtctcccgtgtgacacagactgccgtccttcgcctggcgagtggtgacctgcgacctccgtctccggctgccgtcctctgccatggtccgtggaccgtagtccggcagcagcagggctccagcctctgcccgaccgcttgcccgccaccggcgtctgctacctccgcatccggcctctgggcaccggtctcccgtctctgcccccggcgttcatcgtccggtctccgacaccaggccctcagctacagcagtacagcaccagttcccgcaacagcgaggtcatcgacgccgccatctaggacggctcttaagttgcaggaagcaggtgaagtgaacctcatgtccagttcttgctcctctttaactagtaactagatcatttgtagtgatggaagctgtaaagaagctccatgctcatctcgttgtttctggcctgcacaactgtcaatatgcaatgtccaaggttatcagattgtatgctcttcatcaatcagatttggtttctgctcataaagtatttaagcagattgagtcaccaacaacttttctttggaatactcttctaaggggtcttgctcagagtgatgcaccaaaagatgcaattgttttttacaagaaagctcaggaaaagggtatgaagccagacaacctgacatttccttttgtgttgaaggcttgtgcaaaaacttgtgctccaaaggaaggtgaacagatgcacaaccatgttataaaacttggatttcttctggacatctttgtttccaattctctgatttatctatatgctgcttgtggtgctctggcctgtgcaagatccgtctttaatgagatgctagttaaggatgttgtgtcctggaattccttgattggtggatacagccagcacaatagacttaaagaggtattgacattattcaagctaatgcaggctgaagaagtgcaagctgataaggttacaatggtcaaggtgatttcagcttgcactcatctaggagactggagcatggcagattgtatggttaggtacatcgagcataatcatattgaagtggatgtgtacttggggaatactttgattgactattactgtagaattgggcagctgcaatcagctgaaaaggtgttttctcagatgaaggataagaacactgtgacactgaatgcaatgatcactgcatatgcaaagggtgggaatttggtctcagcgaagaaaatattcgatcaaattcctaacaaagatttgatttcctggagttctatgatatgtgcatactcgcaagctagtcacttctctgattctctggagctcttcaggcagatgcagagagccaaggtaaaaccagatgctgtcgtgattgccagtgtactttctgcttgcgcacacttgggtgcacttgatcttggtaagtggattcatgactatgtgaggagaaacaatatcaaagctgataccattatggaaaactctctgattgacatgtttgcaaagtgcgggtgcgtgcaggaggcactacaagtgttcacggatatggaggagaaggacaccttgtcgtggaactcaatcatactaggactagcaaacaatgggtttgaggatgaggcgctggacatttttcacagtatgcttactgaaggtcccagacccaatgaggttactttccttggtgtgctgatcgcttgtgccaacaggcaactagttgaggaagggcttgaccactttgaaaggatgaaatcagttcacaacttggaaccacagatgaagcattacggatgcgttgttgatattctcagccgtgctggtcagctggagaaggcggttagttttatcagtgagatgcccctggctcctgaccctgtggtttggaggatactgttaggggcgtgcaggacacatggtaacgtggctgttgccgagatggccaccaagaagctcagtgaactagaccccggtaacagtgcggactccatgttgctgagcaatatttatgcaagtgctgatcgatggagcgacgccatgaacgtcaggcgatggacggctgataatgcagtgaggaagtcgcccgcttgtagtgttgttgattcagctagctcgacgaatagttaggacccaccgaattgccttcgttgtcaggtctaattttgtcaacagcactgtctattatggtagtaacctcgtctcaatttggtcaggggaatacatggcgccggagccgtgacgccccagtggtgtcttaagatgtgtcgaccctttcagggccttggaattgacagaacaaagggccccggaaataccagcctgactcccagctaggtctaatgcaggcctgtcttctactgatggaatgttgaagaaatctttatcagcatccgagagtgtattttctcagacgctgacatgtattttgcgaagtcgttcttcgccttgctgctgatgcacttaaagagaggcgcagcaaggccactttgatagagttcatcgtctactatggataaggcctggtgcgagtgttaattctctcgagtttatgtttgttcgtcggcgcatagcttctgtttaggtaggtgagtccgagctcgtgcctgaccgcgatgacagtgtgctcgagctcgggatcgtcaggaagctcacgaccagctgcgccaaggccgggaggagcatctccctcgcgctcgaggcctttccctgcgacatccaggagcagctcaatcggttcatggatggcagaatcgatggcatactttgaggctttatacatctcactgggcaccagagcgatggcaggagtatgaaccacttttgaattactgtcgtgataatggaataaagcttgttgcatgtgggactccacttgaggtggtaagaactgtgcaaacagaaggaattagaagcctttcaaaagctcaaagaaagctttatgctcctccagctggctcaggcttcatttctggctttacatccatctcaggccgatcattgatagacaaaatttcatcaacttgtggttccccttttggcccaagctcatatttatcagcacaggcaagagtagtcgatgattataccatgtccgagacaataatgaaagaaattactgatggagatccttcaggaatgctcgttgttgtaactggtgcgagtcatgtaatgtatgggccacgaggaattgtagtttttttttataaaaagtaacttcatttgataacatacaagaaaggtatgatattttttttctaagatggcaaacgcttgtacgtgaataatatattaataaaacttgatttgatttttagaccatc

SEQ ID NO: 31615 - DNA, 4467 bp, Zea Mays
aacgagacccccaagtcccaactgccttgatggccaaggaaacaggcctgccagccagccgcctttcgaaaccgagcaccagggagcagacgcggtctctggaacccaggttccagcgagcaaaccatctaaccaggcgctgagaattctgtgcggaggaggcggatggcaatggtggcggcggcggaggggagcgggcgcagggacgccgaggcggagctcaacctgccgccagggttccggttccacccaacggatgaggagctcgtggtgtactatctctgcaggaaggtagcgcggcagcaggtgcccgtgcccatcatcgcggaagtggatctttacaagttcgatccgtgggatctgcccgagaaggcgttgtttggtcgcaaggagtggtacttctttacgccgcgggaccgcaagtacccaaacggctcgcgccccaaccgcactgccggaaaggggtactggaaggcgactggggccgacaagtcgatcgtgcccatgggcagcaccagggcggcggggatcaagaaggcgctggtgttctactctggcaaggcgcccaggggcgtcaagacggactggattatgcatgagtaccgcgtcgctcaagcggaccacaccctggggaagaagggctcacagaagctggacgagtgggtgttgtgccggctgtataacaagagaaacaattgggacaaggtgaaggtcgaggagcaggagttggaggcggcgccgcgccgacagcatcacttgcagagcgcggaggattccatgtctaacagtttccagacgcacgactcggacatcgacaacgtcttcgagctacaaaattgctacggtaacaacatggtgcaagggcaggccatgacccccaggaacgacattggcgtcgtgacggtgaaggaggacaacgactggttcaccgacatgaatctggatgatttgcaggcatcctacaacatggcccatacgacgaaccattcaacagttacgttccaatctttcttcttaaaactccaccccttttgcccacaccggactaccggagacgcccacgtccgcgctgctggccaatgcggcccaattctacacggcttgaacctaggtagccacgagccctcagcccctcactccgtcacccaccagccgccgctacgtgacgaggtctcccgtgtgacacagactgccgtccttcgcctggcgagtggtgacctgcgacctccgtctccggctgccgtcctctgccatggtccgtggaccgtagtccggcagcagcagggctccagcctctgcccgaccgcttgcccgccaccggcgtctgctacctccgcatccggcctctgggcaccggtctcccgtctctgcccccggcgttcatcgtccggtctccgacaccaggccctcagctacagcagtacagcaccagttcccgcaacagcgaggtcatcgacgccgccatctaggacggctcttaagttgcaggaagcaggtgaagtgaacctcatgtccagttcttgctcctctttaactagtaactagatcatttgtagtgatggaagctgtaaagaagctccatgctcatctcgttgtttctggcctgcacaactgtcaatatgcaatgtccaaggttatcagattgtatgctcttcatcaatcagatttggtttctgctcataaagtatttaagcagattgagtcaccaacaacttttctttggaatactcttctaaggggtcttgctcagagtgatgcaccaaaagatgcaattgttttttacaagaaagctcaggaaaagggtatgaagccagacaacctgacatttccttttgtgttgaaggcttgtgcaaaaacttgtgctccaaaggaaggtgaacagatgcacaaccatgttataaaacttggatttcttctggacatctttgtttccaattctctgatttatctatatgctgcttgtggtgctctggcctgtgcaagatccgtctttaatgagatgctagttaaggatgttgtgtcctggaattccttgattggtggatacagccagcacaatagacttaaagaggtattgacattattcaagctaatgcaggctgaagaagtgcaagctgataaggttacaatggtcaaggtgatttcagcttgcactcatctaggagactggagcatggcagattgtatggttaggtacatcgagcataatcatattgaagtggatgtgtacttggggaatactttgattgactattactgtagaattgggcagctgcaatcagctgaaaaggtgttttctcagatgaaggataagaacactgtgacactgaatgcaatgatcactgcatatgcaaagggtgggaatttggtctcagcgaagaaaatattcgatcaaattcctaacaaagatttgatttcctggagttctatgatatgtgcatactcgcaagctagtcacttctctgattctctggagctcttcaggcagatgcagagagccaaggtaaaaccagatgctgtcgtgattgccagtgtactttctgcttgcgcacacttgggtgcacttgatcttggtaagtggattcatgactatgtgaggagaaacaatatcaaagctgataccattatggaaaactctctgattgacatgtttgcaaagtgcgggtgcgtgcaggaggcactacaagtgttcacggatatggaggagaaggacaccttgtcgtggaactcaatcatactaggactagcaaacaatgggtttgaggatgaggcgctggacatttttcacagtatgcttactgaaggtcccagacccaatgaggttactttccttggtgtgctgatcgcttgtgccaacaggcaactagttgaggaagggcttgaccactttgaaaggatgaaatcagttcacaacttggaaccacagatgaagcattacggatgcgttgttgatattctcagccgtgctggtcagctggagaaggcggttagttttatcagtgagatgcccctggctcctgaccctgtggtttggaggatactgttaggggcgtgcaggacacatggtaacgtggctgttgccgagatggccaccaagaagctcagtgaactagaccccggtaacagtgcggactccatgttgctgagcaatatttatgcaagtgctgatcgatggagcgacgccatgaacgtcaggcgatggacggctgataatgcagtgaggaagtcgcccgcttgtagtgttgttgattcagctagctcgacgaatagttaggacccaccgaattgccttcgttgtcaggtctaattttgtcaacagcactgtctattatggtagtaacctcgtctcaatttggtcaggggaatacatggcgccggagccgtgacgccccagtggtgtcttaagatgtgtcgaccctttcagggccttggaattgacagaacaaagggccccggaaataccagcctgactcccagctaggtctaatgcaggcctgtcttctactgatggaatgttgaagaaatctttatcagcatccgagagtgtattttctcagacgctgacatgtattttgcgaagtcgttcttcgccttgctgctgatgcacttaaagagaggcgcagcaaggccactttgatagagttcatcgtctactatggataaggcctggtgcgagtgttaattctctcgagtttatgtttgttcgtcggcgcatagcttctgtttaggtaggtgagtccgagctcgtgcctgaccgcgatgacagtgtgctcgagctcgggatcgtcaggaagctcacgaccagctgcgccaaggccgggaggagcatctccctcgcgctcgaggcctttccctgcgacatccaggagcagctcaatcggttcatggatggcagaatcgatggcatactttgaggctttatacatctcactgggcaccagagcgatggcaggagtatgaaccacttttgaattactgtcgtgataatggaataaagcttgttgcatgtgggactccacttgaggtggtaagaactgtgcaaacagaaggaattagaagcctttcaaaagctcaaagaaagctttatgctcctccagctggctcaggcttcatttctggctttacatccatctcaggccgatcattgatagacaaaatttcatcaacttgtggttccccttttggcccaagctcatatttatcagcacaggcaagagtagtcgatgattataccatgtccgagacaataatgaaagaaattactgatggagatccttcaggaatgctcgttgttgtaactggtgcgagtcatgtaatgtatgggccacgaggaattgtagtttttttttataaaaagtaacttcatttgataacatacaagaaaggtatgatattttttttctaagatggcaaacgcttgtacgtgaataatatattaataaaacttgatttgatttttagaccatc

SEQ ID NO: 31616 - DNA, 6091 bp, Zea Mays
aacgagacccccaagtcccaactgccttgatggccaaggaaacaggcctgccagccagccgcctttcgaaaccgagcaccagggagcagacgcggtctctggaacccaggttccagcgagcaaaccatctaaccaggcgctgagaattctgtgcggaggaggcggatggcaatggtggcggcggcggaggggagcgggcgcagggacgccgaggcggagctcaacctgccgccagggttccggttccacccaacggatgaggagctcgtggtgtactatctctgcaggaaggtagcgcggcagcaggtgcccgtgcccatcatcgcggaagtggatctttacaagttcgatccgtgggatctgcccggcgttgtttggtcgcaaggagtggtacttctttacgccgcgggaccgcaagtacccaaacggctcgcgccccaaccgcactgccggaaaggggtactggaaggcgactggggccgacaagtcgatcgtgcccatgggcagcaccagggcggcggggatcaagaaggcgctggtgttctactctggcaaggcgcccaggggcgtcaagacggactggattatgcatgagtaccgcgtcgctcaagcggaccacaccctggggaagaagggctcacagaagctggacgagtgggtgttgtgccggctgtataacaagagaaacaattgggacaaggtgaaggtcgaggagcaggagttggaggcggcgccgcgccgacagcatcacttgcagagcgcggaggattccatgtctaacagtttccagacgcacgactcggacatcgacaacgtcttcgagctacaaaattgctacggtaacaacatggtgcaagggcaggccatgacccccaggaacgacattggcgtcgtgacggtgaaggaggacaacgactggttcaccgacatgaatctggatgatttgcaggcatcctacaacatggcccatacgacgaaccattcaacagttacgttccaatctttcttcttaaaactccaccccttttgcccacaccggactaccggagacgcccacgtccgcgctgctggccaatgcggcccaattctacacggcttgaacctaggtagccacgagccctcagcccctcactccgtcacccaccagccgccgctacgtgacgaggtctcccgtgtgacacagactgccgtccttcgcctggcgagtggtgacctgcgacctccgtctccggctgccgtcctctgccatggtccgtggaccgtagtccggcagcagcagggctccagcctctgcccgaccgcttgcccgccaccggcgtctgctacctccgcatccggcctctgggcaccggtctcccgtctctgcccccggcgttcatcgtccggtctccgacaccaggccctcagctacagcagtacagcaccagttcccgcaacagcgaggtcatcgacgccgccatctaggacggctcttaaggtgtgcgcgcccttttctgcgtcgccaaattcaccgtgctttactgatttctagcatttgatgcttgcttagaggaattttgtggaccactacctccatgacatggctccatcccttccacctcttgcggcaacgaagcccaccattccgtcccgtcagtaaccctcgcctccgcgacctaattgctctccttctgagacaccaagacaggaggagccatctcctccaaatccacacccaatttattgcccaccaggtgttcgaccaaagtcccgcgccgtggcgcgccttcctcaaggcctactcccacggtcctttccccctggaagctctgcacctcttcaagcacgcgcgccagcacctggctgatgacacatttgtcttcacgttcgtgctcaaggcttgtgcgggtctggggtggcatcgagctggtgcacagctccatgcgctcgttgtccagaaggggttcgagttccatgcctatgtgcacaccgcccttatcaatgtgtatgtcatgtccaggtgcttggtggaagcacgcaaggtgttcgatgaaatgccagtgaagaatgtagtttcgtggaatgtgatgatcactggctttgctggatggggtgaggttgagtatgcgaggcttctgtttgatcagatgccctgcaggaatgttgtctcatggactgggctgattgatggatatacacgtgcttgtctttatgcagaggctcttactcttctccgccacatgatggcaggaggcattagcccgagtgagataactgttttagcagttattcctgcgatatctaatcttggagggatccttatgggtgagatgctgaatggctattgtgagaagaagggtatcatgtcagatgcccgggttgggaattcactcatagacttgtatgctaagattggctctgtgcaaaactcgctaaaggtgtttgatgaaatgctggatagaagaaatttggtgtcatggacatcaataatttctggttttgcaatgcatgggctgtcagttgaggcacttgagctgtttgcagagatgagaagagcagggattaagcccaacagaatcaccttcttgagtgtcatcaatgcctgcagtcatgggggtctggtagagcaagggttagcgtttttcaaaagcatggtttatgagtacaatatagatccagagatcaagcattttgggtgcatcatagacatgctaggtagggctggacgtttgtgtgaggctgagcaaataatagaagggttgcctatggaggttaatgtaactgtatggaggatactgttgggttgttgcagtaagtatggagaagttgcgatgggggagagggcaataaagatgatatcagacttagaaagagaatctggaggtgattttgcagtattgtccaatgtacttactgagcttggtaggttcagtgatgctgaacaagcacggaagttactggatcagaggaaaattgttaaggttcctgggcttgctttggttggcgagattcagtagtctcaaaattgttcagtctgatgggggaagctctaaaatttctttgcaaccttaccatgttaattatcttccagtagcataccaacttcattaaatctcccagccaaatgttgcaggaagcaggtgaagtgaacctcatgtccagttcttgctcctctttaactagtaactagatcatttgtagtgatggaagctgtaaagaagctccatgctcatctcgttgtttctggcctgcacaactgtcaatatgcaatgtccaaggttatcagattgtatgctcttcatcaatcagatttggtttctgctcataaagtatttaagcagattgagtcaccaacaacttttctttggaatactcttctaaggggtcttgctcagagtgatgcaccaaaagatgcaattgttttttacaagaaagctcaggaaaagggtatgaagccagacaacctgacatttccttttgtgttgaaggcttgtgcaaaaacttgtgctccaaaggaaggtgaacagatgcacaaccatgttataaaacttggatttcttctggacatctttgtttccaattctctgatttatctatatgctgcttgtggtgctctggcctgtgcaagatccgtctttaatgagatgctagttaaggatgttgtgtcctggaattccttgattggtggatacagccagcacaatagacttaaagaggtattgacattattcaagctaatgcaggctgaagaagtgcaagctgataaggttacaatggtcaaggtgatttcagcttgcactcatctaggagactggagcatggcagattgtatggttaggtacatcgagcataatcatattgaagtggatgtgtacttggggaatactttgattgactattactgtagaattgggcagctgcaatcagctgaaaaggtgttttctcagatgaaggataagaacactgtgacactgaatgcaatgatcactgcatatgcaaagggtgggaatttggtctcagcgaagaaaatattcgatcaaattcctaacaaagatttgatttcctggagttctatgatatgtgcatactcgcaagctagtcacttctctgattctctggagctcttcaggcagatgcagagagccaaggtaaaaccagatgctgtcgtgattgccagtgtactttctgcttgcgcacacttgggtgcacttgatcttggtaagtggattcatgactatgtgaggagaaacaatatcaaagctgataccattatggaaaactctctgattgacatgtttgcaaagtgcgggtgcgtgcaggaggcactacaagtgttcacggatatggaggagaaggacaccttgtcgtggaactcaatcatactaggactagcaaacaatgggtttgaggatgaggcgctggacatttttcacagtatgcttactgaaggtcccagacccaatgaggttactttccttggtgtgctgatcgcttgtgccaacaggcaactagttgaggaagggcttgaccactttgaaaggatgaaatcagttcacaacttggaaccacagatgaagcattacggatgcgttgttgatattctcagccgtgctggtcagctggagaaggcggttagttttatcagtgagatgcccctggctcctgaccctgtggtttggaggatactgttaggggcgtgcaggacacatggtaacgtggctgttgccgagatggccaccaagaagctcagtgaactagaccccggtaacagtgcggactccatgttgctgagcaatatttatgcaagtgctgatcgatggagcgacgccatgaacgtcaggcgatggacggctgataatgcagtgaggaagtcgcccgcttgtagtgttgttgattcagctagctcgacgaatagttaggacccaccgaattgccttcgttgtcaggtctaattttgtcaacagcactgtctattatggtagtaacctcgtctcaatttggtcaggggaatacatggcgccggagccgtgacgccccagtggtgtcttaagatgtgtcgaccctttcagggccttggaattgacagaacaaagggccccggaaataccagcctgactcccagctaggtctaatgcaggcctgtcttctactgatggaatgttgaagaaatctttatcagcatccgagagtgtattttctcagacgctgacatgtattttgcgaagtcgttcttcgccttgctgctgatgcacttaaagagaggcgcagcaaggccactttgatagagttcatcgtctactatggataaggcctggtgcgagtgttaattctctcgagtttatgtttgttcgtcggcgcatagcttctgtttaggtaggtgagtccgagctcgtgcctgaccgcgatgacagtgtgctcgagctcgggatcgtcaggaagctcacgaccagctgcgccaaggccgggaggagcatctccctcgcgctcgaggcctttccctgcgacatccaggagcagctcaatcggttcatggatggcagaatcgatggcatactttgaggctttatacatctcactgggcaccagagcgatggcaggagtatgaaccacttttgaattactgtcgtgataatggaataaagcttgttgcatgtgggactccacttgaggtggtaagaactgtgcaaacagaaggaattagaagcctttcaaaagctcaaagaaagctttatgctcctccagctggctcaggcttcatttctggctttacatccatctcaggccgatcattgatagacaaaatttcatcaacttgtggttccccttttggcccaagctcatatttatcagcacaggcaagagtagtcgatgattataccatgtccgagacaataatgaaagaaattactgatggagatccttcaggaatgctcgttgttgtaactggtgcgagtcatgtaatgtatgggccacgaggaattgtagtttttttttataaaaagtaacttcatttgataacatacaagaaaggtatgatattttttttctaagatggcaaacgcttgtacgtgaataatatattaataaaacttgatttgatttttagaccatc

SEQ ID NO: 31617 - DNA, 2054 bp, Zea Mays
aacgagacccccaagtcccaactgccttgatggccaaggaaacaggcctgccagccagccgcctttcgaaaccgagcaccagggagcagacgcggtctctggaacccaggttccagcgagcaaaccatctaaccaggcgctgagaattctgtgcggaggaggcggatggcaatggtggcggcggcggaggggagcgggcgcagggacgccgaggcggagctcaacctgccgccagggttccggttccacccaacggatgaggagctcgtggtgtactatctctgcaggaaggtagcgcggcagcaggtgcccgtgcccatcatcgcggaagtggatctttacaagttcgatccgtgggatctgcccgagaaggcgttgtttggtcgcaaggagtggtacttctttacgccgcgggaccgcaagtacccaaacggctcgcgccccaaccgcactgccggaaaggggtactggaaggcgactggggccgacaagtcgatcgtgcccatgggcagcaccagggcggcggggatcaagaaggcgctggtgttctactctggcaaggcgcccaggggcgtcaagacggactggattatgcatgagtaccgcgtcgctcaagcggaccacaccctggggaagaagggctcacagaagctggacgagtgggtgttgtgccggctgtataacaagagaaacaattgggacaaggtgaaggtcgaggagcaggagttggaggcggcgccgcgccgacagcatcacttgcagagcgcggaggattccatgtctaacagtttccagacgcacgactcggacatcgacaacgtcttcgagctacaaaattgctacggtaacaacatggtgcaagggcaggccatgacccccaggaacgacattggcgtcgtgacggtgaaggaggacaacgactggttcaccgacatgaatctggatgatttgcaggcatcctacaacatggcccatacgacgaaccattcaacagttacgttccaatctttcttcttaaaactccaccccttttgcccacaccggactaccggagacgcccacgtccgcgctgctggccaatgcggcccaattctacacggcttgaacctaggtagccacgagccctcagcccctcactccgtcacccaccagccgccgctacgtgacgaggtctcccgtgtgacacagactgccgtccttcgcctggcgagtggtgacctgcgacctccgtctccggctgccgtcctctgccatggtccgtggaccgtagtccggcagcagcagggctccagcctctgcccgaccgcttgcccgccaccggcgtctgctacctccgcatccggcctctgggcaccggtctcccgtctctgcccccggcgttcatcgtccggtctccgacaccaggccctcagctacagcagtacagcaccagttcccgcaacagcgaggtcatcgacgccgccatctaggacggctcttaagaatcgatggcatactttgaggctttatacatctcactgggcaccagagcgatggcaggagtatgaaccacttttgaattactgtcgtgataatggaataaagcttgttgcatgtgggactccacttgaggtggtaagaactgtgcaaacagaaggaattagaagcctttcaaaagctcaaagaaagctttatgctcctccagctggctcaggcttcatttctggctttacatccatctcaggccgatcattgatagacaaaatttcatcaacttgtggttccccttttggcccaagctcatatttatcagcacaggcaagagtagtcgatgattataccatgtccgagacaataatgaaagaaattactgatggagatccttcaggaatgctcgttgttgtaactggtgcgagtcatgtaatgtatgggccacgaggaattgtagtttttttttataaaaagtaacttcatttgataacatacaagaaaggtatgatattttttttctaagatggcaaacgcttgtacgtgaataatatattaataaaacttgatttgatttttagaccatc

SEQ ID NO: 31618 - DNA, 2049 bp, Zea Mays
aacgagacccccaagtcccaactgccttgatggccaaggaaacaggcctgccagccagccgcctttcgaaaccgagcaccagggagcagacgcggtctctggaacccaggttccagcgagcaaaccatctaaccaggcgctgagaattctgtgcggaggaggcggatggcaatggtggcggcggcggaggggagcgggcgcagggacgccgaggcggagctcaacctgccgccagggttccggttccacccaacggatgaggagctcgtggtgtactatctctgcaggaaggtagcgcggcagcaggtgcccgtgcccatcatcgcggaagtggatctttacaagttcgatccgtgggatctgcccggcgttgtttggtcgcaaggagtggtacttctttacgccgcgggaccgcaagtacccaaacggctcgcgccccaaccgcactgccggaaaggggtactggaaggcgactggggccgacaagtcgatcgtgcccatgggcagcaccagggcggcggggatcaagaaggcgctggtgttctactctggcaaggcgcccaggggcgtcaagacggactggattatgcatgagtaccgcgtcgctcaagcggaccacaccctggggaagaagggctcacagaagctggacgagtgggtgttgtgccggctgtataacaagagaaacaattgggacaaggtgaaggtcgaggagcaggagttggaggcggcgccgcgccgacagcatcacttgcagagcgcggaggattccatgtctaacagtttccagacgcacgactcggacatcgacaacgtcttcgagctacaaaattgctacggtaacaacatggtgcaagggcaggccatgacccccaggaacgacattggcgtcgtgacggtgaaggaggacaacgactggttcaccgacatgaatctggatgatttgcaggcatcctacaacatggcccatacgacgaaccattcaacagttacgttccaatctttcttcttaaaactccaccccttttgcccacaccggactaccggagacgcccacgtccgcgctgctggccaatgcggcccaattctacacggcttgaacctaggtagccacgagccctcagcccctcactccgtcacccaccagccgccgctacgtgacgaggtctcccgtgtgacacagactgccgtccttcgcctggcgagtggtgacctgcgacctccgtctccggctgccgtcctctgccatggtccgtggaccgtagtccggcagcagcagggctccagcctctgcccgaccgcttgcccgccaccggcgtctgctacctccgcatccggcctctgggcaccggtctcccgtctctgcccccggcgttcatcgtccggtctccgacaccaggccctcagctacagcagtacagcaccagttcccgcaacagcgaggtcatcgacgccgccatctaggacggctcttaagaatcgatggcatactttgaggctttatacatctcactgggcaccagagcgatggcaggagtatgaaccacttttgaattactgtcgtgataatggaataaagcttgttgcatgtgggactccacttgaggtggtaagaactgtgcaaacagaaggaattagaagcctttcaaaagctcaaagaaagctttatgctcctccagctggctcaggcttcatttctggctttacatccatctcaggccgatcattgatagacaaaatttcatcaacttgtggttccccttttggcccaagctcatatttatcagcacaggcaagagtagtcgatgattataccatgtccgagacaataatgaaagaaattactgatggagatccttcaggaatgctcgttgttgtaactggtgcgagtcatgtaatgtatgggccacgaggaattgtagtttttttttataaaaagtaacttcatttgataacatacaagaaaggtatgatattttttttctaagatggcaaacgcttgtacgtgaataatatattaataaaacttgatttgatttttagaccatc

SEQ ID NO: 31619 - DNA, 1760 bp, Zea Mays
ccaaaagcagcatcgagcggtcagagggaaatcaagagctccaaaagacacatgtcccggaaacgacacatcctccaccatcggtcggtctcggtcctcctccccctcgctctgaaatggataaagcgaaccaagctgtgcgagttgactttcaggcctgcgctgcacccacactcacaaccaagcggcggagagagagagtgtgtgtgtgtgtgacagagagggagctgtcttgagctgtgtataaaatcccccccacttcatctgcatgcctggcgcgagaggcaccagccacagcccacagttcccccatttcatttgtgtggtagccgaggactgggagggacctactcaaccttttttttttgtgtgtgtgaaagatcgagagcgccgctcaacgaatagagcggtttctctgccttgtgtctttcctctgtcctgtggtctgcggtggccgcagctgcggcgcgcggtgatggagttcacatctaaaaagacggcttcgcttgccctcctctgcctcaagctctcctgcctcctcctccttcttcttcttccccggtcttcctctgctgcgcctctgtccagaagcctgtcgctgacgaggaaccgcctgcagcccgcggatgaccctgctccggaggttcccgctcccgcccagcaggtcggtcgcgctcgctcgctcgctcgatctctttctcgtcctgcggcttggtagatttcgtcgcgtatccacaccacaacaactgcgcacaaaaagcttgtgcttgggggcaggggcactccactcacatgcactgttagctgggcatgcagggctgcaggccggccatagtgcaggtcacatgcatggccactcgcacacacagttgcaaacttgcaattcgcgtgccccaccccactcacgacacctttcccgccacaaaggcaaaaataaaggtttgtgcgtgcaacaacacaatcgtgtcaactttactacttgcacgctagctgtccgtcagttgactgctcgtcgatgtcatcatcaagtctttttgtaaatatctgacgcacacgcacgcactactaccaataacgaacccagctaatctttaaatttgtctgtgtacgtcgtcgtctctgtgtactatacagggtgcgggtgctggtgctggtgcggtgggagctcgagaccccggcggcgaggtggcggtgaggatggacatcgaggtcaacgactaccctgggtccggtgccaacaaccgccatgaaccgagaagccctgggaggccatgaccatgaggtttgaaggcttgaagctagcgtacgtctcagacaggaatcaggaatgaagaccatggcatggagctgctgctgctgtcttgagagttttataagtagcgaagcgaaggagagtacattgcttgttgttagctatagaggtcaagggagagccttatcgtgtatttaattagcttgttaattattgctgcgtactccttgttaagagtcttcaacttaacggcggatcggatctgcttgagctagctactagcttttgctatctctgatctagaacaaaagcatcagttagtaacgtagcatcgtcaacagctatagtactcttgagatatttacttgagtcacattcgcctgcagaagactcgaccgagacctcctctgtcctctagtgtgtgccggtttcgcgcgcgccaatacgatgctcaagctcaagtgttaaagggtgtaacctgatgcgacgatggctatctcactgtctg

SEQ ID NO: 31620 - DNA, 527 bp, Zea Mays
tttttttttttgaatcaaataagtcataatgttgccaggttcaagttcgctcttccaactccaacttctgtattgggccttccaatcggtcaacatatcagctgcagaggacaagacgctacaggtgaagaagtaatcaagccttatacccctactacattggattctgatcttggatattttgagcttgtcataaagatgtatccccaagggagaatgtcccatcatttccgcgagatgaaagttggtgattatttgtctgtgaagggacctaagggccgattcaagtaccacgttggccaagtgagggcatttggaatgctggctggtggatcaggcattactccaatgtttcaagttgccagagcaattcttgagaaccctaatgacaacaccaaggttcacttaatttatgctaatgtcacatatgaagacattcttctgaaggatgagctggacgacatggccaaaacctatcctggccgctttaagatctactatgtgttgaatcagtgtttttacttgtg

SEQ ID NO: 31621 - DNA, 2761 bp, Zea Mays
gctgtctctggcccatcaggcggctgcctctgccttccagttccagccgcgtcgctgcctatcacacacgtcatcggacgtgacctcctcacccgcagccgcggtggggcccgtctaggacgtgctcctttccctccacggctttgacatcgcgtcacgccggccggcctctgcctgacctgcctcggcgcagccccacgcgacgtacgccacggaacgacgcgccgaccgagccaagccagtactaccacgtccccccagccaaaccaaacgcaggcacggcacggcacggcgcggtgctcattcgcattccccagccccaccgatcggatcggcaaaatccctcccaccagctccccacagatcccggcgtccccaccgcacatccctccctgcttccttcccccatcgccccggccgcggaggcggagcttccccccacgccacgatggcggagtgccgcagcctcatcgagttcctccgcgcgttcgagcaccaccgcagggcggccgacatctccgcctccgcgtgctcccgatccaggcgggccggggcctcctccgccgcaggcggctccttctgcgacagcgccccgatggccgtggtcgacgcggtcatgctcctcgccgtcgtcaccgcgctcggcttcctcctgatcccctacctcaagctgctgctcctcgagatgggcgcgctgctccaccccgccgcgtcctgcctcccggccgccgccttcttcggggccgccgtcgccgtcgccgcggccgtcgtcgcctgggagctgctgggccaccacgcgcgcaagtgcggcaagcccaggtgcaggggcctcaagaaggccgtcgagttcgacatccagctggagaccgaggagtgcgtgcgcggccgccccggccccgcggcgcgatcggcgctgctggccgcggcgggggcgcgccccgtcgacctaggcgacgaccagcgggagctggaggccgagctgcgcaagatggcgccgcccaacggccgtaccgtcctcatcttccgcgccccctgcggctgccccaagggccgcatggaggtctggggcgccaagaaggtgcgccggatcaagaagtgaaggggggaacaaggatcggatggttacttgttagtgcaatagtactagcgcactcttgttcctacctcgatcctcgtaagtagctactgctaggaaaaaaaatcctcagtaataataagtataagtatagggagacgaaataaacggaacacagaaccagttattatcacagatagcttatatagacaataatatactccttgtattatgaaccagtggcgaatttggacagaaatacatgctgtttacttgttcattctctaattttcatgggatcctggataattgatacagtagcaacatagacaatatcttagtcagtagctgcttgctcctttggctgtcttttgggtccttcatttttatccatattgtggtacaggtttagttgctacttacctgtcttatatgacatgttttttgctgttgattcaatgatattggggtgaagttttagctcctttatggtaggttgacagaatgacagccaacgctctcatcgttgttgaggctgcttggatcctgagaacttcaggaagttcaaacttgttgaaaagaagcaaataagtcataatgttgccaggttcaagttcgctcttccaactccaacttctgtattgggccttccaatcggtcaacatatcagctgcagaggacaagacgctacaggtgaagaagtaatcaagccttatacccctactacattggattctgatcttggatattttgagcttgtcataaagatgtatccccaagggagaatgtcccatcatttccgcgagatgaaagttggtgattatttgtctgtgaagggacctaagggccgattcaagtaccacgttggccaagtgagggcatttggaatgctggctggtggatcaggcattactccaatgtttcaagttgccagagcaattcttgagaaccctaatgacaacaccaaggttcacttaatttatgctaatgtcacatatgaagacattcttctgaaggatgagctggacgacatggccaaaacctatcctggccgctttaagatctactatgtgttgaatcagcctcctgagaactggaacggtggtgttgggtttgtgtctaaggaaatgatccaatctcattgtccagcgcctgctgaggacattcagatcctgagatgtggtcctcctccgatgaacaaggccatggctgcacaccttgacgagctcaactacacaaaggagatgcagttccagttctaagcaatgttaagtttgcaaataataattagtgaccgacatggttcttcggtcacaggaatagtacctgactctgctcgttagctgatatcaggaggaattcaggatcacatgatgattagtagtgcgccagcattttttgcaatctctatttttgaggtcaaatgatatctacctccacataaatccacattggcagagacaacattttgttactatcattattgattttaaatgtggaccattggatgcgataagaaatgtctcactatcatcagttaaccatagcaatgcaaagaaccttacttttggttcatatatacaaccaaaaagcaaacattttggttatgctgtttccttaaaccgtgacatggattgggaatctctcttcttatctggagtaagcattttggttatgcagtcacct

SEQ ID NO: 31622 - DNA, 1210 bp, Zea Mays
gcgtcttcagtcgtcacttcgtcaggccacatgcaatcatccgatgactatctgagaggctgcttggatcctgagaacttcaggaagttcaaacttgttgaaaagaagcaaataagtcataatgttgccaggttcaagttcgctcttccaactccaacttctgtattgggccttccaatcggtcaacatatcagctgcagaggacaagacgctacaggtgaagaagtaatcaagccttatacccctactacattggattctgatcttggatattttgagcttgtcataaagatgtatccccaagggagaatgtcccatcatttccgcgagatgaaagttggtgattatttgtctgtgaagggacctaagggccgattcaagtaccacgttggccaagtgagggcatttggaatgctggctggtggatcaggcattactccaatgtttcaagttgccagagcaattcttgagaaccctaatgacaacaccaaggttcacttaatttatgctaatgtcacatatgaagacattcttctgaaggatgagctggacgacatggccaaaacctatcctggccgctttaagatctactatgtgttgaatcagcctcctgagaactggaacggtggtgttgggtttgtgtctaaggaaatgatccaatctcattgtccagcgcctgctgaggacattcagatcctgagatgtggtcctcctccgatgaacaaggccatggctgcacaccttgacgagctcaactacacaaaggagatgcagttccagttctaagcaatgttaagtttgcaaataataattagtgaccgacatggttcttcggtcacaggaatagtacctgactctgctcgttagctgatatcaggaggaattcaggatcacatgatgattagtagtgcgccagcattttttgcaatctctatttttgaggtcaaatgatatctacctccacataaatccacattggcagagacaacattttgttactatcattattgattttaaatgtggaccattggatgcgataagaaatgtctcactatcatcagttaaccatagcaatgcaaagaaccttacttttggttcatatatacaaccaaaaagcaaacattttggttatgctgtttccttaaaccgtgacatggattgggaatctctcttcttatctggagtaagcattttggttatgcagtcacct

SEQ ID NO: 31623 - DNA, 837 bp, Zea Mays
ttcgaacctaacagtaaaaccttgtgatctccgcatccaggcacgtacaacgctgctgctgacaccgagctacctacctcccccgtgccaccacctctaaaatcccccagcggcccaaccgaacccgcctagggattcctaccgagggaggccgcacgcagccatggatttcctgcaggagcaaagcgtcgagaccacagtggccgtcgccgtcgctgtcgccgccgtcgccgcaggcggcgccttcctcctccttcgatccaggaagcccaagggctgcttggatcctgagaacttcaggaagttcaaacttgttgaaaagaagcaaataagtcataatgttgccaggttcaagttcgctcttccaactccaacttctgtattgggccttccaatcggtcaacatatcagctgcagaggacaagacgctacaggtgaagaagtaatcaagccttatacccctactacattggattctgatcttggatattttgagcttgtcataaagatgtatccccaagggagaatgtcccatcatttccgcgagatgaaagttggtgattatttgtctgtgaagggacctaagggccgattcaagtaccacgttggccaagtgagggcatttggaatgctggctggtggatcaggcattactccaatgtttcaagttgccagagcaattcttgagaaccctaatgacaacaccaaggttcacttaatttatgctaatgtcacatatgaagacattcttctgaaggatgagctggacgacatggccaaaacctatcctggccgctttaagatctactatgtgttgaatcagtgtttttacttgtg

SEQ ID NO: 31624 - DNA, 1358 bp, Zea Mays
ttcgaacctaacagtaaaaccttgtgatctccgcatccaggcacgtacaacgctgctgctgacaccgagctacctacctcccccgtgccaccacctctaaaatcccccagcggcccaaccgaacccgcctagggattcctaccgagggaggccgcacgcagccatggatttcctgcaggagcaaagcgtcgagaccacagtggccgtcgccgtcgctgtcgccgccgtcgccgcaggcggcgccttcctcctccttcgatccaggaagcccaagggctgcttggatcctgagaacttcaggaagttcaaacttgttgaaaagaagcaaataagtcataatgttgccagaggacaagacgctacaggtgaagaagtaatcaagccttatacccctactacattggattctgatcttggatattttgagcttgtcataaagatgtatccccaagggagaatgtcccatcatttccgcgagatgaaagttggtgattatttgtctgtgaagggacctaagggccgattcaagtaccacgttggccaagtgagggcatttggaatgctggctggtggatcaggcattactccaatgtttcaagttgccagagcaattcttgagaaccctaatgacaacaccaaggttcacttaatttatgctaatgtcacatatgaagacattcttctgaaggatgagctggacgacatggccaaaacctatcctggccgctttaagatctactatgtgttgaatcagcctcctgagaactggaacggtggtgttgggtttgtgtctaaggaaatgatccaatctcattgtccagcgcctgctgaggacattcagatcctgagatgtggtcctcctccgatgaacaaggccatggctgcacaccttgacgagctcaactacacaaaggagatgcagttccagttctaagcaatgttaagtttgcaaataataattagtgaccgacatggttcttcggtcacaggaatagtacctgactctgctcgttagctgatatcaggaggaattcaggatcacatgatgattagtagtgcgccagcattttttgcaatctctatttttgaggtcaaatgatatctacctccacataaatccacattggcagagacaacattttgttactatcattattgattttaaatgtggaccattggatgcgataagaaatgtctcactatcatcagttaaccatagcaatgcaaagaaccttacttttggttcatatatacaaccaaaaagcaaacattttggttatgctgtttccttaaaccgtgacatggattgggaatctctcttcttatctggagtaagcattttggttatgcagtcacct

SEQ ID NO: 31625 - DNA, 2086 bp, Zea Mays
gcgcgatttccaaactcttgttaacgggccaattctatagcggatgtcggagggcacgcgctccagaatccacaatcttggcagccagccaatgagccatcatcccccagaagcgcgcgcacaggaactgggctggaggatccgtttccgcaaccgcaacccagtccccttatcctgaaaactactcctcctctctcgtctctaaacccccgggcagcggacaaacaagcacacagcacgagcgaagagacgcagccatggcgatggctccaccgcctgcctgctcgctcttcccccgggtcgccgctgctgcgcccagttccgtcacctccaactccgttttgacctcgcgtggccccggtatccttccttccccgcgtctcgctttcgcccgccgccacctctccgcggcatggtcatcgaaggcagcagcctccgcttctgtcgaaatccaggatgactacacggatgagatggacgcggtgaacattgcgcaggatgtcacccagctcattggaaaaacaccaatggtgtatctcaatagagttgctgacggatgtgtggctaatatcgctgcaaagctcgagtacatgggaccttgccgaagtgtcaaagataggattggattaagcatgattaatgatgctgaagagaagggattaatttctccagacaagaccattttggtagaaccaacaactggaaatactggtgtagccattgcttctgtggctgcagcaagaggatacaagttgatagcaacaatgccttcatcgttagatgtcgagagacgcattcttctgcgtgcattcggagcagagattgtgttaactgatcctaccaaaggactaaaaggagcttttgataaagctgaggaaatagtcctgagaacaccaaatgcgtatatgtttcagcagttcaacaatgaggcaaatagtgaggcccagaaatatgggaagacacgttgggttctgttgatatacttgttgcaagcataggaacaggcggtaccattagtggcactgggcgttacttgaaaaggatgaacaaagatattaaggttattggggtagaacctgctgaaactagtgtgatttctggtgatagccctggttacattccaagtatattagatgtgcagttgattgatgaggttgtgaaggttagcacagcagaagccgttgattctgcaagggaacttgctctaaaagagggcctgctggttggtatttcctctggtgctgcagcgattgctgctatcaatgttggcaaaagacctgaaaatgctggaaagttgattgcggtcattttccccagctttggagagagatacatctccaccattctgttccgtccgatatatgactctgttcgaagaatgaggaagagatagcgagccttgtactacttcaagcgcgttgccagtccccttctctagacctgacaggcttccatgacatgattgataaacgtgaagcagtgaagaccctgtttgattgcaacttcagggtccgaagttttgaagctgcacagagtttctatcaggtgagctgcaggcctgcagcttggttctagcaagactggaggagtgcctcatgtttagaccagctcatacaatcctggtgcaacatgcagaattgcgtgccgcagttagcttgggcctttcgtttagtagtctaggaccgggtacaaaccgcttgttacctggtacgcacttgagctgattttagcgaccaactatctgcaaattctttttgccttccgaattttgattgtttcatcttttatctggcgtctgctttactaactagttttttgcggaactacaattttcttttctctttttcttgtctgcaaaagatcgaaggtcgagcttgcaattgcaagatcaaaggtcaagctgaaaggagcctgtcgaacaaaatgcagcgtcttcactcaggtcgaagcgggaagctctaaaccgtcagagcgtctccaaaactggctgacactgacagacaaaaaaaaaactgatttaggtattggagcgaacacatccttccaatagcagcctaaatcaccaccttattttagctattaccta

SEQ ID NO: 31626 - DNA, 2105 bp, Zea Mays
gcgcgatttccaaactcttgttaacgggccaattctatagcggatgtcggagggcacgcgctccagaatccacaatcttggcagccagccaatgagccatcatcccccagaagcgcgcgcacaggaactgggctggaggatccgtttccgcaaccgcaacccagtccccttatcctgaaaactactcctcctctctcgtctctaaacccccgggcagcggacaaacaagcacacagcacgagcgaagagacgcagccatggcgatggctccaccgcctgcctgctcgctcttcccccgggtcgccgctgctgcgcccagttccgtcacctccaactccgttttgacctcgcgtggccccggtatccttccttccccgcgtctcgctttcgcccgccgccacctctccgcggcatggtcatcgaaggcagcagcctccgcttctgtcgaaatccaggatgactacacggatgagatggacgcggtgaacattgcgcaggatgtcacccagctcattggaaaaacaccaatggtgtatctcaatagagttgctgacggatgtgtggctaatatcgctgcaaagctcgagtacatgggaccttgccgaagtgtcaaagataggattggattaagcatgattaatgatgctgaagagaagggattaatttctccagacaagaccattttggtagaaccaacaactggaaatactggtgtagccattgcttctgtggctgcagcaagaggatacaagttgatagcaacaatgccttcatcgttagatgtcgagagacgcattcttctgcgtgcattcggagcagagattgtgttaactgatcctaccaaaggactaaaaggagcttttgataaagctgaggaaatagtcctgagaacaccaaatgcgtatatgtttcagcagttcaacaatgaggcaaatagtgagatccactttcaaaccacaggcccagaaatatgggaagacacgttgggttctgttgatatacttgttgcaagcataggaacaggcggtaccattagtggcactgggcgttacttgaaaaggatgaacaaagatattaaggttattggggtagaacctgctgaaactagtgtgatttctggtgatagccctggttacattccaagtatattagatgtgcagttgattgatgaggttgtgaaggttagcacagcagaagccgttgattctgcaagggaacttgctctaaaagagggcctgctggttggtatttcctctggtgctgcagcgattgctgctatcaatgttggcaaaagacctgaaaatgctggaaagttgattgcggtcattttccccagctttggagagagatacatctccaccattctgttccgtccgatatatgactctgttcgaagaatgaggaagagatagcgagccttgtactacttcaagcgcgttgccagtccccttctctagacctgacaggcttccatgacatgattgataaacgtgaagcagtgaagaccctgtttgattgcaacttcagggtccgaagttttgaagctgcacagagtttctatcaggtgagctgcaggcctgcagcttggttctagcaagactggaggagtgcctcatgtttagaccagctcatacaatcctggtgcaacatgcagaattgcgtgccgcagttagcttgggcctttcgtttagtagtctaggaccgggtacaaaccgcttgttacctggtacgcacttgagctgattttagcgaccaactatctgcaaattctttttgccttccgaattttgattgtttcatcttttatctggcgtctgctttactaactagttttttgcggaactacaattttcttttctctttttcttgtctgcaaaagatcgaaggtcgagcttgcaattgcaagatcaaaggtcaagctgaaaggagcctgtcgaacaaaatgcagcgtcttcactcaggtcgaagcgggaagctctaaaccgtcagagcgtctccaaaactggctgacactgacagacaaaaaaaaaactgatttaggtattggagcgaacacatccttccaatagcagcctaaatcaccaccttattttagctattaccta

SEQ ID NO: 31627 - DNA, 456 bp, Zea Mays
cttgatgggacccgctagacaatttttcctctctcaatctcgcacatggagtaaacatcgggttgttgtaacagcccggaaatctcgcctatcaaacaccctggagctcggactctgcgggcataaaccacatccgcgcatgccgccaccgcctgtgtatatatggtcgcggactcgtgctccctcaatcgtccctatcgacgaccgtacaccgacgtagaaaccgcactgcacaaggtgtgtgccgccgccgtcggccccctgtttttggcaccacgtggagacttagtgctgacagggtggttcgtcgcggtctcgggattctgcgtgggggatccttggacgaaatagaccaccgagctcaccggaattcctcgccgtcgccataaactcgtgctgcgctgtggccaggcgttcctgtgacccaatagctgcgtgaggtcacgagtcacctga

SEQ ID NO: 31628 - DNA, 1507 bp, Zea Mays
ctggattcctccacatccaaacgaccaaacgcggcggccgggctcctgtgcagcggcttagctctcttctcgccctcccgccgtccgccgccttggcgtcgctgtactcgcgcccgtgccgtgcgctaccgaccaagcctaagagtgacatgtcggcgtcggatcttcccgacgagctgtgggcgcgtgtcctggagctgggagccgcgtcgtccgcgctggggttccgcgacctctgctccattgccatcgcgtcccgccgcctcggacgcctctccgtctaccccgccctctggtcgaaactcctctctcgcgatttcccctcccaatccgaaccctccacgtcctcggcctccacctcccagccgccgccgcagcggctccaccccaaatccctttacaagaccaagtttgagaggcacaaggtgaggatggctgaggcgaggcggcgggcggtgttcgaagcggaggcgcgggtgctagcttccaggaggcgactggtggagctggaggagtccattcgggaagagggggagaggatgaagacggctgcgcaggagctcgacaacctcgagagggagagcttctgtggcattaaacgtatggcaaccacaagttgttcgtggtcgtcagaagcagttggttcagcaatgcacagttcctgttgattcccgtcttagtgatctaaacatggagctgaaagtttgtaagcaacaaatagcaacttataagaatgcctatgtatgtgatcacgggtttaactacaattggcagagaagaaaaaggctggctttactatagttgtgcttttgttattgtcatcagagcaaggagaagcacaagctgaatgattgtgaggaagcattgaaacgagcaaagtatcacccactgcaggatagtcatacaagtggaactatcaatgagccacgtgcaaagaggaagaaactgaaatgagccatacgatttgcctccggactcaagattggacagcgcagcgaaccggcttcatccttggtctctctgtccatgcgcgcacatgaagtcacgaaaggtgctatattatgatataggaccaggaggcacctcggctgtgcaattctttgccatttttccaggcacgaaggtgctattatgaggaagcacctcgggtgtttccatatattgctgaaagtgtccacgactccacggatgttgtacaccgtccaccgaccagataattccgcagcagaaaggcgccgactattcctatcgtggaattgtttatcctccacgaagctgtgggctagagcccagtgctgaagcttaccagatttgactttgaaaaccactactagtagcttctagcttgtacacaactaggtatcgtgtatatcatcatcgtcgtcatcatcatcattcttataaagacactaatctattttcgttccttgaaatcaaaagaaacttacccatgttctcgcttgatatgcccttcggcttattatacgtgagcacgtacctttcatgc

SEQ ID NO: 31629 - DNA, 2579 bp, Zea Mays
ctggattcctccacatccaaacgaccaaacgcggcggccgggctcctgtgcagcggcttagctctcttctcgccctcccgccgtccgccgccttggcgtcgctgtactcgcgcccgtgccgtgcgctaccgaccaagcctaagagtgacatgtcggcgtcggatcttcccgacgagctgtgggcgcgtgtcctggagctgggagccgcgtcgtccgcgctggggttccgcgacctctgctccattgccatcgcgtcccgccgcctcggacgcctctccgtctaccccgccctctggtcgaaactcctctctcgcgatttcccctcccaatccgaaccctccacgtcctcggcctccacctcccagccgccgccgcagcggctccaccccaaatccctttacaagaccaagtttgagaggcacaaggtgaggatggctgaggcgaggcggcgggcggtgttcgaagcggaggcgcgggtgctagcttccaggaggcgactggtggagctggaggagtccattcgggaagagggggagaggatgaagacggctgcgcaggagctcgacaacctcgagagggtcaggagagcttctgtggcattaaacgtatggcaaccacaagttgttcgtggtcgtcagaagcagttggttcagcaatgcacagttcctgttgattcccgtcttagtgatctaaacatggagctgaaagtttgtaagcaacaaatagcaacttataagaatgcctatgtatgtgatcacgggtttaactacaattggcagagaagaaaaaggctggctttactatagttgtgcttttgttattgtcatcagagcaaggagaagcacaagctgaatgattgtgaggaagcattgaaacgagcaaagtatcacccactgcaggatagtcatacaagtggaactatcaatgagccacgtgcaaagaggaagaaactgaaatgagccatacgatttgcctccggactcaagaaatttctctttgtaatttgggatcaagcctgtggatggacgaaccctcggtggacttcagtgctgaaggtgttagtagcagatcaggtctctgccaaagcacctgtttaaatcctggttgtaagcatgaccgtgcttgctgggaagatgattatgtcaaggctgtaatatctcatgggcaagatgatttggcggtcgatgaaattggattggctcttactgaagtgatgcatgcatatgatgatgacaaatggtcaagtctgtatgaagattttgacgacggtgtcggcgatgaaccaattcttcctctggaatcagattcaactggtgattttgtggacattgactccgcatcacctacctttcctagtgacgatgcaatggaatcatcaattaccaattcatttgctcggaattgttcaattaatggcactccaagtttagtttctgcaatgaaaggaacacgtgtgaagaagggaatcacgacaaagttgagcgtttcttgggcccctgatgtatacgaccctcctattacttctgactcgcacacggtgaaagggcaccatacgagttcaactaagggtaactacaaatacaagacctccaagagcagcagtaccactagaaggaaaaaggacaagaagcattctaggcacagtagtagcaatggaggtggcagcaaaagagacaagaagcattcttaccgcagtagtgccagcagcagcagagctattaccagtggttctcaatattgtgacgcatacagtggtggtggcatcaacagcagaactgttcctgaatctgccaagatatctccattggtggtagctgaaaatgtcacaccgcaagagatggttcctgtactgaagacactggaaccaatcaaatgtactaccagctgcggcaaagagaagccatttgccttgctgtcgcgccagttttcccctgcaaggtacaaggggatgttcaccttttggaaccaaaaccaactggcttcttgacaatttgctatgcggaagctcacctgaaagtttccttgccaagggctgttcggatcccctccaaactttagagcttcaaaaattttagagcattttagctcacttttgaactctaaagctctaatctaaggttgaccaaagtttagatctaactgagctttacctctaaagtttagagaaggaaatctaaacatgctctaatttgattgtatcaaagattgttgctattgttctcttcgttaccatgtttgtttcgcctgtctgaaacttcagagatcatgttttggaaaattgcttggcaaagtgcttgtgttgtattatttgcacacctacattgtaggggctgattcagtcttctgtgcttttgttatgttgtatcacgacataggttgatttattaggagatttgtttggaactatggaaaacacgcatggaacaacatgtcagtatttgtaaaaaaagagtcgctcattgcggtgaagttgaagaagttatcaagaggcaatagcgcagttagtcaaacatgaaaatagcagcagcagaagaaaattattcttcttatggcaaaaggtgtcctaagaaagaacaaaa

SEQ ID NO: 31630 - DNA, 2254 bp, Zea Mays
ttaaatataaataaaaaagctaaaatctattttgggacggagggactattataaagacacatcccaaagcggcctctcgccgcaccaacagccaatccacacctcgcttgcgttgtcctcgccgcggcctcgccctgattcggttcccccgttcctcgcctctgtcatcgtctcctctgacccaaattgagccaagcgaagccgtggccgtgatccggtccatgcgcggagcgtggtagccggattctatcgccgtcgcctccccttcgccgctattttccagtcgccgggatcagccgagttggatctcgaggcataaagcgttgcgggcgcccggcgaggatacgatgcctgcggtgctcgccgcattcgctacccttcgagccgccgctgccatcgcctccggggactcctccttcccctgttcccatcgtctcaagcatcgttttagtagtagtaattttagtagtagtaattgtcattaacctttgcgttccctccgtcgcgcacgctcctcggctcggtcctcaccttcgcatttcggttttggtctggttgtgctcgatccgaggcttactttggttttgcggcttctctccttgtcgaagcttggtgtctggattcgacctgcagatcggaaggaaacaaggtggtcattatcacctacaagataagagaaatttctctttgtaatttgggatcaagcctgtggatggacgaaccctcggtggacttcagtgctgaaggtgttagtagcagatcaggtctctgccaaagcacctgtttaaatcctggttgtaagcatgaccgtgcttgctgggaagatgattatgtcaaggctgtaatatctcatgggcaagatgatttggcggtcgatgaaattggattggctcttactgaagtgatgcatgcatatgatgatgacaaatggtcaagtctgtatgaagattttgacgacggtgtcggcgatgaaccaattcttcctctggaatcagattcaactggtgattttgtggacattgactccgcatcacctacctttcctagtgacgatgcaatggaatcatcaattaccaattcatttgctcggaattgttcaattaattttctgcaatgaaaggaacacgtgtgaagaagggaatcacgacaaagttgagcgtttcttgggcccctgatgtatacgaccctcctattacttctgactcgcacacggtgaaagggcaccatacgagttcaactaagggtaactacaaatacaagacctccaagagcagcagtaccactagaaggaaaaaggacaagaagcattctaggcacagtagtagcaatggaggtggcagcaaaagagacaagaagcattcttaccgcagtagtgccagcagcagcagagctattaccagtggttctcaatattgtgacgcatacagtggtggtggcatcaacagcagaactgttcctgaatctgccaagatatctccattggtggtagctgaaaatgtcacaccgcaagagatggttcctgtactgaagacactggaaccaatcaaatgtactaccagctgcggcaaagagaagccatttgccttgctgtcgcgccagttttcccctgcaaggtacaaggggatgttcaccttttggaaccaaaaccaactggcttcttgacaatttgctatgcggaagctcacctgaaagtttccttgccaagggctgttcggatcccctccaaactttagagcttcaaaaattttagagcattttagctcacttttgaactctaaagctctaatctaaggttgaccaaagtttagatctaactgagctttacctctaaagtttagagaaggaaatctaaacatgctctaatttgattgtatcaaagattgttgctattgttctcttcgttaccatgtttgtttcgcctgtctgaaacttcagagatcatgttttggaaaattgcttggcaaagtgcttgtgttgtattatttgcacacctacattgtaggggctgattcagtcttctgtgcttttgttatgttgtatcacgacataggttgatttattaggagatttgtttggaactatggaaaacacgcatggaacaacatgtcagtatttgtaaaaaaagagtcgctcattgcggtgaagttgaagaagttatcaagaggcaatagcgcagttagtcaaacatgaaaatagcagcagcagaagaaaattattcttcttatggcaaaaggtgtcctaagaaagaacaaaa

SEQ ID NO: 31631 - DNA, 2242 bp, Zea Mays
ttaaatataaataaaaaagctaaaatctattttgggacggagggactattataaagacacatcccaaagcggcctctcgccgcaccaacagccaatccacacctcgcttgcgttgtcctcgccgcggcctcgccctgattcggttcccccgttcctcgcctctgtcatcgtctcctctgacccaaattgagccaagcgaagccgtggccgtgatccggtccatgcgcggagcgtggtagccggattctatcgccgtcgcctccccttcgccgctattttccagtcgccgggatcagccgagttggatctcgaggcataaagcgttgcgggcgcccggcgaggatacgatgcctgcggtgctcgccgcattcgctacccttcgagccgccgctgccatcgcctccggggactcctccttcccctgttcccatcgtctcaagcatcgttttagtagtagtaattttagtagtagtaattgtcattaacctttgcgttccctccgtcgcgcacgctcctcggctcggtcctcaccttcgcatttcggttttggtctggttgtgctcgatccgaggcttactttggttttgcggcttctctccttgtcgaagcttggtgtctggattcgacctgcagatcggaaggaaacaaggtggtcattatcacctacaagataagagcctgtggatggacgaaccctcggtggacttcagtgctgaaggtgttagtagcagatcaggtctctgccaaagcacctgtttaaatcctggttgtaagcatgaccgtgcttgctgggaagatgattatgtcaaggctgtaatatctcatgggcaagatgatttggcggtcgatgaaattggattggctcttactgaagtgatgcatgcatatgatgatgacaaatggtcaagtctgtatgaagattttgacgacggtgtcggcgatgaaccaattcttcctctggaatcagattcaactggtgattttgtggacattgactccgcatcacctacctttcctagtgacgatgcaatggaatcatcaattaccaattcatttgctcggaattgttcaattaatggcactccaagtttagtttctgcaatgaaaggaacacgtgtgaagaagggaatcacgacaaagttgagcgtttcttgggcccctgatgtatacgaccctcctattacttctgactcgcacacggtgaaagggcaccatacgagttcaactaagggtaactacaaatacaagacctccaagagcagcagtaccactagaaggaaaaaggacaagaagcattctaggcacagtagtagcaatggaggtggcagcaaaagagacaagaagcattcttaccgcagtagtgccagcagcagcagagctattaccagtggttctcaatattgtgacgcatacagtggtggtggcatcaacagcagaactgttcctgaatctgccaagatatctccattggtggtagctgaaaatgtcacaccgcaagagatggttcctgtactgaagacactggaaccaatcaaatgtactaccagctgcggcaaagagaagccatttgccttgctgtcgcgccagttttcccctgcaaggtacaaggggatgttcaccttttggaaccaaaaccaactggcttcttgacaatttgctatgcggaagctcacctgaaagtttccttgccaagggctgttcggatcccctccaaactttagagcttcaaaaattttagagcattttagctcacttttgaactctaaagctctaatctaaggttgaccaaagtttagatctaactgagctttacctctaaagtttagagaaggaaatctaaacatgctctaatttgattgtatcaaagattgttgctattgttctcttcgttaccatgtttgtttcgcctgtctgaaacttcagagatcatgttttggaaaattgcttggcaaagtgcttgtgttgtattatttgcacacctacattgtaggggctgattcagtcttctgtgcttttgttatgttgtatcacgacataggttgatttattaggagatttgtttggaactatggaaaacacgcatggaacaacatgtcagtatttgtaaaaaaagagtcgctcattgcggtgaagttgaagaagttatcaagaggcaatagcgcagttagtcaaacatgaaaatagcagcagcagaagaaaattattcttcttatggcaaaaggtgtcctaagaaagaacaaaa

SEQ ID NO: 31632 - DNA, 4166 bp, Zea Mays
ttaaatataaataaaaaagctaaaatctattttgggacggagggactattataaagacacatcccaaagcggcctctcgccgcaccaacagccaatccacacctcgcttgcgttgtcctcgccgcggcctcgccctgattcggttcccccgttcctcgcctctgtcatcgtctcctctgacccaaattgagccaagcgaagccgtggccgtgatccggtccatgcgcggagcgtggtagccggattctatcgccgtcgcctccccttcgccgctattttccagtcgccgggatcagccgagttggatctcgaggcataaagcgttgcgggcgcccggcgaggatacgatgcctgcggtgctcgccgcattcgctacccttcgagccgccgctgccatcgcctccggggactcctccttcccctgttcccatcgtctcaagcatcgttttagtagtagtaattttagtagtagtaattgtcattaacctttgcgttccctccgtcgcgcacgctcctcggctcggtcctcaccttcgcatttcggttttggtctggttgtgctcgatccgaggcttactttggttttgcggcttctctccttgtcgaagcttggtgtctggattcgacctgcagatcggaaggaaacaaggtggtcattatcacctacaagataagagaaatttctctttgtaatttgggatcaagcctgtggatggacgaaccctcggtggacttcagtgctgaaggtgttagtagcagatcaggtctctgccaaagcacctgtttaaatcctggttgtaagcatgaccgtgcttgctgggaagatgattatgtcaaggctgtaatatctcatgggcaagatgatttggcggtcgatgaaattggattggctcttactgaagtgatgcatgcatatgatgatgacaaatggtcaagtctgtatgaagattttgacgacggtgtcggcgatgaaccaattcttcctctggaatcagattcaactggtgattttgtggacattgactccgcatcacctacctttcctagtgacgatgcaatggaatcatcaattaccaattcatttgctcggaattgttcaattaatggcactccaagtttagtttctgcaatgaaaggaacacgtgtgaagaagggaatcacgacaaagttgagcgtttcttgggcccctgatgtatacgaccctcctattacttctgactcgcacacggtgaaagggcaccatacgagttcaactaagggtaactacaaatacaagacctccaagagcagcagtaccactagaaggaaaaaggacaagaagcattctaggcacagtagtagcaatggaggtggcagcaaaagagacaagaagcattcttaccgcagtagtgccagcagcagcagagctattaccagtggttctcaatattgtgacgcatacagtggtggtggcatcaacagcagaactgttcctgaatctgccaagatatctccattggtggtagctgaaaatgtcacaccgcaagagatggttcctgtactgaagacactggaaccaatcaaatgtactaccagctgcggcaaagagaagccatttgccttgctgtcgcgccagttttcccctgcaaggtacaaggggatgttcaccttttggaaccaaaaccaactggcttcttgacaatttgctatgcggaagctcacctgaaagtttccttgccaagggctgttcggatcccctccaaactttagagcttcaaaaattttagagcattttagctcacttttgaactctaaagctctaatctaaggcaagtctgacgttgaaaggatctgcaaggaagtcttcgaggacctgtcagacaagaacacggggctcctggacatcacaacttttgtagcatgatttattcatacagttcattttttcttgttcagtagtcagcacgttggtctaaaattccagtttcagtaaagctgcattgcctcatttatttgatttctacatcaatacttcattgatttacatatcgccatgatataacttgaattttaaacatcttaacaggtatatgcatgtgcataatgtcgaactgaaattgaaaactaaatacttgtagcggctgttctgttcgccttatcactaggaaagcagtacattggatgggagcatgtttctgatagacagctaattatttggcttcattcaagattgtgatgatttgtagtaatgaattggaggcttcgatccactgcaatttatgtggtacaagggttttgtttgagaaggcgaatgagattctaatggaggaaagaaatattcagtgtgagtatttccaccaccaacacccgcaagttgaaagcctagacgaatgaactattcagacattggcgacaacgctggcatgttcaagctgtcaattttatttcttcctgcatcgcttttcctattgtcattgttgacgagagcctgcattttgctgttgtttagcatataaggatggcaaacatattgcagcacgtatcatttacaaatgtcttttgcactggcatgcttttaaatcagagggggctgctgttttttatcaggtgattgaggccataaatgatgtcctaaagctaaaataatttgagcccaagtatattctatttacaacaggtgtcaggtgtgtcatcgatataaaatcaatttgggattttcagttttggtgccactacaggggaacgaagctgatggtagattaccttattggttgcccaatacatctgtagtccaaagatgtcgtctccaaagaaacattttcttggagtgttaactgctattttagtcttaccaacagtatggtcgcgagatcttcgagtactctcgtacctttcagatctgactgttaataatttgtttttttgcacattattattagtattactaaaataaggatcaagtgactctgcatggttttaactaattattatgcatgcagcgagtggtgtgatggcaactcttcttgtattcctgtccgttggtttagttggtgctactgatggtacaggcttccatttaactgggaaggtagtaaactggagtggcatgccctttaccattggtatttatggatttttctactctgggcattcagtatttccaaacatctaccagtcaatgtctgatcactctaagttccctgtggcactattcatatggtatgcttggctatattcatgtttcggtttaccttgttactgaataatgaatattttttcgcaaggtgtgatggtattttcgcaaggcttctacctgttgcatatggcccttggatagttccttttttgcatttagcatgcaatccattctttgttcttatcccttctaacttcaagtcaccaccactagccgcaatcacattgctttgtttattttccagtgagctagctcttttggcctctgattctttttatctgtgtagtactatattaatccagtcagtggatatgaattctgctctttgaaggatgtgcacagtgcactgctatcttgaacctggcgatattagccagtgcgccgtgagaccaaagaagagtagcatctgtgaagttcatataattgaaagtcaaactcatgtgagttcattgcatctttttttatctgactactatatattcatccatcagaaacattagagaaacaaatccctctattttgtttactgcgtatgatttttttgtgaagtgggaatggtccacttgaatgttaacgtttgagaagatgtacctaacaactggttgccacctccatgggcacttcctctaatggatatccttgggttcaacaagcttatgacattactgagccatctgggtctaatcagaaattggcagggaattccaacacaattttgtaattattcaaacaggacaagtccaattgagtttgttgtcccatgtgattgctatatgtaacctttagaatttccttatcacaagtccaaatcgatttttatctatttgatttatctgtcccctggacgacgcacaataaagctacctttccaaatggaagtttaggttacaatatttcctctccctctcgagattcaactgttaaaagtggagagcctatgaaagctgaaggggagatcaaggttgggattttggataaattagttgttgat

SEQ ID NO: 31633 - DNA, 2915 bp, Zea Mays
ccgcaaaccgtcagggtaaccatgcaacaacctaaatatcccgttgcaaatggacggatatatctctactactctataaggaggtaacgtgggcgtccaccgtgcccccgcccgtgcgtccccactcccgcgccgacagcggcacagcgcccctggaccgccgcgcgatctcctgccccgccccgtcgtcaatcccgtccgccgcgcccgccaagtcttgagatcgagcagatccgccatcccgcgccctcgcactccctctccaattggcttggcgtgtgctcgtgcggcggtcgaggcggaggcacctgcgtcgactccaaggaggagcaatgcctcctctagatccaggagtccaaggcggctgtggagcaagtctgacgttgaaaggatctgcaaggaagtcttcgaggacctgtcagacaagaacacggggctcctggacatcacaacttttgtagcatgatttattcatacagttcattttttcttgttcagtagtcagcacgttggtctaaaattccagtttcagtaaagctgcattgcctcatttatttgatttctacatcaatacttcattgatttacatatcgccatgatataacttgaattttaaacatcttaacaggtatatgcatgtgcataatgtcgaactgaaattgaaaactaaatacttgtagcggctgttctgttcgccttatcactaggaaagcagtacattggatgggagcatgtttctgatagacagctaattatttggcttcattcaagattgtgatgatttgtagtaatgaattggaggcttcgatccactgcaatttatgtggtacaagggttttgtttgagaaggcgaatgagattctaatggaggaaagaaatattcagtgtgagtatttccaccaccaacacccgcaagttgaaagcctagacgaatgaactattcagacattggcgacaacgctggcatgttcaagctgtcaattttatttcttcctgcatcgcttttcctattgtcattgttgacgagagcctgcattttgctgttgtttagcatataaggatggcaaacatattgcagcacgtatcatttacaaatgtcttttgcactggcatgcttttaaatcagagggggctgctgttttttatcaggtgattgaggccataaatgatgtcctaaagctaaaataatttgagcccaagtatattctatttacaacaggtgtcaggtgtgtcatcgatataaaatcaatttgggattttcagttttggtgccactacaggggaacgaagctgatggtagattaccttattggttgcccaatacatctgtagtccaaagatgtcgtctccaaagaaacattttcttggagtgttaactgctattttagtcttaccaacagtatggtcgcgagatcttcgagtactctcgtacctttcagatctgactgttaataatttgtttttttgcacattattattagtattactaaaataaggatcaagtgactctgcatggttttaactaattattatgcatgcagcgagtggtgtgatggcaactcttcttgtattcctgtccgttggtttagttggtgctactgatggtacaggcttccatttaactgggaaggtagtaaactggagtggcatgccctttaccattggtatttatggatttttctactctgggcattcagtatttccaaacatctaccagtcaatgtctgatcactctaagttccctgtggcactattcatatggtatgcttggctatattcatgtttcggtttaccttgttactgaataatgaatattttttcgcaaggtgtgatggtattttcgcaaggcttctacctgttgcatatggcccttggatagttccttttttgcatttagcatgcaatccattctttgttcttatcccttctaacttcaagtcaccaccactagccgcaatcacattgctttgtttattttccagtgagctagctcttttggcctctgattctttttatctgtgtagtactatattaatccagtcagtggatatgaattctgctctttgaaggatgtgcacagtgcactgctatcttgaacctggcgatattagccagtgcgccgtgagaccaaagaagagtagcatctgtgaagttcatataattgaaagtcaaactcatgtgagttcattgcatctttttttatctgactactatatattcatccatcagaaacattagagaaacaaatccctctattttgtttactgcgtatgatttttttgtgaagtgggaatggtccacttgaatgttaacgtttgagaagatgtacctaacaactggttgccacctccatgggcacttcctctaatggatatccttgggttcaacaagcttatgacattactgaggtttttcttcttctatagaaacatacatgcatgccagttttgaattattacttttgactaggctaacttcttcacttgagtaaccggaatctgctttacctgtttgtcttctttgtgattatctcattgtaaaagccatctgggtctaatcagaaattggcagggaattccaacacaattttgtaattattcaaacaggacaagtccaattgagtttgttgtcccatgtgattgctatatgtaacctttagaatttccttatcacaagtccaaatcgatttttatctatttgatttatctgtcccctggacgacgcacaataaagctacctttccaaatggaagtttaggttacaatatttcctctccctctcgagattcaactgttaaaagtggagagcctatgaaagctgaaggggagatcaaggttgggattttggataaattagttgttgataaggaaaagaaaaaagaggactaggatggagagcgtatgaaggcattggag

SEQ ID NO: 31634 - DNA, 3370 bp, Zea Mays
ccccactcccgcgccgacagcggcacagcgcccctggaccgccgcgcgatctcctgccccgccccgtcgtcaatcccgtccgccgcgcccgccaagtcttgagatcgagcagatccgccatcccgcgccctcgcactccctctccaattggcttggcgtgtgctcgtgcggcggtcgaggcggaggcacctgcgtcgactccaaggaggagcaatgcctcctctagatccaggagtccaaggcggctgtggagcaagtctgacgttgaaaggatctgcaaggaagtcttcgaggacctgtcagacaagaacacggggctcctggacatcacaacttttgtagcatgatttattcatacagttcattttttcttgttcagtagtcagcacgttggtctaaaattccagtttcagtaaagctgcattgcctcatttatttgatttctacatcaatacttcattgatttacatatcgccatgatataacttgaattttaaacatcttaacaggtatatgcatgtgcataatgtcgaactgaaattgaaaactaaatacttgtagcggctgttctgttcgccttatcactaggaaagcagtacattggatgggagcatgtttctgatagacagctaattatttggcttcagttgagtattacgattatttactgtaccgaatggaaatactggatgggaatggatgtttctaacagtccgttaaccctcctcttcagttcaagattgtgatgatttgtagtaatgaattggaggcttcgatccactgcaatttatgtggtacaagggttttgtttgagaaggcgaatgagattctaatggaggaaagaaatattcaggtttgctattttgatcactttgacttaatattaccagcaattccattctatgaccatttgagatatcatcttgtttggataaaatacataacaaactgaattgtactttgtgaattagtattgaatgacaatgtcaggtccagcatatatatgaactatacattaaaaaggatgttattaaactcatattatgtatttatgtctgcatgatactaggaatgtagtacttatagtatgggtacaagagtgttggaatcggtgatgaagtgatatcgtcaattgattatagttgagaaacttagtgtcatctgatttctggtcatgacatagattatgtttatatcccacagaagcaagtcgcatggtatgttctatgtccaggtagcataaccttgagacggtcctttagttgtgatctgaatttggtttcagactttcagtgagtggtagcttttctttgtttctagcagatggcaaaaaccatggaaagacgatatttcttatgtgtcaagccaaagaaatttagtcaatgaattttcttgcacatgggaatggatgttttattggaaattacctgttctgttttgtgtattttatccgttcagttcgtcccttcttttttcgcagtttgtgggtagatgtggatcataatcagctgctctatctgtaacagtgtgagtatttccaccaccaacacccgcaagttgaaagcctagacgaatgaactattcagacattggcgacaacgctggcatgttcaagctgtcaattttatttcttcctgcatcgcttttcctattgtcattgttgacgagagcctgcattttgctgttgtttagcatataaggatggcaaacatattgcagcacgtatcatttacaaatgtcttttgcactggcatgcttttaaatcagagggggctgctgttttttatcaggtgattgaggccataaatgatgtcctaaagctaaaataatttgagcccaagtatattctatttacaacaggtgtcaggtgtgtcatcgatataaaatcaatttgggattttcagttttggtgccactacaggggaacgaagctgatggtagattaccttattggttgcccaatacatctgtagtccaaagatgtcgtctccaaagaaacattttcttggagtgttaactgctattttagtcttaccaacagtatggtcgcgagatcttcgagtactctcgtacctttcagatctgactgttaataatttgtttttttgcacattattattagtattactaaaataaggatcaagtgactctgcatggttttaactaattattatgcatgcagcgagtggtgtgatggcaactcttcttgtattcctgtccgttggtttagttggtgctactgatggtacaggcttccatttaactgggaaggtagtaaactggagtggcatgccctttaccattggtatttatggatttttctactctgggcattcagtatttccaaacatctaccagtcaatgtctgatcactctaagttccctgtggcactattcatatggtatgcttggctatattcatgtttcggtttaccttgttactgaataatgaatattttttcgcaaggtgtgatggtattttcgcaaggcttctacctgttgcatatggcccttggatagttccttttttgcatttagcatgcaatccattctttgttcttatcccttctaacttcaagtcaccaccactagccgcaatcacattgctttgtttattttccagtgagctagctcttttggcctctgattctttttatctgtgtagtactatattaatccagtcagtggatatgaattctgctctttgaaggatgtgcacagtgcactgctatcttgaacctggcgatattagccagtgcgccgtgagaccaaagaagagtagcatctgtgaagttcatataattgaaagtcaaactcatgtgagttcattgcatctttttttatctgactactatatattcatccatcagaaacattagagaaacaaatccctctattttgtttactgcgtatgatttttttgtgaagtgggaatggtccacttgaatgttaacgtttgagaagatgtacctaacaactggttgccacctccatgggcacttcctctaatggatatccttgggttcaacaagcttatgacattactgagccatctgggtctaatcagaaattggcagggaattccaacacaattttgtaattattcaaacaggacaagtccaattgagtttgttgtcccatgtgattgctatatgtaacctttagaatttccttatcacaagtccaaatcgatttttatctatttgatttatctgtcccctggacgacgcacaataaagctacctttccaaatggaagtttaggttacaatatttcctctccctctcgagattcaactgttaaaagtggagagcctatgaaagctgaaggggagatcaaggttgggattttggataaattagttgttgat

SEQ ID NO: 31635 - DNA, 2202 bp, Zea Mays
cgctgggattgtgagataagcgtgggcctaccaaccacacatgtcaattctcggaatttctcagaagattggagacgggcgttctcttttcatttggagttttggactagtcgaactgacgaactggcagagcgttcaggatagacatggctgccacctttgccttcatccctctcctgctactggtctgcgtccagagcgcggctcctgttctcggcttcacaaggagcgagttccctgaagatttcgtcttcggatccgctacctcggcttatcagtatgagggtgctgttggtgaggatggtaggagcccaagcatctgggacaccttcactcacgcagggagaatgccggacaaaagcaatggtgatgtagccgccgacgggtacaacaagtacaaggtgtccaagtccatgttatgatttaccagctggatctccctcagatcctggaagacgagtatggtggatggttaagtccaatgggaggatttcacggcatatgcagatgtgtgcttcagggagttcggtgacagggtttcacactggaccactctggatgaagtcaatgtggctgcaattgggtcctatgataatggacaaattgcaccgggaagatgttctgatccatttggaacaaaaaaatgtacagtggggaactcaagtgtggagccatatatagcagctcataacatgctactggcacatgcatcagctaccagactgtacagagaaaaataccaagctgtgcaaaaaggagttgttggtataaatatatatacaatgtggtcatacccactaacaaactccactgccgatttagaagcaactcaaagatttctggacttctattccggctggtatcttcttgactcttgttgcatcacaaatgtggaacatttatagagataatcgaaaacaatatgtatcgattgtaggatactagaaccattggtgtttggagattatccaagcgtaatgaagaagaatgttggttctcgccttccgtcattcagtaaagttcaatctgaagccattcgtggcactctagatttcattggaataaaccactattattctttctatgtgaacgaccgccctttagaaaaaggcatccgtgacttctcactggacattgctgctgactatagaggtaaaacagtttgtcactcgatacatgattatccttttattgcttgcaattctttagatacattccctgggacttctgattcatttatctagagtcacacacacaatggcctacagaagttcaaaacggtgtcacatggaccaaataatttgatgatacttctgaaacatattcgcaattttatgaaacctacaagctaaatgctgtatataacaaaacaattatctgaaacaggttcgagaactgatccgccaataggtcagcatgccccaacatctattcccgctgatcccagaggattgcaacttttggtagagtacctgagtgaagcctatgggaaccttcccatctatatccaagagacaggttatgcaaccacaaacggcagcctccatgatactgacagggttgattacatgaagacccacataagcagcacattggctgctctaaggaatggggctaatgtgaaaggctacttcgcgtggtgcttcctggacgtcttcgagtacctgtcagggttcatgtcgcaatacggcctgtaccgtgttgatttcgaggacgaggcgctaccaaggcaagcaaggctatctgctcgctggtattctaaattcctagagaacaaggggatccatgtagaggacgagcttgatgatgcgggatcacacgttgagcaataagttttctacagcgacacattgatctgtacatcctctagcgagactattgaatactactgtgcgttgcaataagaacacttatattaaaaaaacaaattccatcaaaacctctgtccaggactccaggtaaacaccaccacaatattagggacacggtcctgccagaacaagggaccgtttgtacaactcaagcccatatctgctagagtgtgaggagaaatttcattatttgggtcttaattcggcttcctgtgatctttagggcctgttcgtttttcacggattcaagccctggaatagttcctagccggattacttctctaatttatataaattttgatgagctggaatgaatccgggttcattcctg

SEQ ID NO: 31636 - DNA, 2119 bp, Zea Mays
gtgagataagcgtgggcctaccaaccacacatgtcaattctcggaatttctcagaagattggagacgggcgttctcttttcatttggagttttggactagtcgaactgacgaactggcagagcgttcaggatagacatggctgccacctttgccttcatccctctcctgctactggtctgcgtccagagcgcggctcctgttctcggcttcacaaggagcgagttccctgaagatttcgtcttcggatccgctacctcggcttatcagtatgagggtgctgttggtgaggatggtaggagcccaagcatctgggacaccttcactcacgcagggagaatgccggacaaaagcaatggtgatgtagccgccgacgggtacaacaagtacaaggtgtccaagtccatgttatgatttaccagctggatctccctcagatcctggaagacgagtatggtggatggttaagtccaatggttgtggaggatttcacggcatatgcagatgtgtgcttcagggagttcggtgacagggtttcacactggaccactctggatgaagtcaatgtggctgcaattgggtcctatgataatggacaaattgcaccgggaagatgttctgatccatttggaacaaaaaaatgtacagtggggaactcaagtgtggagccatatatagcagctcataacatgctactggcacatgcatcagctaccagactgtacagagaaaaataccaagctgtgcaaaaaggagttgttggtataaatatatatacaatgtggtcatacccactaacaaactccactgccgatttagaagcaactcaaagatttctggacttctattccggctggatactagaaccattggtgtttggagattatccaagcgtaatgaagaagaatgttggttctcgccttccgtcattcagtaaagttcaatctgaagccattcgtggcactctagatttcattggaataaaccactattattctttctatgtgaacgaccgccctttagaaaaaggcatccgtgacttctcactggacattgctgctgactatagaggtaaaacagtttgtcactcgatacatgattatccttttattgcttgcaattctttagatacattccctgggacttctgattcatttatctagagtcacacacacaatggcctacagaagttcaaaacggtgtcacatggaccaaataatttgatgatacttctgaaacatattcgcaattttatgaaacctacaagctaaatgctgtatataacaaaacaattatctgaaacaggttcgagaactgatccgccaataggtcagcatgccccaacatctattcccgctgatcccagaggattgcaacttttggtagagtacctgagtgaagcctatgggaaccttcccatctatatccaagagacaggttatgcaaccacaaacggcagcctccatgatactgacagggttgattacatgaagacccacataagcagcacattggctgctctaaggaatggggctaatgtgaaaggctacttcgcgtggtgcttcctggacgtcttcgagtacctgtcagggttcatgtcgcaatacggcctgtaccgtgttgatttcgaggacgaggcgctaccaaggcaagcaaggctatctgctcgctggtattctaaattcctagagaacaaggggatccatgtagaggacgagcttgatgatgcgggatcacacgttgagcaataagttttctacagcgacacattgatctgtacatcctctagcgagactattgaatactactgtgcgttgcaataagaacacttatattaaaaaaacaaattccatcaaaacctctgtccaggactccaggtaaacaccaccacaatattagggacacggtcctgccagaacaagggaccgtttgtacaactcaagcccatatctgctagagtgtgaggagaaatttcattatttgggtcttaattcggcttcctgtgatctttagggcctgttcgtttttcacggattcaagccctggaatagttcctagccggattacttctctaatttatataaattttgatgagctggaatgaatccgggttcattcctg

SEQ ID NO: 31637 - DNA, 2076 bp, Zea Mays
gtgagataagcgtgggcctaccaaccacacatgtcaattctcggaatttctcagaagattggagacgggcgttctcttttcatttggagttttggactagtcgaactgacgaactggcagagcgttcaggatagacatggctgccacctttgccttcatccctctcctgctactggtctgcgtccagagcgcggctcctgttctcggcttcacaaggagcgagttccctgaagatttcgtcttcggatccgctacctcggcttatcagtatgagggtgctgttggtgaggatggtaggagcccaagcatctgggacaccttcactcacgcagggagaatgccggacaaaagcaatggtgatgtagccgccgacgggtacaacaagtacaagatggaagaggtgctattaatccaaaagggatagagtactataacaatctcatagacgagctagttacacatggtgtccaagtccatgttatgatttaccagctggatctccctcagatcctggaagacgagtatggtggatggttaagtccaatggttgtggaggatttcacggcatatgcagatgtgtgcttcagggagttcggtgacagggtttcacactggaccactctggatgaagtcaatgtggctgcaattgggtcctatgataatggacaaattgcaccgggaagatgttctgatccatttggaacaaaaaaatgtacagtggggaactcaagtgtggagccatatatagcagctcataacatgctactggcacatgcatcagctaccagactgtacagagaaaaataccaagctgtgcaaaaaggagttgttggtataaatatatatacaatgtggtcatacccactaacaaactccactgccgatttagaagcaactcaaagatttctggacttctattccggctggatactagaaccattggtgtttggagattatccaagcgtaatgaagaagaataaaaaggcatccgtgacttctcactggacattgctgctgactatagaggtaaaacagtttgtcactcgatacatgattatccttttattgcttgcaattctttagatacattccctgggacttctgattcatttatctagagtcacacacacaatggcctacagaagttcaaaacggtgtcacatggaccaaataatttgatgatacttctgaaacatattcgcaattttatgaaacctacaagctaaatgctgtatataacaaaacaattatctgaaacaggttcgagaactgatccgccaataggtcagcatgccccaacatctattcccgctgatcccagaggattgcaacttttggtagagtacctgagtgaagcctatgggaaccttcccatctatatccaagagacaggttatgcaaccacaaacggcagcctccatgatactgacagggttgattacatgaagacccacataagcagcacattggctgctctaaggaatggggctaatgtgaaaggctacttcgcgtggtgcttcctggacgtcttcgagtacctgtcagggttcatgtcgcaatacggcctgtaccgtgttgatttcgaggacgaggcgctaccaaggcaagcaaggctatctgctcgctggtattctaaattcctagagaacaaggggatccatgtagaggacgagcttgatgatgcgggatcacacgttgagcaataagttttctacagcgacacattgatctgtacatcctctagcgagactattgaatactactgtgcgttgcaataagaacacttatattaaaaaaacaaattccatcaaaacctctgtccaggactccaggtaaacaccaccacaatattagggacacggtcctgccagaacaagggaccgtttgtacaactcaagcccatatctgctagagtgtgaggagaaatttcattatttgggtcttaattcggcttcctgtgatctttagggcctgttcgtttttcacggattcaagccctggaatagttcctagccggattacttctctaatttatataaattttgatgagctggaatgaatccgggttcattcctg

SEQ ID NO: 31638 - DNA, 2533 bp, Zea Mays
taagcgtgggcctaccaaccacacatgtcaattctcggaatttctcagaagattggagacgggcgttctcttttcatttggagttttggactagtcgaactgacgaactggcagagcgttcaggatagacatggctgccacctttgccttcatccctctcctgctactggtctgcgtccagagcgcggctcctgttctcggcttcacaaggagcgagttccctgaagatttcgtcttcggatccgctacctcggcttatcagtatgagggtgctgttggtgaggatggtaggagcccaagcatctgggacaccttcactcacgcagggagaatgccggacaaaagcaatggtgatgtagccgccgacgggtacaacaagtacaaggtgaaataaattagctgcgaatcagtttttctgctggtatcgaggtgctggtttcttactatgcctgtcaactaaccttttgtctgatctctattttttttattgaaaaaccctggcatctaaatatgaaagttgctgtcttaattttaacatgtagtttgttgggctgacgtactgtcacttctgagatcagcatgctgaatttttcagcatatggaaaggagcattcttgatctgtttcttgctttgatcttaaccatctaatgttttaggacgatgttaagctcataattgacaataacctggaggcatataggttctctatctcctggtccagacttataccaaatggaagaggtgctattaatccaaaagggatagagtactataacaatctcatagacgagctagttacacatggtgtccaagtccatgttatgatttaccagctggatctccctcagatcctggaagacgagtatggtggatggttaagtccaatggttgtggaggatttcacggcatatgcagatgtgtgcttcagggagttcggtgacagggtttcacactggaccactctggatgaagtcaatgtggctgcaattgggtcctatgataatggacaaattgcaccgggaagatgttctgatccatttggaacaaaaaaatgtacagtggggaactcaagtgtggagccatatatagcagctcataacatgctactggcacatgcatcagctaccagactgtacagagaaaaataccaagctgtgcaaaaaggagttgttggtataaatatatatacaatgtggtcatacccactaacaaactccactgccgatttagaagcaactcaaagatttctggacttctattccggctggatactagaaccattggtgtttggagattatccaagcgtaatgaagaagaatgttggttctcgccttccgtcattcagtaaagttcaatctgaagccattcgtggcactctagatttcattggaataaaccactattattctttctatgtgaacgaccgccctttagaaaaaggcatccgtgacttctcactggacattgctgctgactatagaggtaaaacagtttgtcactcgatacatgattatccttttattgcttgcaattctttagatacattccctgggacttctgattcatttatctagagtcacacacacaatggcctacagaagttcaaaacggtgtcacatggaccaaataatttgatgatacttctgaaacatattcgcaattttatgaaacctacaagctaaatgctgtatataacaaaacaattatctgaaacaggttcgagaactgatccgccaataggtcagcatgccccaacatctattcccgctgatcccagaggattgcaacttttggtagagtacctgagtgaagcctatgggaaccttcccatctatatccaagagacaggttatgcaaccacaaacggcagcctccatgatactgacagggttgattacatgaagacccacataagcagcacattggctgctctaaggaatggggctaatgtgaaaggctacttcgcgtggtgcttcctggacgtcttcgagtacctgtcagggttcatgtcgcaatacggcctgtaccgtgttgatttcgaggacgaggcgctaccaaggcaagcaaggctatctgctcgctggtattctaaattcctagagaacaaggggatccatgtagaggacgagcttgatgatgcgggatcacacgttgagcaataagttttctacagcgacacattgatctgtacatcctctagcgagactattgaatactactgtgcgttgcaataagaacacttatattaaaaaaacaaattccatcaaaacctctgtccaggactccaggtaaacaccaccacaatattagggacacggtcctgccagaacaagggaccgtttgtacaactcaagcccatatctgctagagtgtgaggagaaatttcattatttgggtcttaattcggcttcctgtgatctttagggcctgttcgtttttcacggattcaagccctggaatagttcctagccggattacttctctaatttatataaattttgatgagctggaatgaatccgggttcattcctg

SEQ ID NO: 31639 - DNA, 1950 bp, Zea Mays
aagcgtgggcctaccaaccacacatgtcaattctcggaatttctcagaagattggagacgggcgttctcttttcatttggagttttggactagtcgaactgacgaactggcagagcgttcaggatagacatggctgccacctttgccttcatccctctcctgctactggtctgcgtccagagcgcggctcctgttctcggcttcacaaggagcgagttccctgaagatttcgtcttcggatccgctacctcggcttatcagtatgagggtgctgttggtgaggatggtaggagcccaagcatctgggacaccttcactcacgcagggagaatgccggacaaaagcaatggtgatgtagccgccgacgggtacaacaagtacaagatggaagaggtgctattaatccaaaagggatagagtactataacaatctcatagacgagctagttacacatggtgtccaagtccatgttatgatttaccagctggatctccctcagatcctggaagacgagtatggtggatggttaagtccaatggttgtggaggatttcacggcatatgcagatgtgtgcttcagggagttcggtgacagggtttcacactggaccactctggatgaagtcaatgtggctgcaattgggtcctatgataatggacaaattgcaccgggaagatgttctgatccatttggaacaaaaaaatgtacagtggggaactcaagtgtggagccatatatagcagctcataacatgctactggcacatgcatcagctaccagactgtacagagaaaaataccaagctgtgcaaaaaggagttgttggtataaatatatatacaatgtggtcatacccactaacaaactccactgccgatttagaagcaactcaaagatttctggacttctattccggctggatactagaaccattggtgtttggagattatccaagcgtaatgaagaagaatgttggttctcgccttccgtcattcagtaaagttcaatctgaagccattcgtggcactctagatttcattggaataaaccactattattctttctatgtgaacgaccgccctttagaaaaaggcatccgtgacttctcactggacattgctgctgactatagaggttcgagaactgatccgccaataggtcagcatgccccaacatctattcccgctgatcccagaggattgcaacttttggtagagtacctgagtgaagcctatgggaaccttcccatctatatccaagagacaggttatgcaaccacaaacggcagcctccatgatactgacagggttgattacatgaagacccacataagcagcacattggctgctctaaggaatggggctaatgtgaaaggctacttcgcgtggtgcttcctggacgtcttcgagtacctgtcagggttcatgtcgcaatacggcctgtaccgtgttgatttcgaggacgaggcgctaccaaggcaagcaaggctatctgctcgctggtattctaaattcctagagaacaaggggatccatgtagaggacgagcttgatgatgcgggatcacacgttgagcaataagttttctacagcgacacattgatctgtacatcctctagcgagactattgaatactactgtgcgttgcaataagaacacttatattaaaaaaacaaattccatcaaaacctctgtccaggactccaggtaaacaccaccacaatattagggacacggtcctgccagaacaagggaccgtttgtacaactcaagcccatatctgctagagtgtgaggagaaatttcattatttgggtcttaattcggcttcctgtgatctttagggcctgttcgtttttcacggattcaagccctggaatagttcctagccggattacttctctaatttatataaattttgatgagctggaatgaatccgggttcattcctg

SEQ ID NO: 31640 - DNA, 2361 bp, Zea Mays
aagcgtgggcctaccaaccacacatgtcaattctcggaatttctcagaagattggagacgggcgttctcttttcatttggagttttggactagtcgaactgacgaactggcagagcgttcaggatagacatggctgccacctttgccttcatccctctcctgctactggtctgcgtccagagcgcggctcctgttctcggcttcacaaggagcgagttccctgaagatttcgtcttcggatccgctacctcggcttatcagtatgagggtgctgttggtgaggatggtaggagcccaagcatctgggacaccttcactcacgcagggagaatgccggacaaaagcaatggtgatgtagccgccgacgggtacaacaagtacaaggtgtccaagtccatgttatgatttaccagctggatctccctcagatcctggaagacgagtatggtggatggttaagtccaatggttgtggaggatttcacggcatatgcagatgtgtgcttcagggagttcggtgacagggtttcacactggaccactctggatgaagtcaatgtggctgcaattgggtcctatgataatggacaaattgcaccgggaagatgttctgatccatttggaacaaaaaaatgtacagtggggaactcaagtgtggagccatatatagcagctcataacatgctactggcacatgcatcagctaccagactgtacagagaaaaataccaagctgtgcaaaaaggagttgttggtataaatatatatacaatgtggtcatacccactaacaaactccactgccgatttagaagcaactcaaagatttctggacttctattccggctggtatcttcttgactcttgttgcatcacaaatgtggaacatttatagagataatcgaaaacaatatgtatcgattgtaggatactagaaccattggtgtttggagattatccaagcgtaatgaagaagaatgttggttctcgccttccgtcattcagtaaagttcaatctgaagccattcgtggcactctagatttcattggaataaaccactattattctttctatgtgaacgaccgccctttagaaaaaggcatccgtgacttctcactggacattgctgctgactatagagcatgccccaacatctattcccgctgatcccagaggattgcaacttttggtagagtacctgagtgaagcctatgggaaccttcccatctatatccaagagacaggaaagtctatttctcagttgcaggcctcaaaattctagttcagatagtctaagaagtacctctaaatgactacgcagatatatctgtttccgaaaacaaaaaaatggctattcagacatcaatgtgatatatatatctctgtttctggaacataaactttgtctggtgaaaagtacttgatgttttcttacttttcatgatcttcaatggccactttgaccacttctcatgataatataacaaagttatatgactacgaaaggaccttttaagacagatctatgctatttattatgatttttatgctatcaatctattatatcaacagttgttgacagtcaacagttatgttttaaaattttttatcacatcaatatttatggacagagatacaattcgacttatactttcttccctctcctttctctcttcaggttatgcaaccacaaacggcagcctccatgatactgacagggttgattacatgaagacccacataagcagcacattggctgctctaaggaatggggctaatgtgaaaggctacttcgcgtggtgcttcctggacgtcttcgagtacctgtcagggttcatgtcgcaatacggcctgtaccgtgttgatttcgaggacgaggcgctaccaaggcaagcaaggctatctgctcgctggtattctaaattcctagagaacaaggggatccatgtagaggacgagcttgatgatgcgggatcacacgttgagcaataagttttctacagcgacacattgatctgtacatcctctagcgagactattgaatactactgtgcgttgcaataagaacacttatattaaaaaaacaaattccatcaaaacctctgtccaggactccaggtaaacaccaccacaatattagggacacggtcctgccagaacaagggaccgtttgtacaactcaagcccatatctgctagagtgtgaggagaaatttcattatttgggtcttaattcggcttcctgtgatctttagggcctgttcgtttttcacggattcaagccctggaatagttcctagccggattacttctctaatttatataaattttgatgagctggaatgaatccgggttcattcctg

SEQ ID NO: 31641 - DNA, 2578 bp, Zea Mays
aagcgtgggcctaccaaccacacatgtcaattctcggaatttctcagaagattggagacgggcgttctcttttcatttggagttttggactagtcgaactgacgaactggcagagcgttcaggatagacatggctgccacctttgccttcatccctctcctgctactggtctgcgtccagagcgcggctcctgttctcggcttcacaaggagcgagttccctgaagatttcgtcttcggatccgctacctcggcttatcagtatgagggtgctgttggtgaggatggtaggagcccaagcatctgggacaccttcactcacgcaggttcgcacgtcagtcatcgggagaatgccggacaaaagcaatggtgatgtagccgccgacgggtacaacaagtacaagatggaagaggtgctattaatccaaaagggatagagtactataacaatctcatagacgagctagttacacatggtgtccaagtccatgttatgatttaccagctggatctccctcagatcctggaagacgagtatggtggatggttaagtccaatgggaggatttcacggcatatgcagatgtgtgcttcagggagttcggtgacagggtttcacactggaccactctggatgaagtcaatgtggctgcaattgggtcctatgataatggacaaattgcaccgggaagatgttctgatccatttggaacaaaaaaatgtacagtggggaactcaagtgtggagccatatatagcagctcataacatgctactggcacatgcatcagctaccagactgtacagagaaaaataccaagtgagtaatcttgtacctgaaaacatcacatgtatcttaacattagtgttgtattgtttctttttttcttgaatacacaggagagctgagcatcgttgcattagaagaagaaatgtacatagtgtgcaaacacacacacccacacacttgtaatatcagaatctttttttttaccaagaaatactgtaggggaagcccctacagtaatatcagaatcttataccgtgacatgtgaggttgatccttataatagatcttacatttgaacatgtttcactcatgatccaaggcatcagtttgtcttctaactacaccaaaaacattccctttggctttatatcatcagatatttacccaaacataaaatgattgacctgtaggctgtgcaaaaaggagttgttggtataaatatatatacaatgtggtcatacccactaacaaactccactgccgatttagaagcaactcaaagatttctggacttctattccggctggatactagaaccattggtgtttggagattatccaagcgtaatgaagaagaatgttggttctcgccttccgtcattcagtaaagttcaatctgaagccattcgtggcactctagatttcattggaataaaccactattattctttctatgtgaacgaccgccctttagaaaaaggcatccgtgacttctcactggacattgctgctgactatagaggtaaaacagtttgtcactcgatacatgattatccttttattgcttgcaattctttagatacattccctgggacttctgattcatttatctagagtcacacacacaatggcctacagaagttcaaaacggtgtcacatggaccaaataatttgatgatacttctgaaacatattcgcaattttatgaaacctacaagctaaatgctgtatataacaaaacaattatctgaaacaggttcgagaactgatccgccaataggtcagcatgccccaacatctattcccgctgatcccagaggattgcaacttttggtagagtacctgagtgaagcctatgggaaccttcccatctatatccaagagacaggttatgcaaccacaaacggcagcctccatgatactgacagggttgattacatgaagacccacataagcagcacattggctgctctaaggaatggggctaatgtgaaaggctacttcgcgtggtgcttcctggacgtcttcgagtacctgtcagggttcatgtcgcaatacggcctgtaccgtgttgatttcgaggacgaggcgctaccaaggcaagcaaggctatctgctcgctggtattctaaattcctagagaacaaggggatccatgtagaggacgagcttgatgatgcgggatcacacgttgagcaataagttttctacagcgacacattgatctgtacatcctctagcgagactattgaatactactgtgcgttgcaataagaacacttatattaaaaaaacaaattccatcaaaacctctgtccaggactccaggtaaacaccaccacaatattagggacacggtcctgccagaacaagggaccgtttgtacaactcaagcccatatctgctagagtgtgaggagaaatttcattatttgggtcttaattcggcttcctgtgatctttagggcctgttcgtttttcacggattcaagccctggaatagttcctagccggattacttctctaatttatataaattttgatgagctggaatgaatccgggttcattcctg

SEQ ID NO: 31642 - DNA, 2907 bp, Zea Mays
aagcgtgggcctaccaaccacacatgtcaattctcggaatttctcagaagattggagacgggcgttctcttttcatttggagttttggactagtcgaactgacgaactggcagagcgttcaggatagacatggctgccacctttgccttcatccctctcctgctactggtctgcgtccagagcgcggctcctgttctcggcttcacaaggagcgagttccctgaagatttcgtcttcggatccgctacctcggcttatcagtatgagggtgctgttggtgaggatggtaggagcccaagcatctgggacaccttcactcacgcagggagaatgccggacaaaagcaatggtgatgtagccgccgacgggtacaacaagtacaaggtgaaataaattagctgcgaatcagtttttctgctggtatcgaggtgctggtttcttactatgcctgtcaactaaccttttgtctgatctctattttttttattgaaaaaccctggcatctaaatatgaaagttgctgtcttaattttaacatgtagtttgttgggctgacgtactgtcacttctgagatcagcatgctgaatttttcagcatatggaaaggagcattcttgatctgtttcttgctttgatcttaaccatctaatgttttaggacgatgttaagctcataattgacaataacctggaggcatataggttctctatctcctggtccagacttataccaaatggaagaggtgctattaatccaaaagggatagagtactataacaatctcatagacgagctagttacacatggtgtccaagtccatgttatgatttaccagctggatctccctcagatcctggaagacgagtatggtggatggttaagtccaatgggaggatttcacggcatatgcagatgtgtgcttcagggagttcggtgacagggtttcacactggaccactctggatgaagtcaatgtggctgcaattgggtcctatgataatggacaaattgcaccgggaagatgttctgatccatttggaacaaaaaaatgtacagtggggaactcaagtgtggagccatatatagcagctcataacatgctactggcacatgcatcagctaccagactgtacagagaaaaataccaagtgagtaatcttgtacctgaaaacatcacatgtatcttaacattagtgttgtattgtttctttttttcttgaatacacaggagagctgagcatcgttgcattagaagaagaaatgtacatagtgtgcaaacacacacacccacacacttgtaatatcagaatctttttttttaccaagaaatactgtaggggaagcccctacagtaatatcagaatcttataccgtgacatgtgaggttgatccttataatagatcttacatttgaacatgtttcactcatgatccaaggcatcagtttgtcttctaactacaccaaaaacattccctttggctttatatcatcagatatttacccaaacataaaatgattgacctgtaggctgtgcaaaaaggagttgttggtataaatatatatacaatgtggtcatacccactaacaaactccactgccgatttagaagcaactcaaagatttctggacttctattccggctggatactagaaccattggtgtttggagattatccaagcgtaatgaagaagaatgttggttctcgccttccgtcattcagtaaagttcaatctgaagccattcgtggcactctagatttcattggaataaaccactattattctttctatgtgaacgaccgccctttagaaaaaggcatccgtgacttctcactggacattgctgctgactatagaggtaaaacagtttgtcactcgatacatgattatccttttattgcttgcaattctttagatacattccctgggacttctgattcatttatctagagtcacacacacaatggcctacagaagttcaaaacggtgtcacatggaccaaataatttgatgatacttctgaaacatattcgcaattttatgaaacctacaagctaaatgctgtatataacaaaacaattatctgaaacaggttcgagaactgatccgccaataggtcagcatgccccaacatctattcccgctgatcccagaggattgcaacttttggtagagtacctgagtgaagcctatgggaaccttcccatctatatccaagagacaggttatgcaaccacaaacggcagcctccatgatactgacagggttgattacatgaagacccacataagcagcacattggctgctctaaggaatggggctaatgtgaaaggctacttcgcgtggtgcttcctggacgtcttcgagtacctgtcagggttcatgtcgcaatacggcctgtaccgtgttgatttcgaggacgaggcgctaccaaggcaagcaaggctatctgctcgctggtattctaaattcctagagaacaaggggatccatgtagaggacgagcttgatgatgcgggatcacacgttgagcaataagttttctacagcgacacattgatctgtacatcctctagcgagactattgaatactactgtgcgttgcaataagaacacttatattaaaaaaacaaattccatcaaaacctctgtccaggactccaggtaaacaccaccacaatattagggacacggtcctgccagaacaagggaccgtttgtacaactcaagcccatatctgctagagtgtgaggagaaatttcattatttgggtcttaattcggcttcctgtgatctttagggcctgttcgtttttcacggattcaagccctggaatagttcctagccggattacttctctaatttatataaattttgatgagctggaatgaatccgggttcattcctg

SEQ ID NO: 31643 - DNA, 3248 bp, Zea Mays
aagcgtgggcctaccaaccacacatgtcaattctcggaatttctcagaagattggagacgggcgttctcttttcatttggagttttggactagtcgaactgacgaactggcagagcgttcaggatagacatggctgccacctttgccttcatccctctcctgctactggtctgcgtccagagcgcggctcctgttctcggcttcacaaggagcgagttccctgaagatttcgtcttcggatccgctacctcggcttatcagtatgagggtgctgttggtgaggatggtaggagcccaagcatctgggacaccttcactcacgcagggagaatgccggacaaaagcaatggtgatgtagccgccgacgggtacaacaagtacaaggtgaaataaattagctgcgaatcagtttttctgctggtatcgaggtgctggtttcttactatgcctgtcaactaaccttttgtctgatctctattttttttattgaaaaaccctggcatctaaatatgaaagttgctgtcttaattttaacatgtagtttgttgggctgacgtactgtcacttctgagatcagcatgctgaatttttcagcatatggaaaggagcattcttgatctgtttcttgctttgatcttaaccatctaatgttttaggacgatgttaagctcataattgacaataacctggaggcatataggttctctatctcctggtccagacttataccaaatggaagaggtgctattaatccaaaagggatagagtactataacaatctcatagacgagctagttacacatggtgtccaagtccatgttatgatttaccagctggatctccctcagatcctggaagacgagtatggtggatggttaagtccaatgggaggatttcacggcatatgcagatgtgtgcttcagggagttcggtgacagggtttcacactggaccactctggatgaagtcaatgtggctgcaattgggtcctatgataatggacaaattgcaccgggaagatgttctgatccatttggaacaaaaaaatgtacagtggggaactcaagtgtggagccatatatagcagctcataacatgctactggcacatgcatcagctaccagactgtacagagaaaaataccaagctgtgcaaaaaggagttgttggtataaatatatatacaatgtggtcatacccactaacaaactccactgccgatttagaagcaactcaaagatttctggacttctattccggctggtatcttcttgactcttgttgcatcacaaatgtggaacatttatagagataatcgaaaacaatatgtatcgattgtaggatactagaaccattggtgtttggagattatccaagcgtaatgaagaagaatgttggttctcgccttccgtcattcagtaaagttcaatctgaagccattcgtggcactctagatttcattggaataaaccactattattctttctatgtgaacgaccgccctttagaaaaaggcatccgtgacttctcactggacattgctgctgactatagaggtaaaacagtttgtcactcgatacatgattatccttttattgcttgcaattctttagatacattccctgggacttctgattcatttatctagagtcacacacacaatggcctacagaagttcaaaacggtgtcacatggaccaaataatttgatgatacttctgaaacatattcgcaattttatgaaacctacaagctaaatgctgtatataacaaaacaattatctgaaacaggttcgagaactgatccgccaataggtcaggtaaggtttttcatcaacaatcttcagaaattcgacatgatagatacatcccttttattttactgcagcatgccccaacatctattcccgctgatcccagaggattgcaacttttggtagagtacctgagtgaagcctatgggaaccttcccatctatatccaagagacaggaaagtctatttctcagttgcaggcctcaaaattctagttcagatagtctaagaagtacctctaaatgactacgcagatatatctgtttccgaaaacaaaaaaatggctattcagacatcaatgtgatatatatatctctgtttctggaacataaactttgtctggtgaaaagtacttgatgttttcttacttttcatgatcttcaatggccactttgaccacttctcatgataatataacaaagttatatgactacgaaaggaccttttaagacagatctatgctatttattatgatttttatgctatcaatctattatatcaacagttgttgacagtcaacagttatgttttaaaattttttatcacatcaatatttatggacagagatacaattcgacttatactttcttccctctcctttctctcttcaggttatgcaaccacaaacggcagcctccatgatactgacagggttgattacatgaagacccacataagcagcacattggctgctctaagctttccaaggacggtaaaaggcacaatagcagaactcagcaatgtgtatcaggcactcgacaacttttcactatctgttcagatacaagtcgaagaagtatttttcacagagatttatcctcaccctgttttgacgtgcaggaatggggctaatgtgaaaggctacttcgcgtggtgcttcctggacgtcttcgagtacctgtcagggttcatgtcgcaatacggcctgtaccgtgttgatttcgaggacgaggcgctaccaaggcaagcaaggctatctgctcgctggtattctaaattcctagagaacaaggggatccatgtagaggacgagcttgatgatgcgggatcacacgttgagcaataagttttctacagcgacacattgatctgtacatcctctagcgagactattgaatactactgtgcgttgcaataagaacacttatattaaaaaaacaaattccatcaaaacctctgtccaggactccaggtaaacaccaccacaatattagggacacggtcctgccagaacaagggaccgtttgtacaactcaagcccatatctgctagagtgtgaggagaaatttcattatttgggtcttaattcggcttcctgtgatctttagggcctgttcgtttttcacggattcaagccctggaatagttcctagccggattacttctctaatttatataaattttgatgagctggaatgaatccgggttcattcctg

SEQ ID NO: 31644 - DNA, 2934 bp, Zea Mays
aagcgtgggcctaccaaccacacatgtcaattctcggaatttctcagaagattggagacgggcgttctcttttcatttggagttttggactagtcgaactgacgaactggcagagcgttcaggatagacatggctgccacctttgccttcatccctctcctgctactggtctgcgtccagagcgcggctcctgttctcggcttcacaaggagcgagttccctgaagatttcgtcttcggatccgctacctcggcttatcagtatgagggtgctgttggtgaggatggtaggagcccaagcatctgggacaccttcactcacgcagggagaatgccggacaaaagcaatggtgatgtagccgccgacgggtacaacaagtacaagatggaagaggtgctattaatccaaaagggatagagtactataacaatctcatagacgagctagttacacatggtgtccaagtccatgttatgatttaccagctggatctccctcagatcctggaagacgagtatggtggatggttaagtccaatggttgtgtaagatccagtaactttagatgttagggatattttcccaaaatgaacatatcttgatcatccatgctaccacaaaacgcagggaggatttcacggcatatgcagatgtgtgcttcagggagttcggtgacagggtttcacactggaccactctggatgaagtcaatgtggctgcaattgggtcctatgataatggacaaattgcaccgggaagatgttctgatccatttggaacaaaaaaatgtacagtggggaactcaagtgtggagccatatatagcagctcataacatgctactggcacatgcatcagctaccagactgtacagagaaaaataccaagtgagtaatcttgtacctgaaaacatcacatgtatcttaacattagtgttgtattgtttctttttttcttgaatacacaggagagctgagcatcgttgcattagaagaagaaatgtacatagtgtgcaaacacacacacccacacacttgtaatatcagaatctttttttttaccaagaaatactgtaggggaagcccctacagtaatatcagaatcttataccgtgacatgtgaggttgatccttataatagatcttacatttgaacatgtttcactcatgatccaaggcatcagtttgtcttctaactacaccaaaaacattccctttggctttatatcatcagatatttacccaaacataaaatgattgacctgtaggctgtgcaaaaaggagttgttggtataaatatatatacaatgtggtcatacccactaacaaactccactgccgatttagaagcaactcaaagatttctggacttctattccggctggatactagaaccattggtgtttggagattatccaagcgtaatgaagaagaatgttggttctcgccttccgtcattcagtaaagttcaatctgaagccattcgtggcactctagatttcattggaataaaccactattattctttctatgtgaacgaccgccctttagaaaaaggcatccgtgacttctcactggacattgctgctgactatagaggtaaaacagtttgtcactcgatacatgattatccttttattgcttgcaattctttagatacattccctgggacttctgattcatttatctagagtcacacacacaatggcctacagaagttcaaaacggtgtcacatggaccaaataatttgatgatacttctgaaacatattcgcaattttatgaaacctacaagctaaatgctgtatataacaaaacaattatctgaaacaggttcgagaactgatccgccaataggtcaggtaaggtttttcatcaacaatcttcagaaattcgacatgatagatacatcccttttattttactgcagcatgccccaacatctattcccgctgatcccagaggattgcaacttttggtagagtacctgagtgaagcctatgggaaccttcccatctatatccaagagacaggttatgcaaccacaaacggcagcctccatgatactgacagggttgattacatgaagacccacataagcagcacattggctgctctaaggtgagatatcatatcacaaagagtgacagagggttttatggttcctagaaaggtaccaaaattataactcgattagcagctttccaaggacggtaaaaggcacaatagcagaactcagcaatgtgtatcaggcactcgacaacttttcactatctgttcagatacaagtcgaagaagtatttttcacagagatttatcctcaccctgttttgacgtgcaggaatggggctaatgtgaaaggctacttcgcgtggtgcttcctggacgtcttcgagtacctgtcagggttcatgtcgcaatacggcctgtaccgtgttgatttcgaggacgaggcgctaccaaggcaagcaaggctatctgctcgctggtattctaaattcctagagaacaaggggatccatgtagaggacgagcttgatgatgcgggatcacacgttgagcaataagttttctacagcgacacattgatctgtacatcctctagcgagactattgaatactactgtgcgttgcaataagaacacttatattaaaaaaacaaattccatcaaaacctctgtccaggactccaggtaaacaccaccacaatattagggacacggtcctgccagaacaagggaccgtttgtacaactcaagcccatatctgctagagtgtgaggagaaatttcattatttgggtcttaattcggcttcctgtgatctttagggcctgttcgtttttcacggattcaagccctggaatagttcctagccggattacttctctaatttatataaattttgatgagctggaatgaatccgggttcattcctg

SEQ ID NO: 31645 - DNA, 2328 bp, Zea Mays
aagcgtgggcctaccaaccacacatgtcaattctcggaatttctcagaagattggagacgggcgttctcttttcatttggagttttggactagtcgaactgacgaactggcagagcgttcaggatagacatggctgccacctttgccttcatccctctcctgctactggtctgcgtccagagcgcggctcctgttctcggcttcacaaggagcgagttccctgaagatttcgtcttcggatccgctacctcggcttatcagtatgagggtgctgttggtgaggatggtaggagcccaagcatctgggacaccttcactcacgcagggagaatgccggacaaaagcaatggtgatgtagccgccgacgggtacaacaagtacaaggacgatgttaagctcataattgacaataacctggaggcatataggttctctatctcctggtccagacttataccaaatggaagaggtgctattaatccaaaagggatagagtactataacaatctcatagacgagctagttacacatggtgtccaagtccatgttatgatttaccagctggatctccctcagatcctggaagacgagtatggtggatggttaagtccaatggttgtggaggatttcacggcatatgcagatgtgtgcttcagggagttcggtgacagggtttcacactggaccactctggatgaagtcaatgtggctgcaattgggtcctatgataatggacaaattgcaccgggaagatgttctgatccatttggaacaaaaaaatgtacagtggggaactcaagtgtggagccatatatagcagctcataacatgctactggcacatgcatcagctaccagactgtacagagaaaaataccaagctgtgcaaaaaggagttgttggtataaatatatatacaatgtggtcatacccactaacaaactccactgccgatttagaagcaactcaaagatttctggacttctattccggctggatactagaaccattggtgtttggagattatccaagcgtaatgaagaagaatgttggttctcgccttccgtcattcagtaaagttcaatctgaagccattcgtggcactctagatttcattggaataaaccactattattctttctatgtgaacgaccgccctttagaaaaaggcatccgtgacttctcactggacattgctgctgactatagaggtaaaacagtttgtcactcgatacatgattatccttttattgcttgcaattctttagatacattccctgggacttctgattcatttatctagagtcacacacacaatggcctacagaagttcaaaacggtgtcacatggaccaaataatttgatgatacttctgaaacatattcgcaattttatgaaacctacaagctaaatgctgtatataacaaaacaattatctgaaacaggttcgagaactgatccgccaataggtcaggtaaggtttttcatcaacaatcttcagaaattcgacatgatagatacatcccttttattttactgcagcatgccccaacatctattcccgctgatcccagaggattgcaacttttggtagagtacctgagtgaagcctatgggaaccttcccatctatatccaagagacaggttatgcaaccacaaacggcagcctccatgatactgacagggttgattacatgaagacccacataagcagcacattggctgctctaaggaatggggctaatgtgaaaggctacttcgcgtggtgcttcctggacgtcttcgagtacctgtcagggttcatgtcgcaatacggcctgtaccgtgttgatttcgaggacgaggcgctaccaaggcaagcaaggctatctgctcgctggtattctaaattcctagagaacaaggggatccatgtagaggacgagcttgatgatgcgggatcacacgttgagcaataagttttctacagcgacacattgatctgtacatcctctagcgagactattgaatactactgtgcgttgcaataagaacacttatattaaaaaaacaaattccatcaaaacctctgtccaggactccaggtaaacaccaccacaatattagggacacggtcctgccagaacaagggaccgtttgtacaactcaagcccatatctgctagagtgtgaggagaaatttcattatttgggtcttaattcggcttcctgtgatctttagggcctgttcgtttttcacggattcaagccctggaatagttcctagccggattacttctctaatttatataaattttgatgagctggaatgaatccgggttcattcctg

SEQ ID NO: 31646 - DNA, 2980 bp, Zea Mays
aagcgtgggcctaccaaccacacatgtcaattctcggaatttctcagaagattggagacgggcgttctcttttcatttggagttttggactagtcgaactgacgaactggcagagcgttcaggatagacatggctgccacctttgccttcatccctctcctgctactggtctgcgtccagagcgcggctcctgttctcggcttcacaaggagcgagttccctgaagatttcgtcttcggatccgctacctcggcttatcagtatgagggtgctgttggtgaggatggtaggagcccaagcatctgggacaccttcactcacgcagggagaatgccggacaaaagcaatggtgatgtagccgccgacgggtacaacaagtacaaggtgaaataaattagctgcgaatcagtttttctgctggtatcgaggtgctggtttcttactatgcctgtcaactaaccttttgtctgatctctattttttttattgaaaaaccctggcatctaaatatgaaagttgctgtcttaattttaacatgtagtttgttgggctgacgtactgtcacttctgagatcagcatgctgaatttttcagcatatggaaaggagcattcttgatctgtttcttgctttgatcttaaccatctaatgttttaggacgatgttaagctcataattgacaataacctggaggcatataggttctctatctcctggtccagacttataccaaatggaagaggtgctattaatccaaaagggatagagtactataacaatctcatagacgagctagttacacatggtgtccaagtccatgttatgatttaccagctggatctccctcagatcctggaagacgagtatggtggatggttaagtccaatggttgtggaggatttcacggcatatgcagatgtgtgcttcagggagttcggtgacagggtttcacactggaccactctggatgaagtcaatgtggctgcaattgggtcctatgataatggacaaattgcaccgggaagatgttctgatccatttggaacaaaaaaatgtacagtggggaactcaagtgtggagccatatatagcagctcataacatgctactggcacatgcatcagctaccagactgtacagagaaaaataccaagtgagtaatcttgtacctgaaaacatcacatgtatcttaacattagtgttgtattgtttctttttttcttgaatacacaggagagctgagcatcgttgcattagaagaagaaatgtacatagtgtgcaaacacacacacccacacacttgtaatatcagaatctttttttttaccaagaaatactgtaggggaagcccctacagtaatatcagaatcttataccgtgacatgtgaggttgatccttataatagatcttacatttgaacatgtttcactcatgatccaaggcatcagtttgtcttctaactacaccaaaaacattccctttggctttatatcatcagatatttacccaaacataaaatgattgacctgtaggctgtgcaaaaaggagttgttggtataaatatatatacaatgtggtcatacccactaacaaactccactgccgatttagaagcaactcaaagatttctggacttctattccggctggatactagaaccattggtgtttggagattatccaagcgtaatgaagaagaatgttggttctcgccttccgtcattcagtaaagttcaatctgaagccattcgtggcactctagatttcattggaataaaccactattattctttctatgtgaacgaccgccctttagaaaaaggcatccgtgacttctcactggacattgctgctgactatagaggtaaaacagtttgtcactcgatacatgattatccttttattgcttgcaattctttagatacattccctgggacttctgattcatttatctagagtcacacacacaatggcctacagaagttcaaaacggtgtcacatggaccaaataatttgatgatacttctgaaacatattcgcaattttatgaaacctacaagctaaatgctgtatataacaaaacaattatctgaaacaggttcgagaactgatccgccaataggtcaggtaaggtttttcatcaacaatcttcagaaattcgacatgatagatacatcccttttattttactgcagcatgccccaacatctattcccgctgatcccagaggattgcaacttttggtagagtacctgagtgaagcctatgggaaccttcccatctatatccaagagacaggttatgcaaccacaaacggcagcctccatgatactgacagggttgattacatgaagacccacataagcagcacattggctgctctaaggaatggggctaatgtgaaaggctacttcgcgtggtgcttcctggacgtcttcgagtacctgtcagggttcatgtcgcaatacggcctgtaccgtgttgatttcgaggacgaggcgctaccaaggcaagcaaggctatctgctcgctggtattctaaattcctagagaacaaggggatccatgtagaggacgagcttgatgatgcgggatcacacgttgagcaataagttttctacagcgacacattgatctgtacatcctctagcgagactattgaatactactgtgcgttgcaataagaacacttatattaaaaaaacaaattccatcaaaacctctgtccaggactccaggtaaacaccaccacaatattagggacacggtcctgccagaacaagggaccgtttgtacaactcaagcccatatctgctagagtgtgaggagaaatttcattatttgggtcttaattcggcttcctgtgatctttagggcctgttcgtttttcacggattcaagccctggaatagttcctagccggattacttctctaatttatataaattttgatgagctggaatgaatccgggttcattcctg

SEQ ID NO: 31647 - DNA, 2325 bp, Zea Mays
aagcgtgggcctaccaaccacacatgtcaattctcggaatttctcagaagattggagacgggcgttctcttttcatttggagttttggactagtcgaactgacgaactggcagagcgttcaggatagacatggctgccacctttgccttcatccctctcctgctactggtctgcgtccagagcgcggctcctgttctcggcttcacaaggagcgagttccctgaagatttcgtcttcggatccgctacctcggcttatcagtatgagggtgctgttggtgaggatggtaggagcccaagcatctgggacaccttcactcacgcagggagaatgccggacaaaagcaatggtgatgtagccgccgacgggtacaacaagtacaagatggaagaggtgctattaatccaaaagggatagagtactataacaatctcatagacgagctagttacacatggtgtccaagtccatgttatgatttaccagctggatctccctcagatcctggaagacgagtatggtggatggttaagtccaatgggaggatttcacggcatatgcagatgtgtgcttcagggagttcggtgacagggtttcacactggaccactctggatgaagtcaatgtggctgcaattgggtcctatgataatggacaaattgcaccgggaagatgttctgatccatttggaacaaaaaaatgtacagtggggaactcaagtgtggagccatatatagcagctcataacatgctactggcacatgcatcagctaccagactgtacagagaaaaataccaagctgtgcaaaaaggagttgttggtataaatatatatacaatgtggtcatacccactaacaaactccactgccgatttagaagcaactcaaagatttctggacttctattccggctggtatcttcttgactcttgttgcatcacaaatgtggaacatttatagagataatcgaaaacaatatgtatcgattgtaggatactagaaccattggtgtttggagattatccaagcgtaatgaagaagaatgttggttctcgccttccgtcattcagtaaagttcaatctgaagccattcgtggcactctagatttcattggaataaaccactattattctttctatgtgaacgaccgccctttagaaaaaggcatccgtgacttctcactggacattgctgctgactatagaggtaaaacagtttgtcactcgatacatgattatccttttattgcttgcaattctttagatacattccctgggacttctgattcatttatctagagtcacacacacaatggcctacagaagttcaaaacggtgtcacatggaccaaataatttgatgatacttctgaaacatattcgcaattttatgaaacctacaagctaaatgctgtatataacaaaacaattatctgaaacaggttcgagaactgatccgccaataggtcaggtaaggtttttcatcaacaatcttcagaaattcgacatgatagatacatcccttttattttactgcagcatgccccaacatctattcccgctgatcccagaggattgcaacttttggtagagtacctgagtgaagcctatgggaaccttcccatctatatccaagagacaggttatgcaaccacaaacggcagcctccatgatactgacagggttgattacatgaagacccacataagcagcacattggctgctctaaggaatggggctaatgtgaaaggctacttcgcgtggtgcttcctggacgtcttcgagtacctgtcagggttcatgtcgcaatacggcctgtaccgtgttgatttcgaggacgaggcgctaccaaggcaagcaaggctatctgctcgctggtattctaaattcctagagaacaaggggatccatgtagaggacgagcttgatgatgcgggatcacacgttgagcaataagttttctacagcgacacattgatctgtacatcctctagcgagactattgaatactactgtgcgttgcaataagaacacttatattaaaaaaacaaattccatcaaaacctctgtccaggactccaggtaaacaccaccacaatattagggacacggtcctgccagaacaagggaccgtttgtacaactcaagcccatatctgctagagtgtgaggagaaatttcattatttgggtcttaattcggcttcctgtgatctttagggcctgttcgtttttcacggattcaagccctggaatagttcctagccggattacttctctaatttatataaattttgatgagctggaatgaatccgggttcattcctg

SEQ ID NO: 31648 - DNA, 2703 bp, Zea Mays
aagcgtgggcctaccaaccacacatgtcaattctcggaatttctcagaagattggagacgggcgttctcttttcatttggagttttggactagtcgaactgacgaactggcagagcgttcaggatagacatggctgccacctttgccttcatccctctcctgctactggtctgcgtccagagcgcggctcctgttctcggcttcacaaggagcgagttccctgaagatttcgtcttcggatccgctacctcggcttatcagtatgagggtgctgttggtgaggatggtaggagcccaagcatctgggacaccttcactcacgcagggagaatgccggacaaaagcaatggtgatgtagccgccgacgggtacaacaagtacaaggacgatgttaagctcataattgacaataacctggaggcatataggttctctatctcctggtccagacttataccaaatggaagaggtgctattaatccaaaagggatagagtactataacaatctcatagacgagctagttacacatggtgtccaagtccatgttatgatttaccagctggatctccctcagatcctggaagacgagtatggtggatggttaagtccaatgggaggatttcacggcatatgcagatgtgtgcttcagggagttcggtgacagggtttcacactggaccactctggatgaagtcaatgtggctgcaattgggtcctatgataatggacaaattgcaccgggaagatgttctgatccatttggaacaaaaaaatgtacagtggggaactcaagtgtggagccatatatagcagctcataacatgctactggcacatgcatcagctaccagactgtacagagaaaaataccaagtgagtaatcttgtacctgaaaacatcacatgtatcttaacattagtgttgtattgtttctttttttcttgaatacacaggagagctgagcatcgttgcattagaagaagaaatgtacatagtgtgcaaacacacacacccacacacttgtaatatcagaatctttttttttaccaagaaatactgtaggggaagcccctacagtaatatcagaatcttataccgtgacatgtgaggttgatccttataatagatcttacatttgaacatgtttcactcatgatccaaggcatcagtttgtcttctaactacaccaaaaacattccctttggctttatatcatcagatatttacccaaacataaaatgattgacctgtaggctgtgcaaaaaggagttgttggtataaatatatatacaatgtggtcatacccactaacaaactccactgccgatttagaagcaactcaaagatttctggacttctattccggctggatactagaaccattggtgtttggagattatccaagcgtaatgaagaagaatgttggttctcgccttccgtcattcagtaaagttcaatctgaagccattcgtggcactctagatttcattggaataaaccactattattctttctatgtgaacgaccgccctttagaaaaaggcatccgtgacttctcactggacattgctgctgactatagaggtaaaacagtttgtcactcgatacatgattatccttttattgcttgcaattctttagatacattccctgggacttctgattcatttatctagagtcacacacacaatggcctacagaagttcaaaacggtgtcacatggaccaaataatttgatgatacttctgaaacatattcgcaattttatgaaacctacaagctaaatgctgtatataacaaaacaattatctgaaacaggttcgagaactgatccgccaataggtcaggtaaggtttttcatcaacaatcttcagaaattcgacatgatagatacatcccttttattttactgcagcatgccccaacatctattcccgctgatcccagaggattgcaacttttggtagagtacctgagtgaagcctatgggaaccttcccatctatatccaagagacaggttatgcaaccacaaacggcagcctccatgatactgacagggttgattacatgaagacccacataagcagcacattggctgctctaaggaatggggctaatgtgaaaggctacttcgcgtggtgcttcctggacgtcttcgagtacctgtcagggttcatgtcgcaatacggcctgtaccgtgttgatttcgaggacgaggcgctaccaaggcaagcaaggctatctgctcgctggtattctaaattcctagagaacaaggggatccatgtagaggacgagcttgatgatgcgggatcacacgttgagcaataagttttctacagcgacacattgatctgtacatcctctagcgagactattgaatactactgtgcgttgcaataagaacacttatattaaaaaaacaaattccatcaaaacctctgtccaggactccaggtaaacaccaccacaatattagggacacggtcctgccagaacaagggaccgtttgtacaactcaagcccatatctgctagagtgtgaggagaaatttcattatttgggtcttaattcggcttcctgtgatctttagggcctgttcgtttttcacggattcaagccctggaatagttcctagccggattacttctctaatttatataaattttgatgagctggaatgaatccgggttcattcctg

SEQ ID NO: 31649 - DNA, 2595 bp, Zea Mays
aagcgtgggcctaccaaccacacatgtcaattctcggaatttctcagaagattggagacgggcgttctcttttcatttggagttttggactagtcgaactgacgaactggcagagcgttcaggatagacatggctgccacctttgccttcatccctctcctgctactggtctgcgtccagagcgcggctcctgttctcggcttcacaaggagcgagttccctgaagatttcgtcttcggatccgctacctcggcttatcagtatgagggtgctgttggtgaggatggtaggagcccaagcatctgggacaccttcactcacgcagggagaatgccggacaaaagcaatggtgatgtagccgccgacgggtacaacaagtacaaggtgaaataaattagctgcgaatcagtttttctgctggtatcgaggtgctggtttcttactatgcctgtcaactaaccttttgtctgatctctattttttttattgaaaaaccctggcatctaaatatgaaagttgctgtcttaattttaacatgtagtttgttgggctgacgtactgtcacttctgagatcagcatgctgaatttttcagcatatggaaaggagcattcttgatctgtttcttgctttgatcttaaccatctaatgttttaggacgatgttaagctcataattgacaataacctggaggcatataggttctctatctcctggtccagacttataccaaatggaagaggtgctattaatccaaaagggatagagtactataacaatctcatagacgagctagttacacatggtgtccaagtccatgttatgatttaccagctggatctccctcagatcctggaagacgagtatggtggatggttaagtccaatgggaggatttcacggcatatgcagatgtgtgcttcagggagttcggtgacagggtttcacactggaccactctggatgaagtcaatgtggctgcaattgggtcctatgataatggacaaattgcaccgggaagatgttctgatccatttggaacaaaaaaatgtacagtggggaactcaagtgtggagccatatatagcagctcataacatgctactggcacatgcatcagctaccagactgtacagagaaaaataccaagctgtgcaaaaaggagttgttggtataaatatatatacaatgtggtcatacccactaacaaactccactgccgatttagaagcaactcaaagatttctggacttctattccggctggatactagaaccattggtgtttggagattatccaagcgtaatgaagaagaatgttggttctcgccttccgtcattcagtaaagttcaatctgaagccattcgtggcactctagatttcattggaataaaccactattattctttctatgtgaacgaccgccctttagaaaaaggcatccgtgacttctcactggacattgctgctgactatagaggtaaaacagtttgtcactcgatacatgattatccttttattgcttgcaattctttagatacattccctgggacttctgattcatttatctagagtcacacacacaatggcctacagaagttcaaaacggtgtcacatggaccaaataatttgatgatacttctgaaacatattcgcaattttatgaaacctacaagctaaatgctgtatataacaaaacaattatctgaaacaggttcgagaactgatccgccaataggtcaggtaaggtttttcatcaacaatcttcagaaattcgacatgatagatacatcccttttattttactgcagcatgccccaacatctattcccgctgatcccagaggattgcaacttttggtagagtacctgagtgaagcctatgggaaccttcccatctatatccaagagacaggttatgcaaccacaaacggcagcctccatgatactgacagggttgattacatgaagacccacataagcagcacattggctgctctaaggaatggggctaatgtgaaaggctacttcgcgtggtgcttcctggacgtcttcgagtacctgtcagggttcatgtcgcaatacggcctgtaccgtgttgatttcgaggacgaggcgctaccaaggcaagcaaggctatctgctcgctggtattctaaattcctagagaacaaggggatccatgtagaggacgagcttgatgatgcgggatcacacgttgagcaataagttttctacagcgacacattgatctgtacatcctctagcgagactattgaatactactgtgcgttgcaataagaacacttatattaaaaaaacaaattccatcaaaacctctgtccaggactccaggtaaacaccaccacaatattagggacacggtcctgccagaacaagggaccgtttgtacaactcaagcccatatctgctagagtgtgaggagaaatttcattatttgggtcttaattcggcttcctgtgatctttagggcctgttcgtttttcacggattcaagccctggaatagttcctagccggattacttctctaatttatataaattttgatgagctggaatgaatccgggttcattcctg

SEQ ID NO: 31650 - DNA, 2646 bp, Zea Mays
aagcgtgggcctaccaaccacacatgtcaattctcggaatttctcagaagattggagacgggcgttctcttttcatttggagttttggactagtcgaactgacgaactggcagagcgttcaggatagacatggctgccacctttgccttcatccctctcctgctactggtctgcgtccagagcgcggctcctgttctcggcttcacaaggagcgagttccctgaagatttcgtcttcggatccgctacctcggcttatcagtatgagggtgctgttggtgaggatggtaggagcccaagcatctgggacaccttcactcacgcagggagaatgccggacaaaagcaatggtgatgtagccgccgacgggtacaacaagtacaagatggaagaggtgctattaatccaaaagggatagagtactataacaatctcatagacgagctagttacacatggtgtccaagtccatgttatgatttaccagctggatctccctcagatcctggaagacgagtatggtggatggttaagtccaatggttgtgtaagatccagtaactttagatgttagggatattttcccaaaatgaacatatcttgatcatccatgctaccacaaaacgcagggaggatttcacggcatatgcagatgtgtgcttcagggagttcggtgacagggtttcacactggaccactctggatgaagtcaatgtggctgcaattgggtcctatgataatggacaaattgcaccgggaagatgttctgatccatttggaacaaaaaaatgtacagtggggaactcaagtgtggagccatatatagcagctcataacatgctactggcacatgcatcagctaccagactgtacagagaaaaataccaagtgagtaatcttgtacctgaaaacatcacatgtatcttaacattagtgttgtattgtttctttttttcttgaatacacaggagagctgagcatcgttgcattagaagaagaaatgtacatagtgtgcaaacacacacacccacacacttgtaatatcagaatctttttttttaccaagaaatactgtaggggaagcccctacagtaatatcagaatcttataccgtgacatgtgaggttgatccttataatagatcttacatttgaacatgtttcactcatgatccaaggcatcagtttgtcttctaactacaccaaaaacattccctttggctttatatcatcagatatttacccaaacataaaatgattgacctgtaggctgtgcaaaaaggagttgttggtataaatatatatacaatgtggtcatacccactaacaaactccactgccgatttagaagcaactcaaagatttctggacttctattccggctggatactagaaccattggtgtttggagattatccaagcgtaatgaagaagaatgttggttctcgccttccgtcattcagtaaagttcaatctgaagccattcgtggcactctagatttcattggaataaaccactattattctttctatgtgaacgaccgccctttagaaaaaggcatccgtgacttctcactggacattgctgctgactatagaggtaaaacagtttgtcactcgatacatgattatccttttattgcttgcaattctttagatacattccctgggacttctgattcatttatctagagtcacacacacaatggcctacagaagttcaaaacggtgtcacatggaccaaataatttgatgatacttctgaaacatattcgcaattttatgaaacctacaagctaaatgctgtatataacaaaacaattatctgaaacaggttcgagaactgatccgccaataggtcagcatgccccaacatctattcccgctgatcccagaggattgcaacttttggtagagtacctgagtgaagcctatgggaaccttcccatctatatccaagagacaggttatgcaaccacaaacggcagcctccatgatactgacagggttgattacatgaagacccacataagcagcacattggctgctctaaggaatggggctaatgtgaaaggctacttcgcgtggtgcttcctggacgtcttcgagtacctgtcagggttcatgtcgcaatacggcctgtaccgtgttgatttcgaggacgaggcgctaccaaggcaagcaaggctatctgctcgctggtattctaaattcctagagaacaaggggatccatgtagaggacgagcttgatgatgcgggatcacacgttgagcaataagttttctacagcgacacattgatctgtacatcctctagcgagactattgaatactactgtgcgttgcaataagaacacttatattaaaaaaacaaattccatcaaaacctctgtccaggactccaggtaaacaccaccacaatattagggacacggtcctgccagaacaagggaccgtttgtacaactcaagcccatatctgctagagtgtgaggagaaatttcattatttgggtcttaattcggcttcctgtgatctttagggcctgttcgtttttcacggattcaagccctggaatagttcctagccggattacttctctaatttatataaattttgatgagctggaatgaatccgggttcattcctg

SEQ ID NO: 31651 - DNA, 1945 bp, Zea Mays
aagcgtgggcctaccaaccacacatgtcaattctcggaatttctcagaagattggagacgggcgttctcttttcatttggagttttggactagtcgaactgacgaactggcagagcgttcaggatagacatggctgccacctttgccttcatccctctcctgctactggtctgcgtccagagcgcggctcctgttctcggcttcacaaggagcgagttccctgaagatttcgtcttcggatccgctacctcggcttatcagtatgagggtgctgttggtgaggatggtaggagcccaagcatctgggacaccttcactcacgcagggagaatgccggacaaaagcaatggtgatgtagccgccgacgggtacaacaagtacaagatggaagaggtgctattaatccaaaagggatagagtactataacaatctcatagacgagctagttacacatggtgtccaagtccatgttatgatttaccagctggatctccctcagatcctggaagacgagtatggtggatggttaagtccaatgggaggatttcacggcatatgcagatgtgtgcttcagggagttcggtgacagggtttcacactggaccactctggatgaagtcaatgtggctgcaattgggtcctatgataatggacaaattgcaccgggaagatgttctgatccatttggaacaaaaaaatgtacagtggggaactcaagtgtggagccatatatagcagctcataacatgctactggcacatgcatcagctaccagactgtacagagaaaaataccaagctgtgcaaaaaggagttgttggtataaatatatatacaatgtggtcatacccactaacaaactccactgccgatttagaagcaactcaaagatttctggacttctattccggctggatactagaaccattggtgtttggagattatccaagcgtaatgaagaagaatgttggttctcgccttccgtcattcagtaaagttcaatctgaagccattcgtggcactctagatttcattggaataaaccactattattctttctatgtgaacgaccgccctttagaaaaaggcatccgtgacttctcactggacattgctgctgactatagaggttcgagaactgatccgccaataggtcagcatgccccaacatctattcccgctgatcccagaggattgcaacttttggtagagtacctgagtgaagcctatgggaaccttcccatctatatccaagagacaggttatgcaaccacaaacggcagcctccatgatactgacagggttgattacatgaagacccacataagcagcacattggctgctctaaggaatggggctaatgtgaaaggctacttcgcgtggtgcttcctggacgtcttcgagtacctgtcagggttcatgtcgcaatacggcctgtaccgtgttgatttcgaggacgaggcgctaccaaggcaagcaaggctatctgctcgctggtattctaaattcctagagaacaaggggatccatgtagaggacgagcttgatgatgcgggatcacacgttgagcaataagttttctacagcgacacattgatctgtacatcctctagcgagactattgaatactactgtgcgttgcaataagaacacttatattaaaaaaacaaattccatcaaaacctctgtccaggactccaggtaaacaccaccacaatattagggacacggtcctgccagaacaagggaccgtttgtacaactcaagcccatatctgctagagtgtgaggagaaatttcattatttgggtcttaattcggcttcctgtgatctttagggcctgttcgtttttcacggattcaagccctggaatagttcctagccggattacttctctaatttatataaattttgatgagctggaatgaatccgggttcattcctg

SEQ ID NO: 31652 - DNA, 1490 bp, Zea Mays
gttattttcagtttttcactagccgcttcgctaccgtgcacaggaaaacccaaacaaaccacagaacccgagcaccgccgccatgtccgccgccgcagccgactggctcccgtcagcgtccgtgacggcgtccggccgcccggtgctttccgcaggcgaggtggagcggaatctcgtcccgcttgtcgatctcgagcccgaggagaacccacacctcgcgcccctccgcgcctgcctcctcgcgctcacttcccaccgcctcatcttcctccacgagccgtcccgctccgcacgcggcctcccgctcgccaccgttgtccatgcctaccctccccaccgcaggcacaaccataacccccttcgctccctcttctcctcgtcctcatcttcctcgtcgcagcatcaccgcatccgcctccagatctccatgccatccgtgcgatcggaggtcattgccatcgtcgtgacctgtaaggctgacgttgatgtgttcttcgggaggctgctcgaggcgatccgtgcaagggcttgggaggtggcccccgcagctgctccgtcgagcagcacgcccgtcgcagatgtgcctgcggagaacgtcgggatccggatgcccgttgttggggtctctgggatactgcggatggagcaggagtcatgggagagcgccggccagaacttacaagatgcgttccaggatctcaatgccctcatgggcaaagctaaggaaatgatgcagttagcagagaaaatgaggctcaagctattaatgaactcatctactgaatcaaattccaatgatgaagagatgggctctaagcaagacatgcaggatttgctacttagtgttggcattgtgtctcctgtgacgaaagaaactgctggtgcgttgtatcatcagcagttgtcactacagctcgcggactttgtaagaataccgcttgagaaagcaggtggtatgatggcactggtcgatgtttactgtctcttcaaccgtgctaggggaacagagttaatctcaccagaggaccttttgcaagcttgttcgctatgggagaaagttgatgtatgttgatttgtaatgagcagccaagtcatgctcaggaaatttgatagtggagtgaaggtgatccagacaaagacacatagtgatgaagaggtatttgcgagaatctcatcacttgcacagaagcaggatgctcttcagaaagggattagcccaagtgatgctgcattcacactgggaattgctccagctttagcaaaggagcatcttctaaatgcagaaaacaaaggactgttgtgcagagatgttagtccagatggattccgcttctttatcaatttatttaatgacattgatgcccaaaatatttactcgcaaaaaccttatggaccgtacaacgtgtggatctccgttgcgatgacatctcactgacactggttgatcaagctggacatcggtgcagttattgtatattcttcttttgggg

SEQ ID NO: 31653 - DNA, 1440 bp, Zea Mays
gcacaggaaaacccaaacaaaccacagaacccgagcaccgccgccatgtccgccgccgcagccgactggctcccgtcagcgtccgtgacggcgtccggccgcccggtgctttccgcaggcgaggtggagcggaatctcgtcccgcttgtcgatctcgagcccgaggagaacccacacctcgcgcccctccgcgcctgcctcctcgcgctcacttcccaccgcctcatcttcctccacgagccgtcccgctccgcacgcggcctcccgctcgccaccgttgtccatgcctaccctccccaccgcaggcacaaccataacccccttcgctccctcttctcctcgtcctcatcttcctcgtcgcagcatcaccgcatccgcctccagatctccatgccatccgtgcgatcggaggtcattgccatcgtcgtgacctgtaaggctgacgttgatgtgttcttcgggaggctgctcgaggcgatccgtgcaagggcttgggaggtggcccccgcagctgctccgtcgagcagcacgcccgtcgcagatgtgcctgcggagaacgtcgggatccggatgcccgttgttggggtctctgggatactgcggatggagcaggagtcatgggagagcgccggccagaacttacaagatgcgttccaggatctcaatgccctcatgggcaaagctaaggaaatgatgcagttagcagagaaaatgaggctcaagctattaatgaactcatctactgaatcaaattccaatgatgaagagatgggctctaagcaagacatgcaggatttgctacttagtgttggcattgtgtctcctgtgacgaaagaaactgctggtgcgttgtatcatcagcagttgtcactacagctcgcggactttgtaagaataccgcttgagaaagcaggtggtatgatggcactggtcgatgtttactgtctcttcaaccgtgctaggggaacagagttaatctcaccagaggaccttttgcaagcttgttcgctatgggagaaagttgatgtatgttgatttgtaatgagcagccaagtcatgctcaggaaatttgatagtggagtgaaggtgatccagacaaagacacatagtgatgaagaggtatttgcgagaatctcatcacttgcacagaagcaggatgctcttcagaaagggattagcccaagtgatgctgcattcacactgggaattgctccagctttagcaaaggagcatcttctaaatgcagaaaacaaagagatgttagtccagatggattccgcttctttatcaatttatttaatgacattgatgcccaaaatatttactcgcaaaaaccttatggaccgtacaacgtgtggatctccgttgcgatgacatctcactgacactggttgatcaagctggacatcggtgcagttattgtatattcttcttttgggg

SEQ ID NO: 31654 - DNA, 749 bp, Zea Mays
caaggataaaaatttgttcatgccctcagagaatcagagttaatttgttgttacctgttcattctccagggaattctggtatttgttgttaaggaaatttggtctgcattctttggctcctcaaccggatgttggctcatatctgggctggtcgaaatcggcagggaatattgctaatggactcaccaaaaatctcgcggactttgtaagaataccgcttgagaaagcaggtggtatgatggcactggtcgatgtttactgtctcttcaaccgtgctaggggaacagagttaatctcaccagaggaccttttgcaagcttgttcgctatgggagaaagttgatgtccaagtcatgctcaggaaatttgatagtggagtgaaggtgatccagacaaagacacatagtgatgaagaggtatttgcgagaatctcatcacttgcacagaagcaggatgctcttcagaaagggattagcccaagtgatgctgcattcacactgggaattgctccagctttagcaaaggagcatcttctaaatgcagaaaacaaaggactgttgtgcagagatgttagtccagatggattccgcttctttatcaatttatttaatgacattgatgcccaaaatatttactcgcaaaaaccttatggaccgtacaacgtgtggatctccgttgcgatgacatctcactgacactggttgatcaagctggacatcggtgcagttattgtatattcttcttttgggg

SEQ ID NO: 31655 - DNA, 635 bp, Zea Mays
ctcatatctgggctggtcgaaatcggcagggaatattgctaatggactcaccaaaaatctcgcggactttgtaagaataccgcttgagaaagcaggtggtatgatggcactggtcgatgtttactgtctcttcaaccgtgctaggggaacagagttaatctcaccagaggaccttttgcaagcttgttcgctatgggagaaagttgatgtatgttgatttgtaatgagcagccaagtcatgctcaggaaatttgatagtggagtgaaggtgatccagacaaagacacatagtgatgaagaggtatttgcgagaatctcatcacttgcacagaagcaggatgctcttcagaaagggattagcccaagtgatgctgcattcacactgggaattgctccagctttagcaaaggagcatcttctaaatgcagaaaacaaaggactgttgtgcagagatgttagtccagatggattccgcttctttatcaatttatttaatgacattgatgcccaaaatatttactcgcaaaaaccttatggaccgtacaacgtgtggatctccgttgcgatgacatctcactgacactggttgatcaagctggacatcggtgcagttattgtatattcttcttttgggg

SEQ ID NO: 31656 - DNA, 1120 bp, Zea Mays
cttgtcccgtcaatgaacaaattaacgattcatttatttcttatctagtctccgtttgtttgatttctcacgttgtagcaaaatgtgctgacattcttctctgtttcttctcattttctttgtttttttatatttgctctgctacttggacactcgtgtgatacatggatgttccatgtctgatgtcgcctcgcttccaacagtttatgtgggagcatttgacaatgaggaggcagcggcccgtgcttatgatctcgcagcactcaagtactgtggctggggctcacacagcacactcaacttcccactggaatcttacaggcatgaacacgagaatatgcagcgcatgacaagagaggcgtacctggccgctctacggcgcaggagcagctgcttctcgagaggcgcctctggttacaggggagtggccaagcaccaccacaacggcaggtgggaggccaggatcggctacccttgcggcaagaaatacgtctacctggggacgttcgggacgcaggaggaggcagcccgggcctacgaccttgcagctctggaactgcgggggcacgccgcggtcaccaacttcgacatcagcagctacacggcggacaaggactaccagcagcgacggcatgaaccggcggtccgcacggcccagccgaagcccaagcccaaggtcgagctggtggacgaggcaccactgccccaggctcgtcgtccggctccgacgttcctgacgccgaagcccgagcccgagtacgagctgggcgagcccctggcgctgccacccggccccgtgctccgcgacgccgacgacgcggaccacgccatcgccgagatcctgccggcgctctgcatggaccccgccgacttcgaggcccggtaccccgcccgccgcgcccgcgcgctcggctgcccgccggacgaccagctgcgcggcctggcgctgccggacagcgtgcgcttcgaggacgacatcgagacgctgttcgacgcgcccggcgaggtccgtgtgcaattccctcccgccgccgctgtgcctgacgtatccgcagccgacgcggtctcctacgcggccgccaccatcagctcgctggcgtccgggcgctggtggccttga

SEQ ID NO: 31657 - DNA, 1376 bp, Zea Mays
cgaatatctaatttactaaaagtaactagtaattgaactattagctagactattcaaatgtcttcagctaattttagcagtaaactattagctctaatgtatttaaacacgaccttagatgtggtaagagaaaacatggtaccaggcaggtattaactgagaaacagataatgttacgaaatgaaaactttttatactatttgagctccgtacacaaaatcattgggacagcgtctaccgatgactatttgtgcaaccctaatagcaaactgcaaatgacagcatattatgaaattctaacgagtgaacaacacatgccttacgaagtcattgcttgagtcttagggtctgtttggttcgtggctaactgcgccacactttgtctaaggttaggcgttcgaattgaagaactaaccttaggcagaaaagttaggtaaagtgtggcaagttaggcagtgaaccaaacagacctttacaacaccaactcaccccggtggccaattcatctgccgtcccccgagaagatgaacgtgtaggtgccggtggtagaccgattgagatcctctgggcccatcgtccatgacaattctgaagccatcagcaagcccttcctgctctgctacaacctttgcagcatacagaagattgcccagaagctcgacatgcccttcctctgcctgggaacaagcacatcaatgtattaaagttactgtggatgatctgtccgtcagtacatgcaccaagaacctcgaatccttaaataagttcctaaaccaaggtgtgaggcttgctgtttcccactatactgctattctgtccttcatattcagtgttatgacgtgcagggtgctgagaggcaaggtcttacctgtttggttcctttagtttcggaactaaagtttagtctctaccctgtttggtttattgaccaatgatttcaagtcgtccgactaatcgcgattaatcgcgattagtcgggctggtcggtatttagtgcacgatttggtggacgactcgactagacaacctagtcgtccgggtcgtccgactaatcgtcgactagggcgactagtcgtccgacttgtgtgacctggtcgtcctggctagggttcagttattgggccttttttagcccatcaggttcaggtaagtcacaaatcacaatgaagcaatatgttactttgtttatcctagttgtttgttctaatttatataatgtatacaggtatatttatatatatacctatataagtatagctactagtctaggacgaccagggaccgactaggaccgactaggggtcgactagtcgccctagtcgtcgcctaatcgcgactagtcgcctggtcggtcccagggttcgaccaggcgacta

SEQ ID NO: 31658 - DNA, 3456 bp, Zea Mays
ggtggcggtatggctgtcgcagcagctgcccctgctgctggcggagctgctcctgcagctgctgcctctctgctgaggacttgatggccattctggagtcaggaatatggagaatacaggtgtgccccagtgatagcagctgttggcttcctttgggccaattgcgtaaccttggcatttgggaatagagataagcgaagcagcaacatgaatgtatgctccatcaggtggctcttttctgcatgtgcatgggaggaatcatgtattttctggagtacgagccagacacaatggctccattcctcagagggctcatcaggcgcttcctggcaagcaagatcagcaatccaagccccctgcctcccaatcggaatgcctcctactcgtaccttcagacgctaaatgctctagagcaatcaagaacccaaccaggggtggagaggcatctcaatgatggggattttgttcttttcaatcggcaaccaagtcttcataaaatgtctatcatggttttcagcatggcattcagtgttctctccgatggcgcaaggatacggaaatgctccgcgcatggaagaatgcaacggatcagcccgtggctgcagccattgtcaatttgatcatgccttctttactagaaaatacagttcgacttcacaatatataattgaacttttcaaatcatgtttgtaaaactaagttcatttttttgtttgtttaatttccatgactaggtactgtctggttgcaagcaatcagatggttggattgttcctaatgatttgggctctgaaagagatgaagaatgacattacaaaatctgaaggtgtcctgtgctgggaggggattaatgggctaccttggaaataagttgtactgctcatctctttcgagaagatcacactgtcgcatttctaatgtttggagctttcttcacagtgcgagtaatagcaggagatcttccgatattggaatggctttgatgtctcattccttttatgtggtgttctttttttggcaatgagcacaaaaacaaggatattgaccagaaggacattgtcaatgtcatgccatgttgcatgccaacaaatttgaagtatgcaaaaatgttatgcaatgtcatgctttttcacctgacttgtttttttgttacttgtcagatttcgtcatgatcatatggaaaaatgttatgaagattactgagcagctcagcaaaacaggtgactaaacataggcactcaagagtgggctctcctctcgtgcgaccgcagcagagagccacggcctggccccggcagctatagcaggcaacagtccccacccgactttcctggcacccagccccagtagctgtaggcagcggcagcgcagtcgcctgccagtgccctctgctctcccagccaccctccagacaagtacgcttatatgttcttaaaaaactcttcactatatcacaaagctccaaaacaccacattgttattgatcttccaatcagtcttatcatatactagcttaaattttctgtgttttcctgattgaatagccatttggtcccttgctgcactttttcagccagtaattgctacatttctttccactcaatttgtgtagttgtattgacaaaagtggatctgataaccatttacagatctgaaagtttccctttgtgggtcacaggatggtcagttgagctgatggcttatgccttccttgtggtcagtccacctgacatgagtcaatgctttgaggagatggctgctgctgcatctaataaaacttcatcctggcgctggcgcatgagctcctcgggcccagctatagtgatgccgtgctggagctcaatgcctcagatgacagtaagttctccaatttcaagggagaagtctcaagatttggaccccaatatgcgagacgaagttatctattcatctccaaattttgatcccaaagttttcctttcgtgggtccacaaagacacgagcgctgctgacttagaggctggtgctctcaccttgaaaactgatcccaaagggagaacacagcagaaaaaactattagtcaaggagaacttcgattgttttgtctcgtgcaaaactacaatagatgtgacactaaaaattagtggtgtggcaaatcgtgcatttgagcctctatttgagaggcaggcccaagctgaaaagatcagatctgttcagggaatgcttcaaagattccgaacactatttaacctaccaagtgcaatccgtgggaacattagaaaaggagaatatgatcttgctgtcagagagtaccaaaaagcaaagtcaattgtttttccttctcatgagcggtttgttaaaggagggaatgacttttagaccgtaataacttgtctacacttaagatttcctcccttttgacactacattttagctgctcactcggaagctttccatccctgctggagtactcagcccatacaggcttctcattcttatctgcatggcatgtaactgctgcacagcgcgctacggctggcgtagcggcagcaactgctggtatgaccaggatccgtccaccctcattatcgacgatgaagcgacacccaattctaggcgcggacgaacgatggcgccctcgtgcgggatatcgggctgagtgatgagacgctgctgttattggggtttcaggcgcgcctgaccgctcccactcctaggcccaacatgtctctccgacgctacctaccggtgccgcaagctcaagcggtcaacagatcaacttagacgaaatgcagatgcattgtaaatattgaggaagaccagattccctcatgttcatggagcaggtgaaaagaagtcaccagagacaattctggatcatgagactatgagaggactttggcaacaaatgttcggtttgggtttctctgggtggttctatgatactttataatttcttttggcttatgtgtcatatcagtagatatgaaaatagctaagcgttgtcaataatattagcttccttgtttcttgttaacctaagatgactgacctatttcacttgttttttctagctgtggtagtaggtcataagagtagttcccttcaatcctagcactcagccatgttgtaaatggtttatttctattgtgaatcgtgtttttcttttttactggtggggttagtggaaaatctggacgtatccgcgaatggtggagaagcacacaaaacaacaattatatgcaaaaactaaacaattatatgaatttagtaccttgataatcacattgattagagctcgtttgtatttatattaaaacataactgctcaggaggtgtatgaggaggaaacgagatgtgcaatgcgtgcaacagtaagtagactaccatcacttggttgctcttgaagtgtgcaagtgtgtctatggacttgtatggttctttggtttttgttgtttgctgaggtgtaaagtagga

SEQ ID NO: 31659 - DNA, 4073 bp, Zea Mays
ggctgtcgcagcagctgcccctgctgctggcggagctgctcctgcagctgctgcctctctgctgaggacttgatggccattctggagtcaggaatatggagaatacaggtgtgccccagtgatagcagctgttggcttcctttgggccaattgcgtaaccttggcatttgggaatagagataagcgaagcagcaacatgaatgtatgctccatcaggtggctcttttctgcatgtgcatgggaggaatcatgtattttctggagtacgagccagacacaatggctccattcctcagagggctcatcaggcgcttcctggcaagcaagatcagcaatccaagccccctgcctcccaatcggaatgcctcctactcgtaccttcagacgctaaatgctctagagcaatcaagaacccaaccaggggtggagaggcatctcaatgatggggattttgttcttttcaatcggcaaccaagtcttcataaaatgtctatcatggttttcagcatggcattcagtgttctctccgatggcgcaaggatacggaaatgctccgcgcatggaagaatgcaacggatcagcccgtggctgcagccattgtcaatttgatcatgccttctttactagaaaatacagttcgacttcacaatatataattgaacttttcaaatcatgtttgtaaaactaagttcatttttttgtttgtttaatttccatgactaggtactgtctggttgcaagcaatcagatggttggattgttcctaatgatttgggctctgaaagagatgaagaatgacattacaaaatctgaaggtgtcctgtgctgggaggggattaatgggctaccttggaaataaggtgaattttactctatcgtgatcaatcttgaacaatgcatgcaacctacacaagaaatcaacaagaaacatttaatttgatttaaacatatttggaatccagtggtaaagaaggtatttatttcaaagcttttcactgtgattcttattggcctttgcgctgtttctacagaatgatctgactcatcagttagctatgataatacgacataatgagaatttgtagacagtatgagggatcgccggaaaccatcttggaggatgagtaagcagccaccttgtttatgcactagctttcacggtttagttcccatcaccatgccattgcactgacgccttgcaattgttcatcttgtgcaattctcttttgttatgaggcacacatggattgtgtatttctaggagtattgaattaattgtaccagcaatcgtcttttgtgtgtattagttaggttgtgcatttgttgggaaatgccataattctttggagtttctatgtatcaccatatcaaatttgtttttccctaatcagggaactcaattggtaagcttttttttattattagctcaacgttagttattaatgggatattgtatgatgttttctttcttttcttttgcagttgtactgctcatctctttcgagaagatcacactgtcgcatttctaatgtttggagctttcttcacagtgcgagtaatagcaggagatcttccgatattggaatggctttgatgtctcattccttttatgtggtgttctttttttggcaatgagcacaaaaacaaggatattgaccagaaggacattgtcaatgtcatgccatgttgcatgccaacaaatttgaagtgactaaacataggcactcaagagtgggctctcctctcgtgcgaccgcagcagagagccacggcctggccccggcagctatagcaggcaacagtccccacccgactttcctggcacccagccccagtagctgtaggcagcggcagcgcagtcgcctgccagtgccctctgctctcccagccaccctccagacaagatggtcagttgagctgatggcttatgccttccttgtggtcagtccacctgacatgagtcaatgctttgaggagatggctgctgctgcatctaataaaacttcatcctggcgctggcgcatgagctcctcgggcccagctatagtgatgccgtgctggagctcaatgcctcagatgacaggcaatgacgcaaggtcgtgtcaggacaacctacataacggctactggacagcttcaaggcagctagcgggctaggtaagggtgcaatgcgcaaggcagatcgatggtggccaaccctgccctttgccggctagaagcagcaggagaaatctccggtccaagggccaagaccacgctctaggggccaaggcaacacctgcaacagcctgcaactgcaatccttcactttaggaggcttcaggttttgggacctaccaactaaccgtatgaaaatatgatgataaatccctgcggttgatcactgatgcttcagtaagttctccaatttcaagggagaagtctcaagatttggaccccaatatgcgagacgaagttatctattcatctccaaattttgatcccaaagttttcctttcgtgggtccacaaagacacgagcgctgctgacttagaggctggtgctctcaccttgaaaactgatcccaaagggagaacacagcagaaaaaactattagtcaaggagaacttcgattgttttgtctcgtgcaaaactacaatagatgatagaggaagatcctgaaggtgtaggtactgctcacttgtattcagtgacactaaaaattagtggtgtggcaaatcgtgcatttgagcctctatttgagaggcaggcccaagctgaaaagatcagatctgttcagggaatgcttcaaagattccgaacactatttaacctaccaagtgcaatccgtgggaacattagaaaaggagaatatgatcttgctgtcagagagtaccaaaaagcaaagtcaattgtttttccttctcatgagcggtttgttaaaggagggaatgacttttagaccgtaataacttgtctacacttaagatttcctcccttttgacactacattttagctgctcactcggaagctttccatccctgctggagtactcagcccatacaggcttctcattcttatctgcatggcatgtaactgctgcacagcgcgctacggctggcgtagcggcagcaactgctggtatgaccaggatccgtccaccctcattatcgacgatgaagcgacacccaattctaggcgcggacgaacgatggcgccctcgtgcgggatatcgggctgagtgatgagacgctgctgttattggggtttcaggcgcgcctgaccgctcccactcctaggcccaacatgtctctccgacgctacctaccggtgccggtgaaacgcaaacttaaaatcgtgcattgcaagatcaagctcaagcggtcaacagatcaacttagacgaaatgcagatgcattgtaaatattgaggaagaccagattccctcatgttcatggagcaggtgaaaagaagtcaccagagacaattctggatcatgagactatgagaggactttggcaacaaatgttcggtttgggtttctctgggtggttctatgatactttataatttcttttggcttatgtgtcatatcagtagatatgaaaatagctaagcgttgtcaataatattagcttccttgtttcttgttaacctaagatgactgacctatttcacttgttttttctagctgtggtagtaggtcataagagtagttcccttcaatcctagcactcagccatgttgtaaatggtttatttctattgtgaatcgtgtttttcttttttactggtggggttagtggaaaatctggacgtatccgcgaatggtggagaagcacacaaaacaacaattatatgcaaaaactaaacaattatatgaatttagtaccttgataatcacattgattagagctcgtttgtatttatattaaaacataactgctcaggaggtgtatgaggaggaaacgagatgtgcaatgcgtgcaacagtaagtagactaccatcacttggttgctcttgaagtgtgcaagtgtgtctatggacttgtatggttctttggtttttgttgtttgctgaggtgtaaagtagga

SEQ ID NO: 31660 - DNA, 3951 bp, Zea Mays
agcagctgcccctgctgctggcggagctgctcctgcagctgctgcctctctgctgaggacttgatggccattctggagtcaggaatatggagaatacaggtgtgccccagtgatagcagctgttggcttcctttgggccaattgcgtaaccttggcatttgggaatagagataagcgaagcagcaacatgaatgtatgctccatcaggtggctcttttctgcatgtgcatgggaggaatcatgtattttctggagtacgagccagacacaatggctccattcctcagagggctcatcaggcgcttcctggcaagcaagatcagcaatccaagccccctgcctcccaatcggaatgcctcctactcgtaccttcagacgctaaatgctctagagcaatcaagaacccaaccaggggtggagaggcatctcaatgatggggattttgttcttttcaatcggcaaccaagtcttcataaaatgtctatcatggttttcagcatggcattcagtgttctctccgatggcgcaaggatacggaaatgctccgcgcatggaagaatgcaacggatcagcccgtggctgcagccattgtcaatttgatcatgccttctttactagaaaatacagttcgacttcacaatatataattgaacttttcaaatcatgtttgtaaaactaagttcatttttttgtttgtttaatttccatgactaggtactgtctggttgcaagcaatcagatggttggattgttcctaatgatttgggctctgaaagagatgaagaatgacattacaaaatctgaaggtgtcctgtgctgggaggggattaatgggctaccttggaaataagaatgatctgactcatcagttagctatgataatacgacataatgagaatttgtagacagtatgagggatcgccggaaaccatcttggaggatgattgtactgctcatctctttcgagaagatcacactgtcgcatttctaatgtttggagctttcttcacagtgcgagtaatagcaggagatcttccgatattggaatggctttgatgtctcattccttttatgtggtgttctttttttggcaatgagcacaaaaacaaggatattgaccagaaggacattgtcaatgtcatgccatgttgcatgccaacaaatttgaaatttcgtcatgatcatatggaaaaatgttatgaagattactgagcagctcagcaaaacaggtgactaaacataggcactcaagagtgggctctcctctcgtgcgaccgcagcagagagccacggcctggccccggcagctatagcaggcaacagtccccacccgactttcctggcacccagccccagtagctgtaggcagcggcagcgcagtcgcctgccagtgccctctgctctcccagccaccctccagacaagatggtcagttgagctgatggcttatgccttccttgtggtcagtccacctgacatgagtcaatgctttgaggagatggctgctgctgcatctaataaaacttcatcctggcgctggcgcatgagctcctcgggcccagctatagtgatgccgtgctggagctcaatgcctcagatgacaggtttctgccaccgtgacctgattttgtatcagtttgcttttgaccggcactcaagcgggagacagctaggccctaactgacaagccccaaggtggccaggcaatgacgcaaggtcgtgtcaggacaacctacataacggctactggacagcttcaaggcagctagcgggctaggtaagggtgcaatgcgcaaggcagatcgatggtggccaaccctgccctttgccggctagaagcagcaggagaaatctccggtccaagggccaagaccacgctctaggggccaaggcaacacctgcaacagcctgcaactgcaatccttcactttaggaggcttcaggttttgggacctaccaactaaccgtatgaaaatatgatgataaatccctgcggttgatcactgatgcttcagtaagttctccaatttcaagggagaagtctcaagatttggaccccaatatgcgagacgaagttatctattcatctccaaattttgatcccaaagttttcctttcgtgggtccacaaagacacgagcgctgctgacttagaggctggtgctctcaccttgaaaactgatcccaaagggagaacacagcagaaaaaactattagtcaaggagaacttcgattgttttgtctcgtgcaaaactacaatagatgatagaggaagatcctgaaggtgtaggtactgctcacttgtattcagtgacactaaaaattagtggtgtggcaaatcgtgcatttgagcctctatttgagaggcaggcccaagctgaaaagatcagatctgttcagggaatgcttcaaagattccgaacactatttaacctaccaagtgcaatccgtgggaacattagaaaaggagaatatgatcttgctgtcagagagtaccaaaaagcaaagtcaattgtttttccttctcatgagcggtttgttaaaggagggaatgacttttagaccgtaataacttgtctacacttaaggtaaaaattgttgtcattactatgattacctcctttagtgtcgtaaactcagaataatcatagatccctttgttgcttacatattattcatgttctacaagctattgagattttgactagccgctacattttagtgcaggttttcataatttcttacctttatatctacattttagatttcctcccttttgacactacattttagctgctcactcggaagctttccatccctgctggagtactcagcccatacaggcttctcattcttatctgcatggcatgtaactgctgcacagcgcgctacggctggcgtagcggcagcaactgctggtatgaccaggatccgtccaccctcattatcgacgatgaagcgacacccaattctaggcgcggacgaacgatggcgccctcgtgcgggatatcgggctgagtgatgagacgctgctgttattggggtttcaggcgcgcctgaccgctcccactcctaggcccaacatgtctctccgacgctacctaccggtgccggtgaaacgcaaacttaaaatcgtgcattgcaagatgttgccttctctttatgtctcctctactctacgcctatgagctttctttgtttctaactttttctgtggtttcgctttcagcaagctcaagcggtcaacagatcaacttagacgaaatgcagatgcattgtaaatattgaggaagaccagattccctcatgttcatggagcaggtgaaaagaagtcaccagagacaattctggatcatgagactatgagaggactttggcaacaaatgttcggtttgggtttctctgggtggttctatgatactttataatttcttttggcttatgtgtcatatcagtagatatgaaaatagctaagcgttgtcaataatattagcttccttgtttcttgttaacctaagatgactgacctatttcacttgttttttctagctgtggtagtaggtcataagagtagttcccttcaatcctagcactcagccatgttgtaaatggtttatttctattgtgaatcgtgtttttcttttttactggtggggttagtggaaaatctggacgtatccgcgaatggtggagaagcacacaaaacaacaattatatgcaaaaactaaacaattatatgaatttagtaccttgataatcacattgattagagctcgtttgtatttatattaaaacataactgctcaggaggtgtatgaggaggaaacgagatgtgcaatgcgtgcaacagtaagtagactaccatcacttggttgctcttgaagtgtgcaagtgtgtctatggacttgtatggttctttggtttttgttgtttgctgaggtgtaaagtagga

SEQ ID NO: 31661 - DNA, 4304 bp, Zea Mays
ctgcccctgctgctggcggagctgctcctgcagctgctgcctctctgctgaggacttgatggccattctggagtcaggaatatggagaatacaggtgtgccccagtgatagcagctgttggcttcctttgggccaattgcgtaaccttggcatttgggaatagagataagcgaagcagcaacatgaatgtatgctccatcaggtggctcttttctgcatgtgcatgggaggaatcatgtattttctggagtacgagccagacacaatggctccattcctcagagggctcatcaggcgcttcctggcaagcaagatcagcaatccaagccccctgcctcccaatcggaatgcctcctactcgtaccttcagacgctaaatgctctagagcaatcaagaacccaaccaggggtggagaggcatctcaatgatggggattttgttcttttcaatcggcaaccaagtcttcataaaatgtctatcatggttttcagcatggcattcagtgttctctccgatggcgcaaggatacggaaatgctccgcgcatggaagaatgcaacggatcagcccgtggctgcagccattgtcaatttgatcatgccttctttactagaaaatacagttcgacttcacaatatataattgaacttttcaaatcatgtttgtaaaactaagttcatttttttgtttgtttaatttccatgactaggtactgtctggttgcaagcaatcagatggttggattgttcctaatgatttgggctctgaaagagatgaagaatgacattacaaaatctgaaggtgtcctgtgctgggaggggattaatgggctaccttggaaataaggtgaattttactctatcgtgatcaatcttgaacaatgcatgcaacctacacaagaaatcaacaagaaacatttaatttgatttaaacatatttggaatccagtggtaaagaaggtatttatttcaaagcttttcactgtgattcttattggcctttgcgctgtttctacagaatgatctgactcatcagttagctatgataatacgacataatgagaatttgtagacagtatgagggatcgccggaaaccatcttggaggatgagtaagcagccaccttgtttatgcactagctttcacggtttagttcccatcaccatgccattgcactgacgccttgcaattgttcatcttgtgcaattctcttttgttatgaggcacacatggattgtgtatttctaggagtattgaattaattgtaccagcaatcgtcttttgtgtgtattagttaggttgtgcatttgttgggaaatgccataattctttggagtttctatgtatcaccatatcaaatttgtttttccctaatcagggaactcaattggtaagcttttttttattattagctcaacgttagttattaatgggatattgtatgatgttttctttcttttcttttgcagttgtactgctcatctctttcgagaagatcacactgtcgcatttctaatgtttggagctttcttcacagtgcgagtaatagcaggagatcttccgatattggaatggctttgatgtctcattccttttatgtggtgttctttttttggcaatgagcacaaaaacaaggatattgaccagaaggacattgtcaatgtcatgccatgttgcatgccaacaaatttgaaatttcgtcatgatcatatggaaaaatgttatgaagattactgagcagctcagcaaaacaggtgactaaacataggcactcaagagtgggctctcctctcgtgcgaccgcagcagagagccacggcctggccccggcagctatagcaggcaacagtccccacccgactttcctggcacccagccccagtagctgtaggcagcggcagcgcagtcgcctgccagtgccctctgctctcccagccaccctccagacaagatggtcagttgagctgatggcttatgccttccttgtggtcagtccacctgacatgagtcaatgctttgaggagatggctgctgctgcatctaataaaacttcatcctggcgctggcgcatgagctcctcgggcccagctatagtgatgccgtgctggagctcaatgcctcagatgacaggtttctgccaccgtgacctgattttgtatcagtttgcttttgaccggcactcaagcgggagacagctaggccctaactgacaagccccaaggtggccaggcaatgacgcaaggtcgtgtcaggacaacctacataacggctactggacagcttcaaggcagctagcgggctaggtaagggtgcaatgcgcaaggcagatcgatggtggccaaccctgccctttgccggctagaagcagcaggagaaatctccggtccaagggccaagaccacgctctaggggccaaggcaacacctgcaacagcctgcaactgcaatccttcactttaggaggcttcaggttttgggacctaccaactaaccgtatgaaaatatgatgataaatccctgcggttgatcactgatgcttcagtaagttctccaatttcaagggagaagtctcaagatttggaccccaatatgcgagacgaagttatctattcatctccaaattttgatcccaaagttttcctttcgtgggtccacaaagacacgagcgctgctgacttagaggctggtgctctcaccttgaaaactgatcccaaagggagaacacagcagaaaaaactattagtcaaggagaacttcgattgttttgtctcgtgcaaaactacaatagatggtatttgtgtagttgttagatacatccatattgcaaataaatgttcatgatcctgagtttatggacaatgttttgcatccccgtgtaaaacaattttttttctgacattgattcgaaattgagacagatagaggaagatcctgaaggtgtaggtactgctcacttgtattcagtgacactaaaaattagtggtgtggcaaatcgtgcatttgagcctctatttgagaggcaggcccaagctgaaaagatcagatctgttcagggaatgcttcaaagattccgaacactatttaacctaccaagtgcaatccgtgggaacattagaaaaggagaatatgatcttgctgtcagagagtaccaaaaagcaaagtcaattgtttttccttctcatgagcggtttgttaaaggagggaatgacttttagaccgtaataacttgtctacacttaagatttcctcccttttgacactacattttagctgctcactcggaagctttccatccctgctggagtactcagcccatacaggcttctcattcttatctgcatggcatgtaactgctgcacagcgcgctacggctggcgtagcggcagcaactgctggtatgaccaggatccgtccaccctcattatcgacgatgaagcgacacccaattctaggcgcggacgaacgatggcgccctcgtgcgggatatcgggctgagtgatgagacgctgctgttattggggtttcaggcgcgcctgaccgctcccactcctaggcccaacatgtctctccgacgctacctaccgcaagctcaagcggtcaacagatcaacttagacgaaatgcagatgcattgtaaatattgaggaagaccagattccctcatgttcatggagcaggtgaaaagaagtcaccagagacaattctggatcatgagactatgagaggactttggcaacaaatgttcggtttgggtttctctgggtggttctatgatactttataatttcttttggcttatgtgtcatatcagtagatatgaaaatagctaagcgttgtcaataatattagcttccttgtttcttgttaacctaagatgactgacctatttcacttgttttttctagctgtggtagtaggtcataagagtagttcccttcaatcctagcactcagccatgttgtaaatggtttatttctattgtgaatcgtgtttttcttttttactggtggggttagtggaaaatctggacgtatccgcgaatggtggagaagcacacaaaacaacaattatatgcaaaaactaaacaattatatgaatttagtaccttgataatcacattgattagagctcgtttgtatttatattaaaacataactgctcaggaggtgtatgaggaggaaacgagatgtgcaatgcgtgcaacagtaagtagactaccatcacttggttgctcttgaagtgtgcaagtgtgtctatggacttgtatggttctttggtttttgttgtttgctgaggtgtaaagtagga

SEQ ID NO: 31662 - DNA, 4199 bp, Zea Mays
tgcctctctgctgaggacttgatggccattctggagtcaggaatatggagaatacaggtgtgccccagtgatagcagctgttggcttcctttgggccaattgcgtaaccttggcatttgggaatagagataagcgaagcagcaacatgaatgtatgctccatcaggtggctcttttctgcatgtgcatgggaggaatcatgtattttctggagtacgagccagacacaatggctccattcctcagagggctcatcaggcgcttcctggcaagcaagatcagcaatccaagccccctgcctcccaatcggaatgcctcctactcgtaccttcagacgctaaatgctctagagcaatcaagaacccaaccaggggtggagaggcatctcaatgatggggattttgttcttttcaatcggcaaccaagtcttcataaaatgtctatcatggttttcagcatggcattcagtgttctctccgatggcgcaaggatacggaaatgctccgcgcatggaagaatgcaacggatcagcccgtggctgcagccattgtcaatttgatcatgccttctttactagaaaatacagttcgacttcacaatatataattgaacttttcaaatcatgtttgtaaaactaagttcatttttttgtttgtttaatttccatgactaggtactgtctggttgcaagcaatcagatggttggattgttcctaatgatttgggctctgaaagagatgaagaatgacattacaaaatctgaaggtgtcctgtgctgggaggggattaatgggctaccttggaaataaggtgaattttactctatcgtgatcaatcttgaacaatgcatgcaacctacacaagaaatcaacaagaaacatttaatttgatttaaacatatttggaatccagtggtaaagaaggtatttatttcaaagcttttcactgtgattcttattggcctttgcgctgtttctacagaatgatctgactcatcagttagctatgataatacgacataatgagaatttgtagacagtatgagggatcgccggaaaccatcttggaggatgagtaagcagccaccttgtttatgcactagctttcacggtttagttcccatcaccatgccattgcactgacgccttgcaattgttcatcttgtgcaattctcttttgttatgaggcacacatggattgtgtatttctaggagtattgaattaattgtaccagcaatcgtcttttgtgtgtattagttaggttgtgcatttgttgggaaatgccataattctttggagtttctatgtatcaccatatcaaatttgtttttccctaatcagggaactcaattggtaagcttttttttattattagctcaacgttagttattaatgggatattgtatgatgttttctttcttttcttttgcagttgtactgctcatctctttcgagaagatcacactgtcgcatttctaatgtttggagctttcttcacagtgcgagtaatagcaggagatcttccgatattggaatggctttgatgtctcattccttttatgtggtgttctttttttggcaatgagcacaaaaacaaggatattgaccagaaggacattgtcaatgtcatgccatgttgcatgccaacaaatttgaagtatgcaaaaatgttatgcaatgtcatgctttttcacctgacttgtttttttgttacttgtcagatttcgtcatgatcatatggaaaaatgttatgaagattactgagcagctcagcaaaacaggtgactaaacataggcactcaagagtgggctctcctctcgtgcgaccgcagcagagagccacggcctggccccggcagctatagcaggcaacagtccccacccgactttcctggcacccagccccagtagctgtaggcagcggcagcgcagtcgcctgccagtgccctctgctctcccagccaccctccagacaagatggtcagttgagctgatggcttatgccttccttgtggtcagtccacctgacatgagtcaatgctttgaggagatggctgctgctgcatctaataaaacttcatcctggcgctggcgcatgagctcctcgggcccagctatagtgatgccgtgctggagctcaatgcctcagatgacaggtttctgccaccgtgacctgattttgtatcagtttgcttttgaccggcactcaagcgggagacagctaggccctaactgacaagccccaaggtggccaggcaatgacgcaaggtcgtgtcaggacaacctacataacggctactggacagcttcaaggcagctagcgggctaggtaagggtgcaatgcgcaaggcagatcgatggtggccaaccctgccctttgccggctagaagcagcaggagaaatctccggtccaagggccaagaccacgctctaggggccaaggcaacacctgcaacagcctgcaactgcaatccttcactttaggaggcttcaggttttgggacctaccaactaaccgtatgaaaatatgatgataaatccctgcggttgatcactgatgcttcagtaagttctccaatttcaagggagaagtctcaagatttggaccccaatatgcgagacgaagttatctattcatctccaaattttgatcccaaagttttcctttcgtgggtccacaaagacacgagcgctgctgacttagaggctggtgctctcaccttgaaaactgatcccaaagggagaacacagcagaaaaaactattagtcaaggagaacttcgattgttttgtctcgtgcaaaactacaatagatgtgacactaaaaattagtggtgtggcaaatcgtgcatttgagcctctatttgagaggcaggcccaagctgaaaagatcagatctgttcagggaatgcttcaaagattccgaacactatttaacctaccaagtgcaatccgtgggaacattagaaaaggagaatatgatcttgctgtcagagagtaccaaaaagcaaagtcaattgtttttccttctcatgagcggtttgttaaaggagggaatgacttttagaccgtaataacttgtctacacttaagatttcctcccttttgacactacattttagctgctcactcggaagctttccatccctgctggagtactcagcccatacaggcttctcattcttatctgcatggcatgtaactgctgcacagcgcgctacggctggcgtagcggcagcaactgctggtatgaccaggatccgtccaccctcattatcgacgatgaagcgacacccaattctaggcgcggacgaacgatggcgccctcgtgcgggatatcgggctgagtgatgagacgctgctgttattggggtttcaggcgcgcctgaccgctcccactcctaggcccaacatgtctctccgacgctacctaccggtgccggtgaaacgcaaacttaaaatcgtgcattgcaagatcaagctcaagcggtcaacagatcaacttagacgaaatgcagatgcattgtaaatattgaggaagaccagattccctcatgttcatggagcaggtgaaaagaagtcaccagagacaattctggatcatgagactatgagaggactttggcaacaaatgttcggtttgggtttctctgggtggttctatgatactttataatttcttttggcttatgtgtcatatcagtagatatgaaaatagctaagcgttgtcaataatattagcttccttgtttcttgttaacctaagatgactgacctatttcacttgttttttctagctgtggtagtaggtcataagagtagttcccttcaatcctagcactcagccatgttgtaaatggtttatttctattgtgaatcgtgtttttcttttttactggtggggttagtggaaaatctggacgtatccgcgaatggtggagaagcacacaaaacaacaattatatgcaaaaactaaacaattatatgaatttagtaccttgataatcacattgattagagctcgtttgtatttatattaaaacataactgctcaggaggtgtatgaggaggaaacgagatgtgcaatgcgtgcaacagtaagtagactaccatcacttggttgctcttgaagtgtgcaagtgtgtctatggacttgtatggttctttggtttttgttgtttgctgaggtgtaaagtagga

SEQ ID NO: 31663 - DNA, 4097 bp, Zea Mays
atggctccattcctcagagggctcatcaggcgcttcctggcaagcaagatcagcaatccaagccccctgcctcccaatcggaatgcctcctactcgtaccttcagacgctaaatgctctagagcaatcaagaacccaaccaggggtggagaggcatctcaatgatggggattttgttcttttcaatcggcaaccaagtcttcataaaatgtctatcatggttttcagcatggcattcagtgttctctccgatggcgcaaggatacggaaatgctccgcgcatggaagaatgcaacggatcagcccgtggctgcagccattgtactgtctggttgcaagcaatcagatggttggattgttcctaatgatttgggctctgaaagagatgaagaatgacattacaaaatctgaaggtgtcctgtgctgggaggggattaatgggctaccttggaaataaggtgaattttactctatcgtgatcaatcttgaacaatgcatgcaacctacacaagaaatcaacaagaaacatttaatttgatttaaacatatttggaatccagtggtaaagaaggtatttatttcaaagcttttcactgtgattcttattggcctttgcgctgtttctacagaatgatctgactcatcagttagctatgataatacgacataatgagaatttgtagacagtatgagggatcgccggaaaccatcttggaggatgagtaagcagccaccttgtttatgcactagctttcacggtttagttcccatcaccatgccattgcactgacgccttgcaattgttcatcttgtgcaattctcttttgttatgaggcacacatggattgtgtatttctaggagtattgaattaattgtaccagcaatcgtcttttgtgtgtattagttaggttgtgcatttgttgggaaatgccataattctttggagtttctatgtatcaccatatcaaatttgtttttccctaatcagggaactcaattggtaagcttttttttattattagctcaacgttagttattaatgggatattgtatgatgttttctttcttttcttttgcagttgtactgctcatctctttcgagaagatcacactgtcgcatttctaatgtttggagctttcttcacagtgcgagtaatagcaggagatcttccgatattggaatggctttgatgtctcattccttttatgtggtgttctttttttggcaatgagcacaaaaacaaggatattgaccagaaggacattgtcaatgtcatgccatgttgcatgccaacaaatttgaaatttcgtcatgatcatatggaaaaatgttatgaagattactgagcagctcagcaaaacaggtgactaaacataggcactcaagagtgggctctcctctcgtgcgaccgcagcagagagccacggcctggccccggcagctatagcaggcaacagtccccacccgactttcctggcacccagccccagtagctgtaggcagcggcagcgcagtcgcctgccagtgccctctgctctcccagccaccctccagacaagatggtcagttgagctgatggcttatgccttccttgtggtcagtccacctgacatgagtcaatgctttgaggagatggctgctgctgcatctaataaaacttcatcctggcgctggcgcatgagctcctcgggcccagctatagtgatgccgtgctggagctcaatgcctcagatgacaggtttctgccaccgtgacctgattttgtatcagtttgcttttgaccggcactcaagcgggagacagctaggccctaactgacaagccccaaggtggccaggcaatgacgcaaggtcgtgtcaggacaacctacataacggctactggacagcttcaaggcagctagcgggctaggtaagggtgcaatgcgcaaggcagatcgatggtggccaaccctgccctttgccggctagaagcagcaggagaaatctccggtccaagggccaagaccacgctctaggggccaaggcaacacctgcaacagcctgcaactgcaatccttcactttaggaggcttcaggttttgggacctaccaactaaccgtatgaaaatatgatgataaatccctgcggttgatcactgatgcttcagtaagttctccaatttcaagggagaagtctcaagatttggaccccaatatgcgagacgaagttatctattcatctccaaattttgatcccaaagttttcctttcgtgggtccacaaagacacgagcgctgctgacttagaggctggtgctctcaccttgaaaactgatcccaaagggagaacacagcagaaaaaactattagtcaaggagaacttcgattgttttgtctcgtgcaaaactacaatagatggtatttgtgtagttgttagatacatccatattgcaaataaatgttcatgatcctgagtttatggacaatgttttgcatccccgtgtaaaacaattttttttctgacattgattcgaaattgagacagatagaggaagatcctgaaggtgtaggtactgctcacttgtattcagtgacactaaaaattagtggtgtggcaaatcgtgcatttgagcctctatttgagaggcaggcccaagctgaaaagatcagatctgttcagggaatgcttcaaagattccgaacactatttaacctaccaagtgcaatccgtgggaacattagaaaaggagaatatgatcttgctgtcagagagtaccaaaaagcaaagtcaattgtttttccttctcatgagcggtttgttaaaggagggaatgacttttagaccgtaataacttgtctacacttaaggtaaaaattgttgtcattactatgattacctcctttagtgtcgtaaactcagaataatcatagatccctttgttgcttacatattattcatgttctacaagctattgagattttgactagccgctacattttagtgcaggttttcataatttcttacctttatatctacattttagatttcctcccttttgacactacattttagctgctcactcggaagctttccatccctgctggagtactcagcccatacaggcttctcattcttatctgcatggcatgtaactgctgcacagcgcgctacggctggcgtagcggcagcaactgctggtatgaccaggatccgtccaccctcattatcgacgatgaagcgacacccaattctaggcgcggacgaacgatggcgccctcgtgcgggatatcgggctgagtgatgagacgctgctgttattggggtttcaggcgcgcctgaccgctcccactcctaggcccaacatgtctctccgacgctacctaccggtgccgcaagctcaagcggtcaacagatcaacttagacgaaatgcagatgcattgtaaatattgaggaagaccagattccctcatgttcatggagcaggtgaaaagaagtcaccagagacaattctggatcatgagactatgagaggactttggcaacaaatgttcggtttgggtttctctgggtggttctatgatactttataatttcttttggcttatgtgtcatatcagtagatatgaaaatagctaagcgttgtcaataatattagcttccttgtttcttgttaacctaagatgactgacctatttcacttgttttttctagctgtggtagtaggtcataagagtagttcccttcaatcctagcactcagccatgttgtaaatggtttatttctattgtgaatcgtgtttttcttttttactggtggggttagtggaaaatctggacgtatccgcgaatggtggagaagcacacaaaacaacaattatatgcaaaaactaaacaattatatgaatttagtaccttgataatcacattgattagagctcgtttgtatttatattaaaacataactgctcaggaggtgtatgaggaggaaacgagatgtgcaatgcgtgcaacagtaagtagactaccatcacttggttgctcttgaagtgtgcaagtgtgtctatggacttgtatggttctttggtttttgttgtttgctgaggtgtaaagtagga

SEQ ID NO: 31664 - DNA, 2654 bp, Zea Mays
gagaagatcacactgtcgcatttctaatgtttggagctttcttcacagtgcgagtaatagcaggagatcttccgatattggaatggctttgatgtctcattccttttatgtggtgttctttttttggcaatgagcacaaaaacaaggatattgaccagaaggacattgtcaatgtcatgccatgttgcatgccaacaaatttgaagtatgcaaaaatgttatgcaatgtcatgctttttcacctgacttgtttttttgttacttgtcagatttcgtcatgatcatatggaaaaatgttatgaagattactgagcagctcagcaaaacaggtgactaaacataggcactcaagagtgggctctcctctcgtgcgaccgcagcagagagccacggcctggccccggcagctatagcaggcaacagtccccacccgactttcctggcacccagccccagtagctgtaggcagcggcagcgcagtcgcctgccagtgccctctgctctcccagccaccctccagacaaatctgaaagtttccctttgtgggtcacaggatggtcagttgagctgatggcttatgccttccttgtggtcagtccacctgacatgagtcaatgctttgaggagatggctgctgctgcatctaataaaacttcatcctggcgctggcgcatgagctcctcgggcccagctatagtgatgccgtgctggagctcaatgcctcagatgacaggtttctgccaccgtgacctgattttgtatcagtttgcttttgaccggcactcaagcgggagacagctaggccctaactgacaagccccaaggtggccaggcaatgacgcaaggtcgtgtcaggacaacctacataacggctactggacagcttcaaggcagctagcgggctaggtaagggtgcaatgcgcaaggcagatcgatggtggccaaccctgccctttgccggctagaagcagcaggagaaatctccggtccaagggccaagaccacgctctaggggccaaggcaacacctgcaacagcctgcaactgcaatccttcactttaggaggcttcaggttttgggacctaccaactaaccgtatgaaaatatgatgataaatccctgcggttgatcactgatgcttcagtaagttctccaatttcaagggagaagtctcaagatttggaccccaatatgcgagacgaagttatctattcatctccaaattttgatcccaaagttttcctttcgtgggtccacaaagacacgagcgctgctgacttagaggctggtgctctcaccttgaaaactgatcccaaagggagaacacagcagaaaaaactattagtcaaggagaacttcgattgttttgtctcgtgcaaaactacaatagatgtgacactaaaaattagtggtgtggcaaatcgtgcatttgagcctctatttgagaggcaggcccaagctgaaaagatcagatctgttcagggaatgcttcaaagattccgaacactatttaacctaccaagtgcaatccgtgggaacattagaaaaggagaatatgatcttgctgtcagagagtaccaaaaagcaaagtcaattgtttttccttctcatctgctcactcggaagctttccatccctgctggagtactcagcccatacaggcttctcattcttatctgcatggcatgtaactgctgcacagcgcgctacggctggcgtagcggcagcaactgctggtatgaccaggatccgtccaccctcattatcgacgatgaagcgacacccaattctaggcgcggacgaacgatggcgccctcgtgcgggatatcgggctgagtgatgagacgctgctgttattggggtttcaggcgcgcctgaccgctcccactcctaggcccaacatgtctctccgacgctacctaccggtgccgcaagctcaagcggtcaacagatcaacttagacgaaatgcagatgcattgtaaatattgaggaagaccagattccctcatgttcatggagcaggtgaaaagaagtcaccagagacaattctggatcatgagactatgagaggactttggcaacaaatgttcggtttgggtttctctgggtggttctatgatactttataatttcttttggcttatgtgtcatatcagtagatatgaaaatagctaagcgttgtcaataatattagcttccttgtttcttgttaacctaagatgactgacctatttcacttgttttttctagctgtggtagtaggtcataagagtagttcccttcaatcctagcactcagccatgttgtaaatggtttatttctattgtgaatcgtgtttttcttttttactggtggggttagtggaaaatctggacgtatccgcgaatggtggagaagcacacaaaacaacaattatatgcaaaaactaaacaattatatgaatttagtaccttgataatcacattgattagagctcgtttgtatttatattaaaacataactgctcaggaggtgtatgaggaggaaacgagatgtgcaatgcgtgcaacagtaagtagactaccatcacttggttgctcttgaagtgtgcaagtgtgtctatggacttgtatggttctttggtttttgttgtttgctgaggtgtaaagtagga

SEQ ID NO: 31665 - DNA, 2113 bp, Zea Mays
gaagatcacactgtcgcatttctaatgtttggagctttcttcacagtgcgaatttcgtcatgatcatatggaaaaatgttatgaagattactgagcagctcagcaaaacaggtgactaaacataggcactcaagagtgggctctcctctcgtgcgaccgcagcagagagccacggcctggccccggcagctatagcaggcaacagtccccacccgactttcctggcacccagccccagtagctgtaggcagcggcagcgcagtcgcctgccagtgccctctgctctcccagccaccctccagacaaatctgaaagtttccctttgtgggtcacaggatggtcagttgagctgatggcttatgccttccttgtggtcagtccacctgacatgagtcaatgctttgaggagatggctgctgctgcatctaataaaacttcatcctggcgctggcgcatgagctcctcgggcccagctatagtgatgccgtgctggagctcaatgcctcagatgacagtaagttctccaatttcaagggagaagtctcaagatttggaccccaatatgcgagacgaagttatctattcatctccaaattttgatcccaaagttttcctttcgtgggtccacaaagacacgagcgctgctgacttagaggctggtgctctcaccttgaaaactgatcccaaagggagaacacagcagaaaaaactattagtcaaggagaacttcgattgttttgtctcgtgcaaaactacaatagatgtgacactaaaaattagtggtgtggcaaatcgtgcatttgagcctctatttgagaggcaggcccaagctgaaaagatcagatctgttcagggaatgcttcaaagattccgaacactatttaacctaccaagtgcaatccgtgggaacattagaaaaggagaatatgatcttgctgtcagagagtaccaaaaagcaaagtcaattgtttttccttctcatgagcggtttgttaaaggagggaatgacttttagaccgtaataacttgtctacacttaagatttcctcccttttgacactacattttagctgctcactcggaagctttccatccctgctggagtactcagcccatacaggcttctcattcttatctgcatggcatgtaactgctgcacagcgcgctacggctggcgtagcggcagcaactgctggtatgaccaggatccgtccaccctcattatcgacgatgaagcgacacccaattctaggcgcggacgaacgatggcgccctcgtgcgggatatcgggctgagtgatgagacgctgctgttattggggtttcaggcgcgcctgaccgctcccactcctaggcccaacatgtctctccgacgctacctaccggtgccgcaagctcaagcggtcaacagatcaacttagacgaaatgcagatgcattgtaaatattgaggaagaccagattccctcatgttcatggagcaggtgaaaagaagtcaccagagacaattctggatcatgagactatgagaggactttggcaacaaatgttcggtttgggtttctctgggtggttctatgatactttataatttcttttggcttatgtgtcatatcagtagatatgaaaatagctaagcgttgtcaataatattagcttccttgtttcttgttaacctaagatgactgacctatttcacttgttttttctagctgtggtagtaggtcataagagtagttcccttcaatcctagcactcagccatgttgtaaatggtttatttctattgtgaatcgtgtttttcttttttactggtggggttagtggaaaatctggacgtatccgcgaatggtggagaagcacacaaaacaacaattatatgcaaaaactaaacaattatatgaatttagtaccttgataatcacattgattagagctcgtttgtatttatattaaaacataactgctcaggaggtgtatgaggaggaaacgagatgtgcaatgcgtgcaacagtaagtagactaccatcacttggttgctcttgaagtgtgcaagtgtgtctatggacttgtatggttctttggtttttgttgtttgctgaggtgtaaagtagga

SEQ ID NO: 31666 - DNA, 1860 bp, Zea Mays
gaccagcgatcacctctggtgggtctccagtgagtcactgctcaccagtcaccgccatggccgggaagcagttcccctccccggcgcactcgcgctccgcctcagcctcctcccgccgactcctcgccgccgtcgccgcctccctcatactcctcacagcttcctacttcctcctcctctccccatcctcgcaccgatccgccccagccatcctcgcgaaccctagcgccaccacatccttcctcgcctccctcgaccgcttcctctccgatccgcatccctctgcctccgccgccgctcccgtagaacttgacgccgcgatccgggtccaggaggatgcccgtctctacggggaccccacatggcccgcgccggccgcggggctgctcagggtctacgtttacgagatgccgagcaagttcacgtacgatcttctgaggttgttcagggattcctaccgggacaccgacaacctcacgtccaatgggagccccgtgcaccgcctcatcgagcagcattctattgactactggctatgggcggatctcatcgcacttgattcacagagacttttgaagagtgttattagggttcagcagcaagaagaagccgacattttctatgtgccattcttcacgacaatcagttatttcttgctggagaaacaagaatgcaaggcactttatagggtctgggagcatctcttaagctttgaaatgggtcacagatcagcctgcttggcaacgttcagaaggcagggatcatgtcattcctgttcatcatccatggtcatttaagtcagtccggagatctgtcaagaaagcaatatggcttctacctgatatggactccaccgggaactggtataaacctggacaagtatatctagaaaaggatgtcatccttccatatgttccaaacgttgatctttgtgatcacaagtgtgtattagaaactcaatccaaaaggagtatattgctgttctttcgaggaagactgaagagaaatgctggaggaaagatccgcagtaaacttgtagaggaacttaaaagtgcaaaagacatagttatagaagaaggttctactggagctcagggaaaagcagcagctcaggatggcatgcgcaagtctttcttttgcttgagtccggctggggataccccatcttctgctcgcctgtttgatgcaatcgttagtggttgtatcccagttataattagtgatgaactggagcttccatttgaaggaatacttgactatagggagatagcattgtttgtttcagcaagtgatgctgtgcaaccgggctggctcttgaaatacctaagaggaatcaatgccaaaagaataagagaaattcagtctaatcttgtgaagtattcaagacattttctgtattcaagtcctgcccaacctctcggaccagaagaccttacatggagaatgattgctggtaagctggtaaatatcaagttgcagattcggcgttctcaacgtttggtcaaagagtcaaggagcatatgtacatgtgaatgtagagttgggaacaccacgagaatgctttgaccaatattttcatttgtgcctttaaacttttgtagcatagccgttttttgttaccaatgaggcgagctttgagtttggcaaaatttgccgatgtatttgtaaatgcaactgagctggaaagagttgtgatactgtactaatcccgatgcttgtgtttgctttactgcccgttaggaacaaaaggaatgtaaaacagagaaatgtaaaaaaaaatcaagagcttgaagtagatatttatttcctccatttcatgaatgaaagtaaaggtctgtttggtttgtggctaaatatgcc

SEQ ID NO: 31667 - DNA, 3088 bp, Zea Mays
gaccagcgatcacctctggtgggtctccagtgagtcactgctcaccagtcaccgccatggccgggaagcagttcccctccccggcgcactcgcgctccgcctcagcctcctcccgccgactcctcgccgccgtcgccgcctccctcatactcctcacagcttcctacttcctcctcctctccccatcctcgcaccgatccgccccagccatcctcgcgaaccctagcgccaccacatccttcctcgcctccctcgaccgcttcctctccgatccgcatccctctgcctccgccgccgctcccgtagaacttgacgccgcgatccgggtccaggaggatgcccgtctctacggggaccccacatggcccgcgccggccgcggggctgctcagggtctacgtttacgagatgccgagcaagttcacgtacgatcttctgaggttgttcagggattcctaccgggacaccgacaacctcacgtccaatgggagccccgtgcaccgcctcatcgagcagcattctattgactactggctatgggcggatctcatcgcacttgattcacagagacttttgaagagtgttattagggttcagcagcaagaagaagccgacattttctatgtgccattcttcacgacaatcagttatttcttgctggagaaacaagaatgcaaggcactttatagggtctgggagcatctcttaaggaagctttgaaatgggtcacagatcagcctgcttggcaacgttcagaaggcagggatcatgtcattcctgttcatcatccatggtcatttaagtcagtccggagatctgtcaagaaagcaatatggcttctacctgatatggactccaccgggaactggtataaacctggacaagtatatctagaaaaggatgtcatccttccatatgttccaaacgttgatctttgtgatcacaagtgtgtattagaaactcaatccaaaaggagtatattgctgttctttcgaggaagactgaagagaaatgctggaggaaagatccgcagtaaacttgtagaggaacttaaaagtgcaaaagacatagttatagaagaaggttctactggagctcagggaaaagcagcagctcaggatggcatgcgcaagtctttcttttgcttgagtccggctggggataccccatcttctgctcgcctgtttgatgcaatcgttagtggttgtatcccagttataattagtgatgaactggagcttccatttgaaggaatacttgactatagggaggtaaagatggcaatccgagcagcttttaatatcattcactaatgtcatacattgatcaatctcttctcatagttagtagtaactagtaaggtatttcaggataggcacaaacccaaaatttgatttgctgcaaagaaaatgagggaccttttggtagttgtgccccttaatctaaagaaacactgtatctcagtacccttaacagtagaatttaaaaccggtggttgcatatttattgataaatcaatagttctggtattctgttctccatggctactgatgatttaaaagttagacagtagtgatctctttcttctgacatttatagacctcaggtatgatcagttctttaaggagccgataaaatatagctcaactggtcaaattatcctcatgtagctatggtgcggacgtgcggtgctttatctctttatttaattattttaattgcatgttttattagctagttattggagtggttaaaagtgggatcacgggaaattgcagtacttttactgctgctagagtcttgccgttgagagtgaacttatttggttctccagcaagagcaaatacttttttagtaaaagtgagttaaccttagaaggttggtttttaggctaagtgacctttaatattttagtcactaagtatccctaacgagctaaggctagctgagatccaaaagtaccctacccttggttttgtgctccagtaagccctttaggctagaagcttctttaatattttagttactgataaattttctgctgtaggggtttcccctacagtttcctggtcaaaaaaaatattttagttactgtgaaaaatcactatacctcaggattgtttccttgctatgcacttgtattgtgatgtaatgaataaggtgttagttgtaatggtcactatcaacaaacgggagatgtatgtatattggcgatactgatctagagtacactaatgacaacatgcctatcactacactgtaaagcaaactattgtatgctatgtggatgcagcagattatgattgcagtatgctggaactgcaatatcacagtgtcaaggtttcttttagccttgtggctgactggctgtagcagatagccagatatttcattgcatctaaccatttctcatgtccatttaagctgctgttgtttacaacacctttgtactctagcttgaatctgcaatgcgattgatgagctttattgtgcagatagcattgtttgtttcagcaagtgatgctgtgcaaccgggctggctcttgaaatacctaagaggaatcaatgccaaaagaataagagaaattcagtctaatcttgtgaagtattcaagacattttctgtattcaagtcctgcccaacctctcggaccagaagaccttacatggagaatgattgctggtaagctggtaaatatcaagttgcagattcggcgttctcaacgtttggtcaaagagtcaaggagcatatgtacatgtgaatgtagagttgggaacaccacgagaatgctttgaccaatattttcatttgtgcctttaaacttttgtagcatagccgttttttgttaccaatgaggcgagctttgagtttggcaaaatttgccgatgtatttgtaaatgcaactgagctggaaagagttgtgatactgtactaatcccgatgcttgtgtttgctttactgcccgttaggaacaaaaggaatgtaaaacagagaaatgtaaaaaaaaatcaagagcttgaagtagatatttatttcctccatttcatgaatgaaagtaaaggtctgtttggtttgtggctaaatatgcc

SEQ ID NO: 31668 - DNA, 1368 bp, Zea Mays
agcgaagctactgctttcagaaatatggcattttgactacattctattgactactggctatgggcggatctcatcgcacttgattcacagagacttttgaagagtgttattagggttcagcagcaagaagaagccgacattttctatgtgccattcttcacgacaatcagttatttcttgctggagaaacaagaatgcaaggcactttatagggaagctttgaaatgggtcacagatcagcctgcttggcaacgttcagaaggcagggatcatgtcattcctgttcatcatccatggtcatttaagtcagtccggagatctgtcaagaaagcaatatggcttctacctgatatggactccaccgggaactggtataaacctggacaagtatatctagaaaaggatgtcatccttccatatgttccaaacgttgatctttgtgatcacaagtgtgtattagaaactcaatccaaaaggagtatattgctgttctttcgaggaagactgaagagaaatgctggaggaaagatccgcagtaaacttgtagaggaacttaaaagtgcaaaagacatagttatagaagaaggttctactggagctcagggaaaagcagcagctcaggatggcatgcgcaagtctttcttttgcttgagtccggctggggataccccatcttctgctcgcctgtttgatgcaatcgttagtggttgtatcccagttataattagtgatgaactggagcttccatttgaaggaatacttgactatagggagatagcattgtttgtttcagcaagtgatgctgtgcaaccgggctggctcttgaaatacctaagaggaatcaatgccaaaagaataagagaaattcagtctaatcttgtgaagtattcaagacattttctgtattcaagtcctgcccaacctctcggaccagaagaccttacatggagaatgattgctggtaagctggtaaatatcaagttgcagattcggcgttctcaacgtttggtcaaagagtcaaggagcatatgtacatgtgaatgtagagttgggaacaccacgagaatgctttgaccaatattttcatttgtgcctttaaacttttgtagcatagccgttttttgttaccaatgaggcgagctttgagtttggcaaaatttgccgatgtatttgtaaatgcaactgagctggaaagagttgtgatactgtactaatcccgatgcttgtgtttgctttactgcccgttaggaacaaaaggaatgtaaaacagagaaatgtaaaaaaaaatcaagagcttgaagtagatatttatttcctccatttcatgaatgaaagtaaaggtctgtttggtttgtggctaaatatgcc

SEQ ID NO: 31669 - DNA, 1569 bp, Zea Mays
aacccttcgtcttctagatcctgcaccgggagagggcgaataaggtttttgggaagcgtcttcacgcgactgctcgtgatctgctgacctcgtcgaccctgctgatttcgctacttcgacatcgtcgaccctgctgattccggcgcgtgccatcgatcagtaagtctaatcagtacgcatcatctgatttggcttgttatctcagttattctgatttggtcatgatttatagtcggaatttagattggaatttgtctaattattcaacagcggctccccgcgaagaccttcggcggaggctacggcgctaggcgcaccagtagcgcgaagcgaagggcgccgaggagagctgcggtggtgcggtgcgggctgctgtccgtggacccgtgggtgccgacgatggactcccagagtgtggcatcacaactctttgccgtctcgctcttcccctacctgggcttacgctctcccaaagcgagacagagaaggtccaagaccgcgcccgggctcacgctcttcggtttctacttcctcctcgtcttcgtcagcgccaccacaaaagttcattatggtaccttgctgtccaacgttgactggctgcacgggggcgctgaatcgctgctgactctcaccaacctgtttatcgttttggggctgaggagagccctgaggaagctggaggaagagggcacagacgagagcgtttctgaagcttctcaagacagtgcagaaaaaagttatgtctagatgggttcatcatcagtacccctgatggtgcactcagtattctaggagtgcgtggttttttttcttctgaagctcaactagcttgtagtgatgctttgggtgtaaggaaatctggcagatctactctgtgcatattatgctgataagaaaacaatgtacaagcatctcctgcaattctgatgagacaccgtccctctcgccatgcgcccccacgcccaccactctcgctcatcaccgctcgatctgaggaaggcggagcgcgtgatagatgcgggttctggcagattcgcgaggaggctgtagtggttaggttctggtgtcccctggcccggccgatcgtgggagatgagctcctcgtccgtggccagcatcgggcagcgtcgtctgcgccgtcgtcggaggaagattatgaagaagacctgtcctaatgacttgtggatctatgtcgagggccaagatgttgttgacatggagaatgtgtcaagtgagaagctcaggtcaggtggcagttcgtgtacacaagcaagctccctccggttgacttcatcttcatttattttgattacaacataaaatgactgtgatgcctcctctccgaagaccttcagccagtgttgggtgcctagctccagttaatctaatgcctccgtgttctccattttcatgttttactcaagctttataaacttatttagcgaccacatgaattatgtccatcttttattaggtgaacacccaagctgctgcagattgattgcatcaatccaaagaatttaaaatactatgtcgttattgtttagtatatggcatggcttaatgccg

SEQ ID NO: 31670 - DNA, 1825 bp, Zea Mays
aacccttcgtcttctagatcctgcaccgggagagggcgaataaggtttttgggaagcgtcttcacgcgactgctcgtgatctgctgacctcgtcgaccctgctgatttcgctacttcgacatcgtcgaccctgctgattccggcgcgtgccatcgatcagtaagtctaatcagtacgcatcatctgatttggcttgttatctcagttattctgatttggtcatgatttatagtcggaatttagattggaatttgtctaattattcaacagcggctccccgcgaagaccttcggcggaggctacggcgctaggcgcaccagtagcgcgaagcgaagggcgccgaggagagctgcggtggtgcggtgcgggctgctgtccgtggacccgtgggtgccgacgatggactcccagagtgtggcatcacaactctttgccgtctcgctcttcccctacctgggcttacgctctcccaaagcgagacagagaaggtccaagaccgcgcccgggctcacgctcttcggtttctacttcctcctcgtcttcgtcagcgccaccaaatattatgccagtgccattaatcgtttccatcttgtttcatgcaccggtttttatccctggagcagtacctgctgggatttatggtaatggtgccgtagatttttttgtcatccttattatattcttgctcatacacaccgtgtgcacttaattgatacaatgataatccgttgcagcaaaagttcattatggtaccttgctgtccaacgttgactggctgcacgggggcgctgaatcgctgctgactctcaccaacctgtttatcgttttggggctgaggagagccctgaggaagctggaggaagagggcacagacgagagcgtttctgaagcttctcaagacagtgcagaaaaaagttatgtctagatgggttcatcatcagtacccctgatggtgcactcagtattctaggagtgcgtggttttttttcttctgaagctcaactagcttgtagtgatgctttgggtgtaaggaaatctggcagatctactctgtgcatattatgctgataagaaaacaatgtacaagcatctcctgcaattctgatgagacaccgtccctctcgccatgcgcccccacgcccaccactctcgctcatcaccgctcgatctgaggaaggcggagcgcgtgatagatgcgggttctggcagattcgcgaggaggctgtagtggttaggttctggtgtcccctggcccggccgatcgtgggagatgagctcctcgtccgtggccagcatcgggcagcgtcgtctgcgccgtcgtcggaggaagattatgaagaagacctgtcctaatgacttgtggatctatgtcgagggccaagatgttgttgacatggagaatgtgtcaagtgagaagctcaggtcaggtggcagttcgtgtacacaagcaagctccctccggttgacttcatcttcatttattttgattacaacataaaatgactgtgatgcctcctctccgaagaccttcagccagtgttgggtgcctagctccagttaatctaatgcctccgtgttctccattttcatgttttactcaagctttataaacttatttagcgaccacatgaattatgtccatcttttattaggtgaacacccaagctgctgcagattgattgcatcaatccaaagaatttaaaatactatgtcgttattgtttaggtaagctttaacatatcaatgtaccatttaaaatttatatatatcatgtttatattgatgtaatatatattcttgcagtatatggcatggcttaatgccg

SEQ ID NO: 31671 - DNA, 2115 bp, Zea Mays
gaaaggtagatattttttcccgtctcgctcaatgattcaccccatcgcagccatcgatcagaaaatttacggctcataattctcgtctgcttatccgctcccttctctccctcaacttcagcaagttccccgcaaaaccgcagccggaggtcgccggtcgccaccaccaatggggccacccgccatggcgttccaagccctcaccctcacgccactccccttctcactccacagctcgagccgccgcgtccgcgtgcttgccgttgcggccgaccagactcctccgcccgcccccccttcggagccggcgaacagccctagccgcctccttcgcgagctcgcgcagcggaagaaggccgtatcccctaagaagaagcatccgccgcgtcgcttcatcctgaagccacctctcgatgacgagcgccttacccggcggttcctcagcagcccgcagctgtcgctcaaggcgctcccgctgctctcttcctgcctcccctccgcgccgctctccaccgccgacaggacctggatggacgagtacctcctcgaggccaagcaggcgctcgggtacccgctcgcgccctcggagacgctcggcgaaggcgatgactgccccgcgcgtcatttcgatgtgctgttctacctcgcgttccagcatctggacccctctagcgagcgcacgcggatgcggcacgtacggaacggccactccaggctctggttcctgggtcagtacgttctggagctcgcgttctgcgagttcttcttgcagaggtaccccagggagtcacctgggccgatgagggagcgggtgttcgctctaattgggaagaaagtgttgccccgatggctcaaggcggccagcctgcacaatttggtcttcccctatgatgatttggataagatgatacgaaaggaccgggagccaccgtccaaggctgtattctgggcaatatttggagctatatatttgtgctttggaatgcctgaagtctatcgtgtcctttttgaggcatttgggatggatccagatgatgagagctgtcagccaaaattgcgtcgtcaactagaggatgttgattatgtttcagtggagttcgaaaagaggcagctcacttggcaggatgttgctgcctacaggccgccaccggatgctctttttgctcatcctaggcttttccgagcttgtgtgccaccaggcatgcatcggttcagaggaaatatttgggattttgacagtagacccaaggtcatgactaccctaggatatcccttgcccatgaatgacagaattccagaaatcacagaagcaaggaatatagagcttggacttggtcttcagctgtgttttttgcacccatcaaaacataagtttgagcatccaagattttgttatgagcggcttgaatacgtcggccagaaaattcaggcaggtggctggcggagaagcatcggaggacgttgatgaacaagtattgtggacggtacctgcgggacaagcacctgcagcactacattatctacggggagacagtgcaagacagattcgaacacaatcgacgtctaaggaatccttcaacgacctctgtccagcaagcgctacatgggcttgcatactgtgtgtatggcaaacctgacgtgcggcgtttgatgttcgaggtgtttgacttcgaacaggtccagcctaaagcagtctgaggatcttctccattggtaccgatgctagagttgctgaatgctgaccaacaagaccccaatggcagtggtacaaatgctgtagattcttgaagtcgtccattcgacaggagatctttcgattctgaagcctgaagccctgaaccctgagctgggacagctgattagccactgggtcctgtctctcctgaaaccgtcactgttccaaccttcttgtccgtcggaaatggtagactagtgatgatgtggatcggaggctgctgttgtttgaacttacaattttgataattcgttgtaaattcctgtttgggcagaaacgcaaatagcagcagcatggcagattcatttcctatcagaattgtagtccgtaatcgagaagcagtaagatgaataatataaagatattcattcgtccgccac

SEQ ID NO: 31672 - DNA, 1525 bp, Zea Mays
gggagttaatccccgctggggaattccccattgacatctctagttccatccatgtcaggagttgacacagatttgttttcctatttgtagcctatttcccctcatataaatactacagaagcagcaacagctgcaacaagaattgaccctcagtcgctagaacagcaaacgggagcacagccaaatatggtggcattaccaactggtaacatcgagaactggggagagtcagctatggctggtagccctatgactgacacatctacagatccagacactgatgagaggaaccagatgtttgaacaaggacttgttgctgtccccacagcttctgattctagtgacaaatcaagggacaaactagatcagaagacacttcggcgtcttgcccaaaatcgtgaagctgcccggaaaagccgtttacgaaagaaggcatacatccaaaaccttgagagtagcagattgaaacttactcagttagagcaagagcttcaccagactcgtcaacagggtatttttatttctacatcaggagatcaacctcaatcaacaagcggaaatggagctttggcatttgacatggagtatgcacgctggttggaagagcacaacaaacatgtaaatgagttgaggcttgcagtcaatgcacatgccggtgataatgatctccgtggtattgttggtagtgttatggcacactacgatgaatttttcaggctcaagggtgtggcagctagatcagatgtttttcatgtgctgtctgggatgtggaagacccctgctgagagatgtttcatgtggttaggtggcttccgatcatctgaggttcttaagcagtcctcccaacaagctgaagatgctctttctcaagggatggaagcattacaacagtcgcttgcagaaactctagcatctggatccctgggccctgctggaccttctggcaatgttgcaaattacatgggacaaatggcgatggctatgggaaaacttggcaccctagagaactttctacgacaggctgataatctacggctgcaaacacttcaacaaatgcaacgcatctttaaccacccgacaatccgcacgagccctacttgcaataagcgactacttctctcggctgcgtgctttgagttctctttggcttgcccgtccagggaataaattcaatttaactcataaataggatttttttttgtactgtctctagtatgtcaattagtttcttcacattgctcatgtgttgatgggatatttggatctaagatcttatgaatggatgacatgtatgtgttcaagtgaacgctcagttcatattttaggccatcatgggttaattttggagaaaaaacgagttgtaaatacatctggaataatctaagatcttatgaagggatgatattggaggataagatcgatgaacaaataatgcaacatcactgttgggtgatacgacacgatttatatctgaactaaacagctggatatctgtttgcaaagttatgttcttccaaagaatcac

SEQ ID NO: 31673 - DNA, 2250 bp, Zea Mays
gggagttaatccccgctggggaattccccattgacatctctagttccatccatgtcaggagttgacacagatttgttttcctatttgtagcctatttcccctcatataaatactacagaagcagcaacagctgcaacaagaattgaccctcagtcgctagaacagcaaacgggagcacagccaaatatggtggcattaccaactggtaacatcgagaactggggagagtcagctatggctggtagccctatgactgacacatctacagatccagacactgatgagaggaaccagatggtagtgaccattctcagttcactcctttcttgttctgttctattagatgaataagatatatgcttgacttatgcagaatattcatactaaggtttgctgttttggaggtctgttgtgcctgtgaagaatgtttgatttcacaacgtgcatgtttattatttgatttcattcatacgcataaataccttgaacgaagtgtaggcattaaggttctcttgcacgaataatatggttgcgcattggataaaaccattgcatatacaagtatggtttgctcctaatctttgacgaactatgcatgactgttggtcaatgtctagctgctggcaggattcttttatatttggaagcctggtgtatgttcataatcatcatccttaacaaagtgattgtttgaattactcttgccatttaacacactaaatggatttcttgtttgaaataatgcttcagtgtttatatgcttatctttttgtaacattgatcagcatatagtaaggctatgtttggaagcaacccagtttttaagaaaccattttttatcttttagctaggagagatcaagattcttggtttttaagaaactgataatctaatttctataaactgagtcataaactggtatgtttggaaccatcacaatttctataaaccagtttcttaaaaaccggatgcttccaaacagggcctaaagtatcccagtttactaattatatgcctatcagtttgaacaaggacttgttgctgtccccacagcttctgattctagtgacaaatcaagggacaaactagatcagaagacacttcggcgtcttgcccaaaatcgtgaagctgcccggaaaagccgtttacgaaagaaggcatacatccaaaaccttgagagtagcagattgaaacttactcagttagagcaagagcttcaccagactcgtcaacagggtatttttatttctacatcaggagatcaacctcaatcaacaagcggaaatggagctttggcatttgacatggagtatgcacgctggttggaagagcacaacaaacatgtaaatgagttgaggcttgcagtcaatgcacatgccggtgataatgatctccgtggtattgttggtagtgttatggcacactacgatgaatttttcaggctcaagggtgtggcagctagatcagatgtttttcatgtgctgtctgggatgtggaagacccctgctgagagatgtttcatgtggttaggtggcttccgatcatctgaggttcttaagcagtcctcccaacaagctgaagatgctctttctcaagggatggaagcattacaacagtcgcttgcagaaactctagcatctggatccctgggccctgctggaccttctggcaatgttgcaaattacatgggacaaatggcgatggctatgggaaaacttggcaccctagagaactttctacgacaggctgataatctacggctgcaaacacttcaacaaatgcaacgcatctttaaccacccgacaatccgcacgagccctacttgcaataagcgactacttctctcggctgcgtgctttgagttctctttggcttgcccgtccagggaataaattcaatttaactcataaataggatttttttttgtactgtctctagtatgtcaattagtttcttcacattgctcatgtgttgatgggatatttggatctaagatcttatgaatggatgacatgtatgtgttcaagtgaacgctcagttcatattttaggccatcatgggttaattttggagaaaaaacgagttgtaaatacatctggaataatctaagatcttatgaagggatgatattggaggataagatcgatgaacaaataatgcaacatcactgttgggtgatacgacacgatttatatctgaactaaacagctggatatctgtttgcaaagttatgttcttccaaagaatcac

SEQ ID NO: 31674 - DNA, 1384 bp, Zea Mays
agcacagccaaatatggtggcattaccaactggtaacatcgagaactggggagagtcagctatggctggtagccctatgactgacacatctacagatccagacactgatgagaggaaccagatgcttctgattctagtgacaaatcaagggacaaactagatcagaagacacttcggcgtcttgcccaaaatcgtgaagctgcccggaaaagccgtttacgaaagaaggcatacatccaaaaccttgagagtagcagattgaaacttactcagttagagcaagagcttcaccagactcgtcaacagggtatttttatttctacatcaggagatcaacctcaatcaacaagcggaaatggagctttggcatttgacatggagtatgcacgctggttggaagagcacaacaaacatgtaaatgagttgaggcttgcagtcaatgcacatgccggtgataatgatctccgtggtattgttggtagtgttatggcacactacgatgaatttttcaggctcaagggtgtggcagctagatcagatgtttttcatgtgctgtctgggatgtggaagacccctgctgagagatgtttcatgtggttaggtggcttccgatcatctgaggttcttaagttactggcaggtcacctagagcctcttactgatcagcagcttgttggtatatccaacctgcagcagtcctcccaacaagctgaagatgctctttctcaagggatggaagcattacaacagtcgcttgcagaaactctagcatctggatccctgggccctgctggaccttctggcaatgttgcaaattacatgggacaaatggcgatggctatgggaaaacttggcaccctagagaactttctacgacaggctgataatctacggctgcaaacacttcaacaaatgcaacgcatctttaaccacccgacaatccgcacgagccctacttgcaataagcgactacttctctcggctgcgtgctttgagttctctttggcttgcccgtccagggaataaattcaatttaactcataaataggatttttttttgtactgtctctagtatgtcaattagtttcttcacattgctcatgtgttgatgggatatttggatctaagatcttatgaatggatgacatgtatgtgttcaagtgaacgctcagttcatattttaggccatcatgggttaattttggagaaaaaacgagttgtaaatacatctggaataatctaagatcttatgaagggatgatattggaggataagatcgatgaacaaataatgcaacatcactgttgggtgatacgacacgatttatatctgaactaaacagctggatatctgtttgcaaagttatgttcttccaaagaatcac

SEQ ID NO: 31675 - DNA, 1695 bp, Zea Mays
ttgaggctgcaggcagatataggttctgagaaactggtatcgaaagccatgaagtatgtcagacggctttactacgcttgtccctctgaggtggtctctgttctattggatcttatggaactggatgctgcaggctttgaaagcagtgacatgcaagaaactgatagtttgtctgttaaccactcatctgacactcaattatcaatcagtgacatgaaaactatcatactgaaactttcagagaaggaaccaagactgctgcttagtgtactaaagtctgtaattgaaatgattgacgccaaggaagatctcgcatataaagatgaatctcgttcgtgtctgccagctgggccatccaaagcgaaaggattatgtcccttggttctatggcttgtcacaaacattaaagagcataaggattcaggctacattggacttgttcacgagaaaggggtactttcttcagacaagaatgcaatccctcatttttgccttgcaaaacttctgcagaagttattgaatctatccactacaagtgaaagatatctcatagacgcagcatggttgttgattgaaatggtcaacgatagtaatacgaaggagaaattgaggaaacttcctgtgttgtctctgggaaggatggctaaatcttcttccctcccagattcaagaaccatatgcaacgaacagggatcagttgaaaacgcaacagagacactcgaattattcaaagtgcagttgaagaggcagaagaatggtggcactgaaggatcattcagtacgagcaccccaaagaaacatgacaggtggtccatagcaaaatcatggactccctgtccaataggaacagcaccctgttcatttagttcatgtgctgttcttcctgcctttgacagcatcggtcatgaacaaaattctacattagaacatgggacctttgaggaggttgatcattctgaaaggtttgagcctcagcccgaggagttggaggatgaaagcattctggaaatgccaaggtcatcaccagaaaatgaaatttcagacgttaaagaattgatgtgtcctttgaagggtagattgttggtcggtggcttttggaaaatggtagacgaagaggagctgctcttgataaaatcgaagatgaaaattttgttgtaatataatcttcaatggttgaggaccgggcgtagtccgggtggtgaaggcggcgaggtccccttgaccaggttggggggttcgacccccctgattgctcaccaaaaaatcccctcgtcctcacccacacctgggtgggcctttgcagtgtgggcagcctgtgagtcgacacgttagtgacaggagttgttggattcgggggtttctcgtcgggaccgttcgctgcgaccttctacccatgaaaagccacgagggtggtcttattaccctcccggtcgagttttaatcttcaatggttgtgaccaaacaatgttgtgggtcttgagtttcttcactatttgttctggttctcaaatttttgtttgttacttaggggtgtttgaatgcactaaaactaatagttagcagctaaaattagttgagacatccaaacatcctagctaatagttcaactattagctatttttagtaaattagttaatagttagagcatctccaagagactagctaaatagtttgtcaagctaaattttagctact

SEQ ID NO: 31676 - DNA, 2800 bp, Zea Mays
tccgctctactagtatctatcttcactgcatgcgttggtggttcgtttatgttaacccaccacccaccagcagcgcaacgcaagagcttcccattcccgtatcccgtccaccaaagccaaatctactacgccgcaccaaccgaatcggaagagtaaacaaaaaggcagcgtctgatccgacatgccgccggcacgttagaagacatgggcggaagccggatcggagcccccctcccctggcactggcagtgacacacgcacacgcgcatccgtccagatccaagtgcgtgccttttgggcctcaaaagcggagggggaggccactgcggcatcttgcaccatcagcgcagcgcagcgcggcacggcgaggagtctggacgaaggagcagccgagcaggaatcattccgctgcaaggctgccgtccgcgctactgcccccgctttccggggccgggcggacccgcgcccgcctgtcgtctcctatccagcctgcccgtgctcgggcgtgttcaccaccaccgccacaagggccggggagccctgccgcctttgctgattcggctgtacaacagcgcgctagccttttttttttttttactactgagagagatgcttcccctgctgcttatatccaccctcccggccttcacgctgctcctcgccgcgcccgccaccaaggcctgctgcaagctcgcgcgcgagctggccctcctcgcgctgctgctggcgacggagctgctgcgccacgccaccgccgccgccgccgccgcggggagcagggagcgggagcgaggcgccaggatgccgtccgcttcgtccaagccggcgcccgcattggcgtcggccccctcggccgaggcggagacgacggccgccgccgcagccgccgccgcggggctcccgctgctcgacctgccggagctcgcgctggaccgcgtcctggaggagctctcgccgtcgtcgctcgcggcgatggcgtgcgtgtgctccgcgctcagggaccgctgctccgcggacgcgctgtgggggcgtcacctgcggatcaagtgggggcgcgtgctcggcgccgcggcgcgcagggagtgggatgcggagctgggcggcaccgccagcggcagcggcgcccgcgcaggcgcgccgcgcccgacgacgcggcgcaggagctgggtcgactcgctggcctgcgcgtggcccttctcctcctggatcggctgccgctggctgctcgagggggatcacaacctcccctcgccagctgccgagtccacgcccgcccccgcccccgccgcgccgcgtacggacacggtggccgcgtggtaccgggcgctcgagtgcggcgagttctggttccccgcgcaggtgtacaaccgcgaggacgggcatgtcgggttcgtgctctcgtgctacgacgcgcacctccgctaccaccagcgaactgacaccttcaccgccaggtaaaccatccgtccggtagcagtttactgttgtgatcctgatccgaggacggctgaatcgacagcagacggagccattttactccgtgtactgtagccgtcgagctgagctcacatgtcgcatgagtaataaagcaacgggtatgggtatgggttggagaattattataggctgtgcaacattggcatgtgcatttaaaccatggaccgtgacatgtgtgctgataatggaatttgatgagatgtttcgggcttgaatcggcggtgactgactgactgacggtgcgcgattcggtctcgtcgacaggtatccaccgcacggccggaaggcggccaaggaggaggacggcgtaaagtggaacagggtccgcgcgccgccgctggccacgccggcgcacgacctgcacgcgtcggactgcctggaggagctgcgcccgggcgaccatttcgagatccagtggcgcaagaacaaggacttcccttatggctggtggtatggcgtcgtgggtcaccaggagtcgtgcaacgggaacgagcatttgtgtcgctgccaccaagacgacacggtcgtcctggagttccagcactacgcccccggctcccgatggaggcagaccactgtgggcaggaaagatcacagggagaagggggacgagacggacggcttctacggaggcatcaggaagctgcacaccaaagacgagatatcaacgtggcgacggttctggcccgtcgatgtcctcaactgaagtgaagatcgtattcgttatgcatctgcagactgcagccggtctgagcgcctccgttccaaatcccccgccccgtgtacagttacggagagctctctgcacacgcgtctgaaataactccggaacccttgtggttgtggggggtctgaaggatctattttttgctaggattcatggtgcacaagttttgctctgtccaagtttggtttagaagaacaggctgctacggatgatgtacaggtctatccagttttcgatctgaatttatgctgttgccatatcctggtttatgtgcatcataaatttcggaatccatcgcaatccgcccaatttcaagtttttgtctgatgctgccatttcctttgtcgtagccaatgtcctcaatggagtgtccgctggcgatgtcagctgcacggatagcgtgcgcgtgctgaatcttctccttgaatgatctcatcaggtgcctaaaatgttcaggaagtgagaagatttgtcaagtcttcagtctttgcgtacgaacggggctatgactaacttgccgattttttaaattaaccttcttccttttttttaaaaaaatcatgtttgtgtgtaaag

SEQ ID NO: 31677 - DNA, 2365 bp, Zea Mays
tccgctctactagtatctatcttcactgcatgcgttggtggttcgtttatgttaacccaccacccaccagcagcgcaacgcaagagcttcccattcccgtatcccgtccaccaaagccaaatctactacgccgcaccaaccgaatcggaagagtaaacaaaaaggcagcgtctgatccgacatgccgccggcacgttagaagacatgggcggaagccggatcggagcccccctcccctggcactggcagtgacacacgcacacgcgcatccgtccagatccaagtgcgtgccttttgggcctcaaaagcggagggggaggccactgcggcatcttgcaccatcagcgcagcgcagcgcggcacggcgaggagtctggacgaaggagcagccgagcaggaatcattccgctgcaaggctgccgtccgcgctactgcccccgctttccggggccgggcggacccgcgcccgcctgtcgtctcctatccagcctgcccgtgctcgggcgtgttcaccaccaccgccacaagggccggggagccctgccgcctttgctgattcggctgtacaacagcgcgctagccttttttttttttttactactgagagagatgcttcccctgctgcttatatccaccctcccggccttcacgctgctcctcgccgcgcccgccaccaaggcctgctgcaagctcgcgcgcgagctggccctcctcgcgctgctgctggcgacggagctgctgcgccacgccaccgccgccgccgccgccgcggggagcagggagcgggagcgaggcgccaggatgccgtccgcttcgtccaagccggcgcccgcattggcgtcggccccctcggccgaggcggagacgacggccgccgccgcagccgccgccgcggggctcccgctgctcgacctgccggagctcgcgctggaccgcgtcctggaggagctctcgccgtcgtcgctcgcggcgatggcgtgcgtgtgctccgcgctcagggaccgctgctccgcggacgcgctgtgggggcgtcacctgcggatcaagtgggggcgcgtgctcggcgccgcggcgcgcagggagtgggatgcggagctgggcggcaccgccagcggcagcggcgcccgcgcaggcgcgccgcgcccgacgacgcggcgcaggagctgggtcgactcgctggcctgcgcgtggcccttctcctcctggatcggctgccgctggctgctcgagggggatcacaacctcccctcgccagctgccgagtccacgcccgcccccgcccccgccgcgccgcgtacggacacggtggccgcgtggtaccgggcgctcgagtgcggcgagttctggttccccgcgcaggtgtacaaccgcgagcaggacgggcatgtcgggttcgtgctctcgtgctacgacgcgcacctccgctaccaccagcgaactgacaccttcaccgccaggtatccaccgcacggccggaaggcggccaaggaggaggacggcgtaaagtggaacagggtccgcgcgccgccgctggccacgccggcgcacgacctgcacgcgtcggactgcctggaggagctgcgcccgggcgaccatttcgagatccagtggcgcaagaacaaggacttcccttatggctggtggtatggcgtcgtgggtcaccaggagtcgtgcaacgggaacgagcatttgtgtcgctgccaccaagacgacacggtcgtcctggagttccagcactacgcccccggctcccgatggaggcagaccactgtgggcaggaaagatcacagggagaagggggacgagacggacggcttctacggaggcatcaggaagctgcacaccaaagacgagatatcaacgtggcgacggttctggcccgtcgatgtcctcaactgaagtgaagatcgtattcgttatgcatctgcagactgcagccggtctgagcgcctccgttccaaatcccccgccccgtgtacagttacggagagctctctgcacacgcgtctgaaataactccggaacccttgtggttgtggggggtctgaaggatctattttttgctaggattcatggtgcacaagttttgctctgtccaagtttggtttagaagaacaggctgctacggatgatgtacagccaatgtcctcaatggagtgtccgctggcgatgtcagctgcacggatagcgtgcgcgtgctgaatcttctccttgaatgatctcatcaggtgcctaaaatgttcaggaagtgagaagatttgtcaagtcttcagtctttgcgtacgaacggggctatgactaacttgccgattttttaaattaaccttcttccttttttttaaaaaaatcatgtttgtgtgtaaag

SEQ ID NO: 31678 - DNA, 1208 bp, Zea Mays
acattcgtatgttctccgcaagtccgcagcaagtgacttggtctagggatctctcgagcgcttcgagaaagtttcaggccctccgcccctgcaagcgtccactgaccagacctggccagcccaggcgtggaggtgctcgtctcctccgccgcgccgggaccggcgatgaacggcgggctccctggattccacaatgcgccggcgtcaaaggccgtggtcgtcgccgcaggtctcttctccgtcgcctttggcttccgcggccactccctcaacctcggccttgcctaccagagtgtttatgaaaagctgagtgtatggagactgatcacctcattgtttgctttttcgtcaacccccgagctgatctttggagcagccctgctgtactactttagagtgttcgaacgccaaataggttctaacaagtatgctgtcttcattatcttctcaaccatggtgtcagtactgcttcagatcctttctttaggttacatgaaagatccttctctaaatcctttgacatcaggaccatatggcctcatctttgcatcttatgtgccattcttctttgacattccaatctcaatgaagtttcgcatatttggactgagcttcagtgataagtcattcgtatatttggcaggactccagcttcttttctcatctggaagacgttccattgtgcctggactttctggcatactggctgggcttctgtatcgcctgaatacatttggcgtccgtaggttgaagttcccagagttggcaacatctctcttctcgcagttgtcattgcccttttcaagcaatccatatcaagggttaccgatcacagaaaatgatggaagcatcccttctcatcaggcacatcaaattgagctacccaagatcctacggagtcttctattgccgcactggtgactatgggctttgatcgcagtgcagcaattcaggcgcttgcattgaccaactacgatgtcaatttggcgtcgaacattctgcttgaagcacaagctctacagcaatgataccctggcatcgagtcacaaaagacgggcagatgcactgtacattaatgagcgttaagtgtttgatactccgattcattcttctgttctagattttatcacaggtttccttgaaacaagccactgtatatgaacgtgaactatgggaacgaaagacaattgatgcaggagctttctcaa

SEQ ID NO: 31679 - DNA, 1214 bp, Zea Mays
acattcgtatgttctccgcaagtccgcagcaagtgacttggtctagggatctctcgagcgcttcgagaaagtttcaggccctccgcccctgcaagcgtccactgaccagacctggccagcccaggcgtggaggtgctcgtctcctccgccgcgccgggaccggcgatgaacggcgggctccctggattccacaatgcgccggcgtcaaaggccgtggtcgtcgccgcaggtctcttctccgtcgcctttggcttccgcggccactccctcaacctcggccttgcctaccagagtgtttatgaaaagctgagtgtatggagactgatcacctcattgtttgctttttcgtcaacccccgagctgatctttggagcagccctgctgtactactttagagtgttcgaacgccaaataggttctaacaagtatgctgtcttcattatcttctcaaccatggtgtcagtactgcttcagatcctttctttaggttacatgaaagatccttctctaaatcctttgacatcaggaccatatggcctcatctttgcatcttatgtgccattcttctttgacattccaatctcaatgaagtttcgcatatttggactgagcttcagtgataagtcattcgtatatttggcaggactccagcttcttttctcatctggaagacgttccattgtgcctggactttctggcatactggctgggcttctgtatcgcctgaatacatttggcgtccgtaggttgaagagttggcaacatctctcttctcgcagttgtcattgcccttttcaagcaatccatatcaagggttaccgatcacagaaaatgatggaagcatcccttctcatcaggcacatcaaattgaggatgcacgcgcagctacccaagatcctacggagtcttctattgccgcactggtgactatgggctttgatcgcagtgcagcaattcaggcgcttgcattgaccaactacgatgtcaatttggcgtcgaacattctgcttgaagcacaagctctacagcaatgataccctggcatcgagtcacaaaagacgggcagatgcactgtacattaatgagcgttaagtgtttgatactccgattcattcttctgttctagattttatcacaggtttccttgaaacaagccactgtatatgaacgtgaactatgggaacgaaagacaattgatgcaggagctttctcaa

SEQ ID NO: 31680 - DNA, 1214 bp, Zea Mays
acattcgtatgttctccgcaagtccgcagcaagtgacttggtctagggatctctcgagcgcttcgagaaagtttcaggccctccgcccctgcaagcgtccactgaccagacctggccagcccaggcgtggaggtgctcgtctcctccgccgcgccgggaccggcgatgaacggcgggctccctggattccacaatgcgccggcgtcaaaggccgtggtcgtcgccgcaggtctcttctccgtcgcctttggcttccgcggccactccctcaacctcggccttgcctaccagagtgtttatgaaaagctgagtgtatggagactgatcacctcattgtttgctttttcgtcaacccccgagctgatctttggagcagccctgctgtactactttagagtgttcgaacgccaaataggttctaacaagtcttcattatcttctcaaccatggtgtcagtactgcttcagatcctttctttaggttacatgaaagatccttctctaaatcctttgacatcaggaccatatggcctcatctttgcatcttatgtgccattcttctttgacattccaatctcaatgaagtttcgcatatttggactgagcttcagtgataagtcattcgtatatttggcaggactccagcttcttttctcatctggaagacgttccattgtgcctggactttctggcatactggctgggcttctgtatcgcctgaatacatttggcgtccgtaggttgaagttcccagagttggcaacatctctcttctcgcagttgtcattgcccttttcaagcaatccatatcaagggttaccgatcacagaaaatgatggaagcatcccttctcatcaggcacatcaaattgaggatgcacgcgcagctacccaagatcctacggagtcttctattgccgcactggtgactatgggctttgatcgcagtgcagcaattcaggcgcttgcattgaccaactacgatgtcaatttggcgtcgaacattctgcttgaagcacaagctctacagcaatgataccctggcatcgagtcacaaaagacgggcagatgcactgtacattaatgagcgttaagtgtttgatactccgattcattcttctgttctagattttatcacaggtttccttgaaacaagccactgtatatgaacgtgaactatgggaacgaaagacaattgatgcaggagctttctcaa

SEQ ID NO: 31681 - DNA, 769 bp, Zea Mays
caggcgaaaatcaaagcccatgtacgtggacatcaggtaaggaaaagctatcggaaggtagcctggtctgttggcatcgtggagaaagtcatactgaggtggaggagaaagggaaggggtctgcgaggtttccaatctgagaaacaacttgaaggtccatcatggcagatccaacctgcaaaggctgaggctgaggatgaatatgacttcttgaaggatggcaggaaacaggctacaggcaggttggatagagcactggctcgtgtgcgttccatgaatcagtatcctgaagcaagagaccagtaccgcaggctgcaagcctgtgttaacagcctacgagagtcccaggcgatgcaggacaggatgctggctgattcaactggcaccgatgggggtgatttcatgactgaattggaggagctatgccgggatgatggcgatgccccgatgtcgactatttcttgacatggagcttactatagatcagttaggcagtgacatgttctttaccagactagatgtaatttgttgttactaaatggtctctactcaccgttgaacaccataatataatgatatagcagctaatacatggacttctacagattatgataattgatcagtataatttgtggaattattatattttaaagcaacctgaacatagagttcaacatagaactctttgtttgactgtaagcattacagtagatttttttctcaaatttgtattgcagattgagatgatacacagagttcaatatagaac

SEQ ID NO: 31682 - DNA, 2011 bp, Zea Mays
cctcgcaccgccggcgttcatcttccgctctctcccttactcgcgctcggcagtcggcacaggcgacggcggcggcgctcgggctctcagcgacggcggcagcggcttcccctctcgcctcgcgccctcgcctccggtcctccgcacaccggtcggtgaccctgtgtgcgtgcctctctctctcctcccccctctagtggatcgtcaacggcttccggccccggaggcttcgccgcgcgcggactgagggcagcgggagccagcagccgctgctccaccaaggcgatcgcgccgctttgagagctcatgccccaaagcgaagcgttacccatccttttagcgcttcagcaggctcaagggtgcgcttagtgctgccttttggaattatcgttcctggccaatttgtcatcagatcaccatacatgacaagggtcatccatgactccggagatggcatgcagaaggaggcacttgatttggtctcatctgatgttaactttcccaagggctgtttcccagactataggattggaccaaacaaccaaatcattgatccagaggaaacgcatgaggccgtacctctcaaggaggttgttgcaaaggaaacagcgcagctgctagagcagcacaggcgcctttctgtgcgtgatctcaaggagaagtttgagaagggtctatctagcgcttccaagctttctgaagaggctaagcgtcgagaagctgcttcattagacaggcaggttcttttgaagaagctcagagatgttttagacacactgaaaggtcgtgtggctggtcgaaataaagacgatgctgaggaagctatctcactggtggaggcactagctgtccagctgacacaacgagaaggggagttaatttatgagaaggctgaagtaaaaaaattggctaacttccttaagcaggctactgtagatgcacgcaaagtagctgaagaggaaagggctcttgcacttgctgaaattgaaaaggctagagctgcaatcgaaaaagtcgagaaagcatttcatgtgcatgattctacgaaaagcagcagagaggaggaaatagaagaacttaggaaagaggtccgagaggctaggaggataaaaatgctacaccagccaatcaaggtcatggacatggagtttgagcttcaggcactgcggactctcatctcacagaagactcagctatgcaatcagctaaataaagagttttgtattattcctcgagttgatggtgctccaaacattgcgaactgtccaattcagtggtatcgtgtaatttctggtggcagtagaggactcatatcgggagcaacaaaatttacgtatgccccagaaccgtttgatgttggtcgattattacaagcagagattattttgaatgcagataaaatcatagttcagacggatggccctatagataatgctgcaggacttgaacattatgtggactcactcatgaaacggacggatattgagttcaacgtagtagtaacccaaatgaatgggaaggattactcgtcgaattctgtccatgtttttcatattggaaagctgagaataaaacttcaaaaaggatggtctacaaaagcaagagagttatattccaccacgatgaagttatgtgggagccgtggtggtggtaatgctgcagctagggcagttttctggcaagctaggaaaggcctgtcctacactctagcattcgaaacagacagggacaggaatgctgcaattatgattgctcgcaaatttgcttcgaattgcaatatcgctctcgctggcccaggtgaccaagacacctgatgaagtgatcatgcgtgttttgacagagacactgtacataatcagcattagcgacgttctcgaaacgtgatgtacaaattgatcactgttcttgtgcgtcacatctgtaataatatcactgttcttatcgcttctttttgtaagtcaaatatatatatttttaaatttgttcctatatatataatatttatagcata

SEQ ID NO: 31683 - DNA, 2110 bp, Zea Mays
ccgctctctcccttactcgcgctcggcagtcggcacaggcgacggcggcggcgctcgggctctcagcgacggcggcagcggcttcccctctcgcctcgcgccctcgcctccggtcctccgcacaccggtcggtgaccctgtgtgcgtgcctctctctctcctcccccctctagtggatcgtcaacggcttccggccccggaggcttcgccgcgcgcggactgagggcagcgggagccagcagccgctgctccaccaaggcgatcgcgccgctttgagagctcatgccccaaagcgaagcgttacccatccttttagcgcttcagcaggctcaagggtgcgcttagtgctgccttttggaattatcgttcctggccaatttgtcatcagatcaccatacatgacaagggtcatccatgactccggagatggcatgcagaaggaggcacttgatttggtctcatctgatgttaactttcccaagggctgtttcccagactataggattggaccaaacaaccaaatcattgatccagaggaaacgcatgaggccgtacctctcaaggaggttgttgcaaaggaaacagcgcagctgctagagcagcacaggcgcctttctgtgcgtgatctcaaggagaagtttgagaagggtctatctagcgcttccaagctttctgaagaggctaagcgtcgagaagctgcttcattagacaggcaggttcttttgaagaagctcagagatgttttagacacactgaaaggtcgtgtggctggtcgaaataaagacgatgctgaggaagctatctcactggtggaggcactagctgtccagctgacacaacgagaaggggagttaatttatgagaaggctgaagtaaaaaaattggctaacttccttaagcaggctactgtagatgcacgcaaagtagctgaagaggaaagggctcttgcacttgctgaaattgaaaaggctagagctgcaatcgaaaaagtcgagaaagcatttcatgtgcatgattctacgaaaagcagcagagaggaggaaatagaagaacttaggaaagaggtccgagaggctaggaggataaaaatgctacaccagccaatcaaggtcatggacatggagtttgagcttcaggcactgcggactctcatctcacagaagactcagctatgcaatcagctaaataaagagttttgtattattcctcgagttgatggtgctccaaacattgcgaactgtccaattcagtggtatcgtgtaatttctggtggcagtagaggactcatatcgggagcaacaaaatttacgtatgccccagaaccgtttgatgttggtcgattattacaagcagagattattttgaatgcagataaaatcatagttcagacggatggccctatagataatggacttgaacattatgtggactcactcatgaaacggacggatattgagttcaacgtagtagtaacccaaatgaatgggaaggattactcgtcgaattctgtccatgtttttcatattggaaagctgagaataaaacttcaaaaaggatggtctacaaaagcaagagagttatattccaccacgatgaagttatgtgggagccgtggtggtggtaatgctgcagctagggcagttttctggcaagctaggaaaggcctgtcctacactctagcattcgaaacagacagggacaggaatgctgcaattatgattgctcgcaaatttgcttcgaattgcaatatcgctctcgctggcccaggtgaccaagacacctgatgaagtgatcatgcgtgttttgacagagacactgtacataatcaggtgtagattggctgatttttttgggagtctatttgtgtgcttgtgagggtagaggttgtacaccgcgtgacggtaatccccccttccatatatcttatggaggcattgtttttgtttgcctgtttgcagcattagcgacgttctcgaaacgtgatgtacaaattgatcactgttcttgtgcgtcacatctgtaataatatcactgttcttatcgcttctttttgtaagtcaaatatatatatttttaaatttgttcctatatatataatatttatagcata

SEQ ID NO: 31684 - DNA, 2163 bp, Zea Mays
ctcggcagtcggcacaggcgacggcggcggcgctcgggctctcagcgacggcggcagcggcttcccctctcgcctcgcgccctcgcctccggtcctccgcacaccggtcggtgaccctgtgtgcgtgcctctctctctcctcccccctctagtggatcgtcaacggcttccggccccggaggcttcgccgcgcgcggactgagggcagcgggagccagcagccgctgctccaccaaggcgatcgcgccgctttgagagctcatgccccaaagcgaagcgttacccatccttttagcgcttcagcaggctcaagggtgcgcttagtgctgccttttggaattatcgttcctggccaatttgtcatcagatcaccatacatgacaagggtcatccatgactccggagatggcatgcagaaggaggcacttgatttggtctcatctgatgttaactttcccaagggctgtttcccagactataggattggaccaaacaaccaaatcattgatccagaggaaacgcatgaggccgtacctctcaaggaggttgttgcaaaggaaacagcgcagctgctagagcagcacaggcgcctttctgtgcgtgatctcaaggagaagtttgagaagggtctatctagcgcttccaagctttctgaagaggctaagcgtcgagaagctgcttcattagacaggcaggttcttttgaagaagctcagagatgttttagacacactgaaaggtcgtgtggctggtcgaaataaagacgatgctgaggaagctatctcactggtggaggcactagctgtccagctgacacaacgagaaggggagttaatttatgagaaggctgaagtaaaaaaattggctaacttccttaagcagatgcacgcaaagtagctgaagaggaaagggctcttgcacttgctgaaattgaaaaggctagagctgcaatcgaaaaagtcgagaaagcatttcatgtgcatgattctacgaaaagcagcagagaggaggaaatagaagaacttaggaaagaggtccgagaggctaggaggataaaaatgctacaccagccaatcaaggtcatggacatggagtttgagcttcaggcactgcggactctcatctcacagaagactcagctatgcaatcagctaaataaagagcttgccacgatcaagaggttagaagtagatagttctgacctctttgagcttgaaggttctaatacccttggatcgcagttttgtattattcctcgagttgatggtgctccaaacattgcgaactgtccaattcagtggtatcgtgtaatttctggtggcagtagaggactcatatcgggagcaacaaaatttacgtatgccccagaaccgtttgatgttggtcgattattacaagcagagattattttgaatgcagataaaatcatagttcagacggatggccctatagataatgctgcaggacttgaacattatgtggactcactcatgaaacggacggatattgagttcaacgtagtagtaacccaaatgaatgggaaggattactcgtcgaattctgtccatgtttttcatattggaaagctgagaataaaacttcaaaaaggatggtctacaaaagcaagagagttatattccaccacgatgaagttatgtgggagccgtggtggtggtaatgctgcagctagggcagttttctggcaagctaggaaaggcctgtcctacactctagcattcgaaacagacagggacaggaatgctgcaattatgattgctcgcaaatttgcttcgaattgcaatatcgctctcgctggcccaggtgaccaagacacctgatgaagtgatcatgcgtgttttgacagagacactgtacataatcaggtgtagattggctgatttttttgggagtctatttgtgtgcttgtgagggtagaggttgtacaccgcgtgacggtaatccccccttccatatatcttatggaggcattgtttttgtttgcctgtttgcagcattagcgacgttctcgaaacgtgatgtacaaattgatcactgttcttgtgcgtcacatctgtaataatatcactgttcttatcgcttctttttgtaagtcaaatatatatatttttaaatttgttcctatatatataatatttatagcata

SEQ ID NO: 31685 - DNA, 2112 bp, Zea Mays
cggcagtcggcacaggcgacggcggcggcgctcgggctctcagcgacggcggcagcggcttcccctctcgcctcgcgccctcgcctccggtcctccgcacaccggtcggtgaccctgtgtgcgtgcctctctctctcctcccccctctagtggatcgtcaacggcttccggccccggaggcttcgccgcgcgcggactgagggcagcgggagccagcagccgctgctccaccaaggcgatcgcgccgctttgagagctcatgccccaaagcgaagcgttacccatccttttagcgcttcagcaggctcaagggtgcgcttagtgctgccttttggaattatcgttcctggccaatttgtcatcagatcaccatacatgacaagggtcatccatgactccggagatggcatgcagaaggaggcacttgatttggtctcatctgatgttaactttcccaagggctgtttcccagactataggattggaccaaacaaccaaatcattgatccagaggaaacgcatgaggccgtacctctcaaggaggttgttgcaaaggaaacagcgcagctgctagagcagcacaggcgcctttctgtgcgtgatctcaaggagaagtttgagaagggtctatctagcgcttccaagctttctgaagaggctaagcgtcgagaagctgcttcattagacaggcaggttcttttgaagaagctcagagatgttttagacacactgaaaggtcgtgtggctggtcgaaataaagacgatgctgaggaagctatctcactggtggaggcactagctgtccagctgacacaacgagaaggggagttaatttatgagaaggctgaagtaaaaaaattggctaacttccttaagcaggctactgtagatgcacgcaaagtagctgaagaggaaagggctcttgcacttgctgaaattgaaaaggctagagctgcaatcgaaaaagtcgagaaagcatttcatgtgcatgattctacgaaaagcagcagagaggaggaaatagaagaacttaggaaagaggtccgagaggctaggaggataaaaatgctacaccagccaatcaaggtcatggacatggagtttgagcttcaggcactgcggactctcatctcacagaagactcagctatgcaatcagctaaataaagagcttgccacgatcaagaggttagaagtagatagttctgacctctttgagcttgaaggttctaatacccttggatcgcagttttgtattattcctcgagttgatggtgctccaaacattgcgaactgtccaattcagtggtatcgtgtaatttctggtggcagtagaggactcatatcgggagcaacaaaatttacgtatgccccagaaccgtttgatgttggtcgattattacaagcagagattattttgaatgcagataaaatcatagttcagacggatggccctatagataatggtagtagtaacccaaatgaatgggaaggattactcgtcgaattctgtccatgtttttcatattggaaagctgagaataaaacttcaaaaaggatggtctacaaaagcaagagagttatattccaccacgatgaagttatgtgggagccgtggtggtggtaatgctgcagctagggcagttttctggcaagctaggaaaggcctgtcctacactctagcattcgaaacagacagggacaggaatgctgcaattatgattgctcgcaaatttgcttcgaattgcaatatcgctctcgctggcccaggtgaccaagacacctgatgaagtgatcatgcgtgttttgacagagacactgtacataatcaggtgtagattggctgatttttttgggagtctatttgtgtgcttgtgagggtagaggttgtacaccgcgtgacggtaatccccccttccatatatcttatggaggcattgtttttgtttgcctgtttgcagcattagcgacgttctcgaaacgtgatgtacaaattgatcactgttcttgtgcgtcacatctgtaataatatcactgttcttatcgcttctttttgtaagtcaaatatatatatttttaaatttgttcctatatatataatatttatagcata

SEQ ID NO: 31686 - DNA, 2074 bp, Zea Mays
gcgacggcggcggcgctcgggctctcagcgacggcggcagcggcttcccctctcgcctcgcgccctcgcctccggtcctccgcacaccggtcggtgaccctgtgtgcgtgcctctctctctcctcccccctctagtggatcgtcaacggcttccggccccggaggcttcgccgcgcgcggactgagggcagcgggagccagcagccgctgctccaccaaggcgatcgcgccgctttgagagctcatgccccaaagcgaagcgttacccatccttttagcgcttcagcaggctcaagggtgcgcttagtgctgccttttggaattatcgttcctggccaatttgtcatcagatcaccatacatgacaagggtcatccatgactccggagatggcatgcagaaggaggcacttgatttggtctcatctgatgttaactttcccaagggctgtttcccagactataggattggaccaaacaaccaaatcattgatccagaggaaacgcatgaggccgtacctctcaaggaggttgttgcaaaggaaacagcgcagctgctagagcagcacaggcgcctttctgtgcgtgatctcaaggagaagtttgagaagggtctatctagcgcttccaagctttctgaagaggctaagcgtcgagaagctgcttcattagacaggcaggttcttttgaagaagctcagagatgttttagacacactgaaaggtcgtgtggctggtcgaaataaagacgatgctgaggaagctatctcactggtggaggcactagctgtccagctgacacaacgagaaggggagttaatttatgagaaggctgaagtaaaaaaattggctaacttccttaagcaggctactgtagatgcacgcaaagtagctgaagaggaaagggctcttgcacttgctgaaattgaaaaggctagagctgcaatcgaaaaagtcgagaaagcatttcatgtgcatgattctacgaaaagcagcagagaggaggaaatagaagaacttaggaaagaggtccgagaggctaggaggataaaaatgctacaccagccaatcaaggtcatggacatggagtttgagcttcaggcactgcggactctcatctcacagaagactcagctatgcaatcagctaaataaagagttttgtattattcctcgagttgatggtgctccaaacattgcgaactgtccaattcagtggtatcgtgtaatttctggtggcagtagaggactcatatcgggagcaacaaaatttacgtatgccccagaaccgtttgatgttggtcgattattacaagcagagattattttgaatgcagataaaatcatagttcagacggatggccctatagataatgctgcaggacttgaacattatgtggactcactcatgaaacggacggatattgagttcaactagtaacccaaatgaatgggaaggattactcgtcgaattctgtccatgtttttcatattggaaagctgagaataaaacttcaaaaaggatggtctacaaaagcaagagagttatattccaccacgatgaagttatgtgggagccgtggtggtggtaatgctgcagctagggcagttttctggcaagctaggaaaggcctgtcctacactctagcattcgaaacagacagggacaggaatgctgcaattatgattgctcgcaaatttgcttcgaattgcaatatcgctctcgctggcccaggtgaccaagacacctgatgaagtgatcatgcgtgttttgacagagacactgtacataatcaggtgtagattggctgatttttttgggagtctatttgtgtgcttgtgagggtagaggttgtacaccgcgtgacggtaatccccccttccatatatcttatggaggcattgtttttgtttgcctgtttgcagcattagcgacgttctcgaaacgtgatgtacaaattgatcactgttcttgtgcgtcacatctgtaataatatcactgttcttatcgcttctttttgtaagtcaaatatatatatttttaaatttgttcctatatatataatatttatagcata

SEQ ID NO: 31687 - DNA, 2312 bp, Zea Mays
ctcgcctcgcgccctcgcctccggtcctccgcacaccggtcggtgaccctgtgtgcgtgcctctctctctcctcccccctctagtggatcgtcaacggcttccggccccggaggcttcgccgcgcgcggactgagggcagcgggagccagcagccgctgctccaccaaggcgatcgcgccgctttgagagctcatgccccaaagcgaagcgttacccatccttttagcgcttcagcaggctcaagggtgcgcttagtgctgccttttggaattatcgttcctggccaatttgtcatcagatcaccatacatgacaagggtcatccatgactccggagatggcatgcagaaggaggcacttgatttggtctcatctgatgttaactttcccaagggctgtttcccagactataggattggaccaaacaaccaaatcattgatccagaggaaacgcatgaggccgtacctctcaaggaggttgttgcaaaggaaacagcgcagctgctagagcagcacaggcgcctttctgtgcgtgatctcaaggagaagtttgagaagggtctatctagcgcttccaagctttctgaagaggctaagcgtcgagaagctgcttcattagacaggcaggttcttttgaagaagctcagagatgttttagacacactgaaaggtcgtgtggctggtcgaaataaagacgatgctgaggaagctatctcactggtggaggcactagctgtccagctgacacaacgagaaggggagttaatttatgagaaggctgaagtaaaaaaattggctaacttccttaagcaggctactgtagatgcacgcaaagtagctgaagaggaaagggctcttgcacttgctgaaattgaaaaggctagagctgcaatcgaaaaagtcgagaaagcatttcatgtgcatgattctacgaaaagcagcagagaggaggaaatagaagaacttaggaaagaggtccgagaggctaggaggataaaaatgctacaccagccaatcaaggtcatggacatggagtttgagcttcaggcactgcggactctcatctcacagaagactcagctatgcaatcagctaaataaagagcttgccacgatcaagaggttagaagtagatagttctgacctctttgagcttgaaggttctaatacccttggatcgcagttttgtattattcctcgagttgatggtgctccaaacattgcgaactgtccaattcagtggtatcgtgtaatttctggtggcagtagaggactcatatcgggagcaacaaaatttacgtatgccccagaaccgtttgatgttggtcgattattacaagcagagattattttgaatgcagataaaatcatagttcagacggatggccctatagataatgctgcaggacttgaacattatgtggactcactcatgaaacggacggatattgagttcaaccaggagaattgtcatcttcacgtatgtcttgagctgtagctgctgcatttatgggtcgttttctggttctagcatagctttctgtctgagtctgcgaggaggaaccggcacctgcagcagcagcagtcctaggcaaatttcggccacggggaccctaagttgcacctagagcttcatccacagcaccacaaatgttatcaccatcaggtagtagtaacccaaatgaatgggaaggattactcgtcgaattctgtccatgtttttcatattggaaagctgagaataaaacttcaaaaaggatggtctacaaaagcaagagagttatattccaccacgatgaagttatgtgggagccgtggtggtggtaatgctgcagctagggcagttttctggcaagctaggaaaggcctgtcctacactctagcattcgaaacagacagggacaggaatgctgcaattatgattgctcgcaaatttgcttcgaattgcaatatcgctctcgctggcccaggtgaccaagacacctgatgaagtgatcatgcgtgttttgacagagacactgtacataatcaggtgtagattggctgatttttttgggagtctatttgtgtgcttgtgagggtagaggttgtacaccgcgtgacggtaatccccccttccatatatcttatggaggcattgtttttgtttgcctgtttgcagcattagcgacgttctcgaaacgtgatgtacaaattgatcactgttcttgtgcgtcacatctgtaataatatcactgttcttatcgcttctttttgtaagtcaaatatatatatttttaaatttgttcctatatatataatatttatagcata

SEQ ID NO: 31688 - DNA, 1722 bp, Zea Mays
cgcacaccggtcggtgaccctgtactataggattggaccaaacaaccaaatcattgatccagaggaaacgcatgaggccgtacctctcaaggaggttgttgcaaaggaaacagcgcagctgctagagcagcacaggcgcctttctgtgcgtgatctcaaggagaagtttgagaagggtctatctagcgcttccaagctttctgaagaggctaagcgtcgagaagctgcttcattagacaggcaggttcttttgaagaagctcagagatgttttagacacactgaaaggtcgtgtggctggtcgaaataaagacgatgctgaggaagctatctcactggtggaggcactagctgtccagctgacacaacgagaaggggagttaatttatgagaaggctgaagtaaaaaaattggctaacttccttaagcaggctactgtagatgcacgcaaagtagctgaagaggaaagggctcttgcacttgctgaaattgaaaaggctagagctgcaatcgaaaaagtcgagaaagcatttcatgtgcatgattctacgaaaagcagcagagaggaggaaatagaagaacttaggaaagaggtccgagaggctaggaggataaaaatgctacaccagccaatcaaggtcatggacatggagtttgagcttcaggcactgcggactctcatctcacagaagactcagctatgcaatcagctaaataaagagcttgccacgatcaagaggttagaagtagatagttctgacctctttgagcttgaaggttctaatacccttggatcgcagttttgtattattcctcgagttgatggtgctccaaacattgcgaactgtccaattcagtggtatcgtgtaatttctggtggcagtagaggactcatatcgggagcaacaaaatttacgtatgccccagaaccgtttgatgttggtcgattattacaagcagagattattttgaatgcagataaaatcatagttcagacggatggccctatagataatgctgcaggacttgaacattatgtggactcactcatgaaacggacggatattgagttcaacgtagtagtaacccaaatgaatgggaaggattactcgtcgaattctgtccatgtttttcatattggaaagctgagaataaaacttcaaaaaggatggtctacaaaagcaagagagttatattccaccacgatgaagttatgtgggagccgtggtggtggtaatgctgcagctagggcagttttctggcaagctaggaaaggcctgtcctacactctagcattcgaaacagacagggacaggaatgctgcaattatgattgctcgcaaatttgcttcgaattgcaatatcgctctcgctggcccaggtgaccaagacacctgatgaagtgatcatgcgtgttttgacagagacactgtacataatcaggtgtagattggctgatttttttgggagtctatttgtgtgcttgtgagggtagaggttgtacaccgcgtgacggtaatccccccttccatatatcttatggaggcattgtttttgtttgcctgtttgcagcattagcgacgttctcgaaacgtgatgtacaaattgatcactgttcttgtgcgtcacatctgtaataatatcactgttcttatcgcttctttttgtaagtcaaatatatatatttttaaatttgttcctatatatataatatttatagcata

SEQ ID NO: 31689 - DNA, 2138 bp, Zea Mays
cggtcggtgaccctgtgtgcgtgcctctctctctcctcccccctctagtggatcgtcaacggcttccggccccggaggcttcgccgcgcgcggactgagggcagcgggagccagcagccgctgctccaccaaggcgatcgcgccgctttgagagctcatgccccaaagcgaagcgttacccatccttttagcgcttcagcaggctcaagggtgcgcttagtgctgccttttggaattatcgttcctggccaatttgtcatcagatcaccatacatgacaagggtcatccatgactccggagatggcatgcagaaggaggcacttgatttggtctcatctgatgttaactttcccaagggctgtttcccagactataggattggaccaaacaaccaaatcattgatccagaggaaacgcatgaggccgtacctctcaaggaggttgttgcaaaggaaacagcgcagctgctagagcagcacaggcgcctttctgtgcgtgatctcaaggagaagtttgagaagggtctatctagcgcttccaagctttctgaagaggctaagcgtcgagaagctgcttcattagacaggcaggttcttttgaagaagctcagagatgttttagacacactgaaaggtcgtgtggctggtcgaaataaagacgatgctgaggaagctatctcactggtggaggcactagctgtccagctgacacaacgagaaggggagttaatttatgagaaggctgaagtaaaaaaattggctaacttccttaagcaggtctgctgcattttttgttagtatccaattaactttgcagccttttcaaatgttttacctgaagctgaggctactgtagatgcacgcaaagtagctgaagaggaaagggctcttgcacttgctgaaattgaaaaggctagagctgcaatcgaaaaagtcgagaaagcatttcatgtgcatgattctacgaaaagcagcagagaggaggaaatagaagaacttaggaaagaggtccgagaggctaggaggataaaaatgctacaccagccaatcaaggtcatggacatggagtttgagcttcaggcactgcggactctcatctcacagaagactcagctatgcaatcagctaaataaagagcttgccacgatcaagaggttagaagtagatagttctgacctctttgagcttgaaggttctaatacccttggatcgcagttttgtattattcctcgagttgatggtgctccaaacattgcgaactgtccaattcagtggtatcgtgtaatttctggtggcagtagaggactcatatcgggagcaacaaaatttacgtatgccccagaaccgtttgatgttggtcgattattacaagcagagattattttgaatgcagataaaatcatagttcagacggatggccctatagataatgctgcaggacttgaacattatgtggactcactcatgaaacggacggatattgagttcaacgtagtagtaacccaaatgaatgggaaggattactcgtcgaattctgtccatgtttttcatattggaaagctgagaataaaacttcaaaaaggatggtctacaaaagcaagagagttatattccaccacgatgaagttatgtgggagccgtggtggtggtaatgctgcagctagggcagttttctggcaagctaggaaaggcctgtcctacactctagcattcgaaacagacagggacaggaatgctgcaattatgattgctcgcaaatttgcttcgaattgcaatatcgctctcgctggcccaggtgaccaagacacctgatgaagtgatcatgcgtgttttgacagagacactgtacataatcaggtgtagattggctgatttttttgggagtctatttgtgtgcttgtgagggtagaggttgtacaccgcgtgacggtaatccccccttccatatatcttatggaggcattgtttttgtttgcctgtttgcagcattagcgacgttctcgaaacgtgatgtacaaattgatcactgttcttgtgcgtcacatctgtaataatatcactgttcttatcgcttctttttgtaagtcaaatatatatatttttaaatttgttcctatatatataatatttatagcata

SEQ ID NO: 31690 - DNA, 1367 bp, Zea Mays
ctcacatgccattcctttttcgtatctaatttacttttcaagtggaggcactagctgtccagctgacacaacgagaaggggagttaatttatgagaaggctgaagtaaaaaaattggctaacttccttaagcaggctactgtagatgcacgcaaagtagctgaagaggaaagggctcttgcacttgctgaaattgaaaaggctagagctgcaatcgaaaaagtcgagaaagcatttcatgtgcatgattctacgaaaagcagcagagaggaggaaatagaagaacttaggaaagaggtccgagaggctaggaggataaaaatgctacaccagccaatcaaggtcatggacatggagtttgagcttcaggcactgcggactctcatctcacagaagactcagctatgcaatcagctaaataaagagcttgccacgatcaagaggttagaagtagatagttctgacctctttgagcttgaaggttctaatacccttggatcgcagttttgtattattcctcgagttgatggtgctccaaacattgcgaactgtccaattcagtggtatcgtgtaatttctggtggcagtagaggactcatatcgggagcaacaaaatttacgtatgccccagaaccgtttgatgttggtcgattattacaagcagagattattttgaatgcagataaaatcatagttcagacggatggccctatagataatggtagtagtaacccaaatgaatgggaaggattactcgtcgaattctgtccatgtttttcatattggaaagctgagaataaaacttcaaaaaggatggtctacaaaagcaagagagttatattccaccacgatgaagttatgtgggagccgtggtggtggtaatgctgcagctagggcagttttctggcaagctaggaaaggcctgtcctacactctagcattcgaaacagacagggacaggaatgctgcaattatgattgctcgcaaatttgcttcgaattgcaatatcgctctcgctggcccaggtgaccaagacacctgatgaagtgatcatgcgtgttttgacagagacactgtacataatcaggtgtagattggctgatttttttgggagtctatttgtgtgcttgtgagggtagaggttgtacaccgcgtgacggtaatccccccttccatatatcttatggaggcattgtttttgtttgcctgtttgcagcattagcgacgttctcgaaacgtgatgtacaaattgatcactgttcttgtgcgtcacatctgtaataatatcactgttcttatcgcttctttttgtaagtcaaatatatatatttttaaatttgttcctatatatataatatttatagcata

SEQ ID NO: 31691 - DNA, 1334 bp, Zea Mays
ctttttcgtatctaatttacttttcaagtggaggcactagctgtccagctgacacaacgagaaggggagttaatttatgagaaggctgaagtaaaaaaattggctaacttccttaagcaggctactgtagatgcacgcaaagtagctgaagaggaaagggctcttgcacttgctgaaattgaaaaggctagagctgcaatcgaaaaagtcgagaaagcatttcatgtgcatgattctacgaaaagcagcagagaggaggaaatagaagaacttaggaaagaggtccgagaggctaggaggataaaaatgctacaccagccaatcaaggtcatggacatggagtttgagcttcaggcactgcggactctcatctcacagaagactcagctatgcaatcagctaaataaagagttttgtattattcctcgagttgatggtgctccaaacattgcgaactgtccaattcagtggtatcgtgtaatttctggtggcagtagaggactcatatcgggagcaacaaaatttacgtatgccccagaaccgtttgatgttggtcgattattacaagcagagattattttgaatgcagataaaatcatagttcagacggatggccctatagataatgctgcaggacttgaacattatgtggactcactcatgaaacggacggatattgagttcaacgtagtagtaacccaaatgaatgggaaggattactcgtcgaattctgtccatgtttttcatattggaaagctgagaataaaacttcaaaaaggatggtctacaaaagcaagagagttatattccaccacgatgaagttatgtgggagccgtggtggtggtaatgctgcagctagggcagttttctggcaagctaggaaaggcctgtcctacactctagcattcgaaacagacagggacaggaatgctgcaattatgattgctcgcaaatttgcttcgaattgcaatatcgctctcgctggcccaggtgaccaagacacctgatgaagtgatcatgcgtgttttgacagagacactgtacataatcaggtgtagattggctgatttttttgggagtctatttgtgtgcttgtgagggtagaggttgtacaccgcgtgacggtaatccccccttccatatatcttatggaggcattgtttttgtttgcctgtttgcagcattagcgacgttctcgaaacgtgatgtacaaattgatcactgttcttgtgcgtcacatctgtaataatatcactgttcttatcgcttctttttgtaagtcaaatatatatatttttaaatttgttcctatatatataatatttatagcata

SEQ ID NO: 31692 - DNA, 664 bp, Zea Mays
aagcagtggctagaaaggtagtagtaacccaaatgaatgggaaggattactcgtcgaattctgtccatgtttttcatattggaaagctgagaataaaacttcaaaaaggatggtctacaaaagcaagagagttatattccaccacgatgaagttatgtgggagccgtggtggtggtaatgctgcagctagggcagttttctggcaagctaggaaaggcctgtcctacactctagcattcgaaacagacagggacaggaatgctgcaattatgattgctcgcaaatttgcttcgaattgcaatatcgctctcgctggcccaggtgaccaagacacctgatgaagtgatcatgcgtgttttgacagagacactgtacataatcaggtgtagattggctgatttttttgggagtctatttgtgtgcttgtgagggtagaggttgtacaccgcgtgacggtaatccccccttccatatatcttatggaggcattgtttttgtttgcctgtttgcagcattagcgacgttctcgaaacgtgatgtacaaattgatcactgttcttgtgcgtcacatctgtaataatatcactgttcttatcgcttctttttgtaagtcaaatatatatatttttaaatttgttcctatatatataatatttatagcata

SEQ ID NO: 31693 - DNA, 2309 bp, Zea Mays
cccagcttgctcttcggatggactggatttttactgttattatatcaaacaatatcgaacttatttcaatttcacacccacagtttggaacagaagttgacttcatgctcacagatacagacacagacacaaacccgtcggaacagggtaaaaaaaacgagatcaccaaccaaaacctccgtcgccgtgtgaggccggcgttgatgtgaatgctttgaggaaaccccacgcgatctccaaataataacgcatttattaccgcgcctgtgcacatgttaaagttttgttaataaacgcacgcgccgcgcctcggccaagaaaggaaggaggagctcccaactcaggaagtccagctgcctcggaggcgaatcccactcccactcgccgcaacggctagtttcccggtggatcgatcccagccgttggagccgctcccgaccgttgcgatacggacccttcccgaccgttggagccgctcctctcccctctcgccgccccgctgccctcacaagtcacaacgccggcaccggcacaggcaggcacgctcgtttatatctgcgcctcctccactcgccgagacaatagcctctcctcgcaccccctcaagaactgtacccatcacgcgccgccatcgattgaccttgaccgacccgaccacccatcacgcttcttgttgccgccgctgttgcttgccgatacgcggtggctgcgctcgccggcggggaagaggggtcgcgggctgcgcgcctccagtctttcttcgcctccgtgctctcgggcctcttcggccaggccgaccaggacgaggaccaagagatggcctcgcgcaaccacaacgccgccgctccgcagcttcaccatcacaaccgagccggtgttcccgctcttggaaagaccaaggccgtgcccgcccgacctgacgctctgaaccggcgaccccctctcggcgatatcggcaacctcgtcagcgtccgcccagccacagggaacccgcaggagcaggtcaaccgccccatcactagaagcttcggcgctcaactcgtcaagaaagcgcaggcgaaggccgcaatcaagaatgccgcaatcctgcctgcgaggcatgcgccgaggcaggagaggaaggctcctgtcaagcagcacccgccgccggaggatatcatagtactcagctccgattctgaacagagcagggcgcagtccgagagcagcgctagctccgtccgctccaggaggaaggccatcaacaccctttcttccgtgctctcggctcgctcaaaggctgcctgtggaatcgctggtaagcctagacaagtggtcgatgacatcgacaagctggacgtcaacaatgagctcgcggtggtggaatacattgaggacatctacacgttctacaagattgctcagcacgagagacggccatgtgactacatcgacgcccaactcgagatcaactctaagatgagggctatcctggctgattggataatcgaagtacaccacaagtttgaactgatgcccgaaactctctacctgaccatgtacatcatcgatcagtacctctcgctgcaaccagtcctgcgtaaggagctgcagcttgtcggcgtttcatctatgctgatcgcctgcaagtacgaggagatttgggccccagaggtgaacgacttcatcctcatatcagacagtgcatacagtagagaacagattctttcgatggagaagggaattctgaataggctggagtggaacctgactgtccctacagtgtatatgttccttgtccgttttctgaaggccgcaacattgggcggcaaagttgagaaagagatggagaatatggtgttcttcttcgctgaattggcgctgatgcaatacgatttggtgacgcgcctgccatcgctggtcgctgcttctgctgtctacgcagccagactcactctcaagagggctcccctttggaccgacaccctcaagcaccacacgggcttcagggagtcagaggcagagctcattgaatgcacgaagatgctggtgatcgcgcactcgactgcccctgagagcaagctgagggttgtatacaagaagtattccagcgagcagttcggaggggtcgcgctgcgtccacccgcagaggagatctgcaagtgaacgaaggctactttatccgtgtttgcctattgcttgctttaggggaagtggcgatggaagacccaaacacccttgtccttcaaaggctgctcaagtcttcaggatcaaaatgctatcttgaaacgaagacattttgctataagtacaatccaaatggagctcgg

SEQ ID NO: 31694 - DNA, 837 bp, Zea Mays
tggagaacggctggagagcttgtcggaggctgagctgcaagctctgctcgagcaagtggaggaggagaagcagcgcgtgcctcaggtcccggaagagcctaacgctattaccttcaggaagaaatgatgatcgttctattatctgccaaatggacaccgacctagcttgtttatagcatagcttcgccttcaatagctagctccatcgatattttaagatctgtacaatacgccccgctaagccactagtgctgtcaaacatgaaattatccattttctgccgcgcgccgttatgggacaataccgtagcaccaagaaccaaatccgttctttgagatatcattgtcgttgtaactatatcatccgcaaagctacagtttgggaggtcttcagcattgcctgtttgatcttccattggttcgtttccttgcgttatgatcacgattacataagccaggcaaacactacacaaaacataccaatttccgaaggccacataaatttctgaaggtttctaagataatcgtcgaacatatggtatttttttacggccatcgaaaatatcgtcgtcgcatagagtcgtcaaaaataagcttatgtttagagtcgttaaaaataagcttatgttcaacggccctctgtgagcgccgtcagaagttaggtttcacggggttatcctaactcacaacatagaccatccgcattctattgttctcccaaccgtatgtagttcatgtcacagcctacaaagcatcaatttatgataatccatgaacctgaatgatttttttggcagcataacactgtcctccgatacatcatttctagacgtgcaaa

SEQ ID NO: 31695 - DNA, 1592 bp, Zea Mays
ctcacctttctaactcccgtctctctcgcgagtcgcgtctgtcttcctcggtcccgcccgccacgggccgaccccgccgcgcccgcccacgccacccgccgcggctgcccctgccccggccccggctaggtagctcctcttcttcggctcagccgtcatgccccctcgcgcgtccatgctgcagcagcagccgcctcctcccccgcacccgcatctgcacagcatcgggggagtaaaaaagtccatgtccatcagcagcactcaacttacagccagcaaagcccggactagctagctagaagcatttgcaggtcaattgtttaacttctgaaacgtctcatcttctttcatcggtactgctcaccatctcttgtttatattatgagtgctactgctggcactcttgttttcattttcgtgcttttgccggttgccagttttctgtactgttgctcactctttgtccatactacatatgtataccatggtgcatcatgccataatgtagtagatcgtatggtaggcaattattagctacgcaccaccacacaagcaaaatggaagacttctcttgtgcttttacgcaaggtcaactgaaaattaaccctactgatgagtctagaatagacatgtatagatggtgtgtctattgacaaaagtacctttggtacgttgtaagctggaaaaggcaatggggagttatgggggaggaaaaaaataaaagagccaggagcagtgtctgcatgcatgtttttgcttgttacacgttgtttctaccctttgcatatggttgttcaattcatatttcttttctgaacttacatccctcggtcggggtattatctcaagaacaacttcttgtgacctcgatggctcgatctcacaaagaataaaggaagtcctccatataaactacatttgtggaaacaaaaaattgaaaatcatgtgtaacttagactcttataggcgcaaaatatgtaaatgctaattaaccaacatatttctgtcgtttagcaaggaagatgcattgagatgaatagccaagttcgttaattgtccaaacataagttgcaccccattgccattttttgtagaacacatgttgccgcgtaccatataccttagttaaccactgtcactgtgatatgttagacatactatagccaatgaccattatctcaaataatgatatgatgactgaatgatcaggctgattattgcataatgcgtatattagttccatattgatttttctgcggttctccttccttcatattcctagagagaaagggctgaattttggcgctcatataaagaacatatataaccacatctctgttatattactctttgtacgtgcatgcaagatatgttacacatacaaaaaaagatgaggtcatatatttaagtatattaacaatatatgcacatacaaaagggctaaagcttttaagtatattatcacagtacttgtgtttattttgtattacacattaaggtccttttttcgtattgttaccgtttacatgttggggaagcaattgttggaatgtaacaatctagcccgcggattgtgaaaacttatattggtt

SEQ ID NO: 31696 - DNA, 589 bp, Zea Mays
ttctaactcccgtctctctcgcgagtcgcgtctgtcttcctcggtcccgcccgccacgggccgaccccgccgcgcccgcccacgccacccgccgcggctgcccctgccccggccccggctaggtagctcctcttcttcggctcagccgtcatgccccctcgcgcgtccatgctgcagcagcagccgcctcctcccccgcacccgcatctgcacagcatcgggggagtaaaaaagtccatgtccatcagcagcactcaacttacagccagcaaagcccggactagctagctagaagcatttgcagataacttacataaggatagtggtcagccataatattttggaatatcatcttccttataaaaacagcacaggtccaagggatacacgtcccggtgcccccacctcccgtttattatccttggtcttcacctccacctacacctacatctccatctaccgaacatcaggtatgcaaattcatcatcatttacttgttgttagttatattatgatgtaactcagtaaatatcatttgtacatgtatattagacccctccaactaccttgccgacgcatgaacgagaag

SEQ ID NO: 31697 - DNA, 584 bp, Zea Mays
ttctaactcccgtctctctcgcgagtcgcgtctgtcttcctcggtcccgcccgccacgggccgaccccgccgcgcccgcccacgccacccgccgcggctgcccctgccccggccccggctaggtagctcctcttcttcggctcagccgtcatgccccctcgcgcgtccatgctgcagcagcagccgcctcctcccccgcacccgcatctgcacagcatcgggggagtaaaaaagtccatgtccatcagcagcactcaacttacagccagcaaagcccggactagctagctagaagcatttgcagataacttacataaggatagtggtcagccataatattttggaatatcatcttccttataaaaacaggtccaagggatacacgtcccggtgcccccacctcccgtttattatccttggtcttcacctccacctacacctacatctccatctaccgaacatcaggtatgcaaattcatcatcatttacttgttgttagttatattatgatgtaactcagtaaatatcatttgtacatgtatattagacccctccaactaccttgccgacgcatgaacgagaag

SEQ ID NO: 31698 - DNA, 587 bp, Zea Mays
ttctaactcccgtctctctcgcgagtcgcgtctgtcttcctcggtcccgcccgccacgggccgaccccgccgcgcccgcccacgccacccgccgcggctgcccctgccccggccccggctaggtagctcctcttcttcggctcagccgtcatgccccctcgcgcgtccatgctgcagcagcagccgcctcctcccccgcacccgcatctgcacagcatcgggggagtaaaaaagtccatgtccatcagcagcactcaacttacagccagcaaagcccggactagctagctagaagcatttgcagataacttacataaggatagtggtcagccataatattttggaatatcatcttccttataaaaacagcaggtccaagggatacacgtcccggtgcccccacctcccgtttattatccttggtcttcacctccacctacacctacatctccatctaccgaacatcaggtatgcaaattcatcatcatttacttgttgttagttatattatgatgtaactcagtaaatatcatttgtacatgtatattagacccctccaactaccttgccgacgcatgaacgagaag

SEQ ID NO: 31699 - DNA, 596 bp, Zea Mays
ttctaactcccgtctctctcgcgagtcgcgtctgtcttcctcggtcccgcccgccacgggccgaccccgccgcgcccgcccacgccacccgccgcggctgcccctgccccggccccggctaggtagctcctcttcttcggctcagccgtcatgccccctcgcgcgtccatgctgcagcagcagccgcctcctcccccgcacccgcatctgcacagcatcgggggagtaaaaaagtccatgtccatcagcagcactcaacttacagccagcaaagcccggactagctagctagaagcatttgcagataacttacataaggatagtggtcagccataatattttggaatatcatcttccttataaaaacagcaactagcacaggtccaagggatacacgtcccggtgcccccacctcccgtttattatccttggtcttcacctccacctacacctacatctccatctaccgaacatcaggtatgcaaattcatcatcatttacttgttgttagttatattatgatgtaactcagtaaatatcatttgtacatgtatattagacccctccaactaccttgccgacgcatgaacgagaag

SEQ ID NO: 31700 - DNA, 628 bp, Zea Mays
cgtctctctcgcgagtcgcgtctgtcttcctcggtcccgcccgccacgggccgaccccgccgcgcccgcccacgccacccgccgcggctgcccctgccccggccccggctaggtagctcctcttcttcggctcagccgtcatgccccctcgcgcgtccatgctgcagcagcagccgcctcctcccccgcacccgcatctgcacagcatcgggggagtaaaaaagtccatgtccatcagcagcactcaacttacagccagcaaagcccggactagctagctagaagcatttgcaggtcaattgtttaacttctgaaacgtctcatcttctttcatcgataacttacataaggatagtggtcagccataatattttggaatatcatcttccttataaaaacagcaactagcacaggtccaagggatacacgtcccggtgcccccacctcccgtttattatccttggtcttcacctccacctacacctacatctccatctaccgaacatcaggtatgcaaattcatcatcatttacttgttgttagttatattatgatgtaactcagtaaatatcatttgtacatgtatattagacccctccaactaccttgccgacgcatgaacgagaag

SEQ ID NO: 31701 - DNA, 611 bp, Zea Mays
ctctcgcgagtcgcgtctgtcttcctcggtcccgcccgccacgggccgaccccgccgcgcccgcccacgccacccgccgcggctgcccctgccccggccccggctaggtagctcctcttcttcggctcagccgtcatgccccctcgcgcgtccatgctgcagcagcagccgcctcctcccccgcacccgcatctgcacagcatcgggggagtaaaaaagtccatgtccatcagcagcactcaacttacagccagcaaagcccggactagctagctagaagcatttgcaggtcaattgtttaacttctgaaacgtctcatcttctttcatcgataacttacataaggatagtggtcagccataatattttggaatatcatcttccttataaaaacaggtccaagggatacacgtcccggtgcccccacctcccgtttattatccttggtcttcacctccacctacacctacatctccatctaccgaacatcaggtatgcaaattcatcatcatttacttgttgttagttatattatgatgtaactcagtaaatatcatttgtacatgtatattagacccctccaactaccttgccgacgcatgaacgagaag

SEQ ID NO: 31702 - DNA, 1759 bp, Zea Mays
ggttttctaatgaaaccgaacacatctcggttttaaacaaaactatgattttactacggtaaggcactataatatttgtgtcatgcataattataaattttgacattttaaaattatagtattttaaaactgcattattaaacaggccctaatccctggcagccagcgtttcaggttttcaggacaccagcttcctagtttctattggctacggcatcttgaatcactgtccagtcgtgtcgatgacccctccgctgcgccaaccaacccaccctggtccacgggcgtcacggcactgctacagtgctacaaaccaactacctaccaccactccggcagtccggctagctccataaaggcgcagccggccggctggccggtagcagtcagccagccagccagccatggagacggcctccttcctctcagtggcgctggccctggcggccctcgtccccgtctcgctgctccttgtgaaccggctcctctacggcaaactgcccccggggccgcggcggcgtcccgtggtgggtaacctgttcgacgtgcagcccgtgcggtgccggtgctaccaggagtgggcgcgccggtacgggcccatcatgacggtgtggctgggcacgtcgcccacggtggtggtgtccacgtcggagctggccaaggaggtgctcaagacccacgaccagcagctcgccgaccgctgccgggaccgctccaccgagagcttcagccgaggcggccaggacctcatctgggccgactacggcccccactacatcaaggtgcgcaagctctgcaacctcgagctcttcacgcagcgccgcctcgaggcgctcaggcccatccgcgaggacgaggtcaccgccatggtcgagtccgtctacaaagccgtcaccgcgcctgtgcaggagaagctgcaggaggagctggaccgtgtcgtcggccgcgaccgggtcctgtcggagacggacttcccgaacctgccttacctgcaggccgtcgtcaaggagtccctgcgcctgcacccgccgacgccgctgatgctcccccacagggccagcgccagcgtcaagatcgccggctacgacatccccaagggcgccaacgtcgtcgtcaacgtgtgggcggtggcgcgcgaccccgaggtgtgggacagcccgctcgagttccggccggagcggttcctccgggagaacatcgacatcaagggcgccgacttccgcgtgctgccgttcggcgccggccgccgggtgtgccccggcgcgcagctcgggatcaacctcgtggcgtccatgatcggccacatgctgcaccacttcacgtggacgctgccgagcgggacctgtcccgaggacgtgagcatgatggagtcccccgggctcgtcaccttcatggccacgccgctgcaggccgtcgccacgccgcgcctggacaaggaggaactgtacaggcgtgtcccttcggacgtgtgagccgtcggcgtcctggcatctgctgcgttccctgttttgaaacctgctgctgctgttgcgaatttgtgtaccattaactattcgctggtgatgtacgtgtcatagtcgtgtacgagcattttgtgtactgcagaacttgatcgctgagcatacacttttgcccggtagtaatttacaatttcagcattgcaaattactattagtacgtcgcagaaaacagtgtaaagctcgaaattgagacctcgcgaatatgcaccagcctcctcgaaattgagacctcacgaata

SEQ ID NO: 31703 - DNA, 1726 bp, Zea Mays
gcaccctcctccgctcaagacccaagtctgctagaacccgggcgcgctccaaattccccggtcacctacctcctctgccctctcactctcagatccgcgtcctcggctcctcctcctcctcctcctcctcccttccttcgttccttccagatctccctcccagtcgagagtcgagatccaccgcctccgcgccccctcaccggtgcagcgcgaggaagcggggggccagaggccagccatgggcaaggaaggggccagcgacggcggcatgtcggagtcggtgatccgcaaggtcctggtctcgtacatatgctcaaggcgctcatgcccgtcgccgtctactccatcggggtcctcttcaagaaggagaccttcaagtcctccgccatgctcaacatgctctccatctcgttcggcgtcgccatcgccgcctacggagaggcccgcttcgacgcccgcggcgtcgccctgcagctcgccgccgtcgccttcgaggccacgcgcctcgtcctcatccagatcctcctcacctccaagggcatctccctcaaccccatcacctcgctctactacgtcgcgccctgctgcctcgctttcctcgtcgtgccctgggtcttcgtcgagctgcccaggctgcgcgccgtcggcatcttccagccggacctcttcgtcttcggcaccaactccctctgcgccttcgcgctcaacctcgccgtcttcctgctcgtcggcaagacgtcggctctcaccatgaacgtcgccggcgtcgtcaaggactggctgctcatcgccttctcctggtccgtcatccgcgacaccgtcacccccatcaacctcttcggctacgggatcgccttcctcggggtgggatactacaaccacgtcaagctgcaggcgctcaaggccaaggaggcgcagaagaaggcggcgcaggccgacgaggaggccgggtcgctgctgcaggagcgcgactcgcacggcgaccgcaagactgacaaccaggcctagcgagtgtgccggatctcatgatccaattcgctcggttctgaacccagtgtactccaaatatgtgatccaacccttacacgtttgatgcaaaatttgttcatttcttgtctttgacttgatctggtggtaccaaggaaataagcacgggaaagatgcaagctttgtgtcgaacatgtgaaaaaaaatatatatgtatgagcaattttttgtcttttttttggggccagttgtagctgttactaccattaaacagtaagcaaaactgtttgcattttatctgtattgctgtgattggtcgattgtcttgctaatacataaaaaattggacccactgggtcaaaaagaagtgcaatttcgaccgagtactgattatcagaatccagtggacattgcgcaggagacctggacacctggtgcaaacaccatctgaaagttggtgacttgattgatacatggttgatttccacggagctgacctcggtatgggtttgatgctttgatgcctaaccccattggttgttcttgtggggagtcggaggaatttgttgtgtagggagcctcaggacgttgatctgcctgctggaccagaagaaacttggatctcacaatgccacttttctgttttggagccaatggtgttgttttgctattatttttccattttttttgtccctttggagcgcatgtactgtgttcactcagtgaagggaactccaca

SEQ ID NO: 31704 - DNA, 1876 bp, Zea Mays
gcaccctcctccgctcaagacccaagtctgctagaacccgggcgcgctccaaattccccggtcacctacctcctctgccctctcactctcagatccgcgtcctcggctcctcctcctcctcctcctcctcccttccttcgttccttccagatctccctcccagtcgagagtcgagatccaccgcctccgcgccccctcaccggtgcagcgcgaggaagcggggggccagaggccagccatgggcaaggaaggggccagcgacggcggcatgtcggagtcggtgatccgcaaggtcctggtctcgtacatgtacgtggcggtgtggatcttcctctccttctccgtgatcgtctacaacaactctacgtctcctccgtgctccctatcggcgcgctctactcgctctcgctctggttctccaactccgcctacatctacctctccgtctccttcatccagatgctcaaggcgctcatgcccgtcgccgtctactccatcggggtcctcttcaagaaggagaccttcaagtcctccgccatgctcaacatgctctccatctcgttcggcgtcgccatcgccgcctacggagaggcccgcttcgacgcccgcggcgtcgccctgcagctcgccgccgtcgccttcgaggccacgcgcctcgtcctcatccagatcctcctcacctccaagggcatctccctcaaccccatcacctcgctctactacgtcgcgccctgctgcctcgctttcctcgtcgtgccctgggtcttcgtcgagctgcccaggctgcgcgccgtcggcatcttccagccggacctcttcgtcttcggcaccaactccctctgcgccttcgcgctcaacctcgccgtcttcctgctcgtcggcaagacgtcggctctcaccatgaacgtcgccggcgtcgtcaaggactggctgctcatcgccttctcctggtccgtcatccgcgacaccgtcacccccatcaacctcttcggctacgggatcgccttcctcggggtgggatactacaaccacgtcaagctgcaggcgctcaaggccaaggaggcgcagaagaaggcggcgcaggccgacgaggaggccgggtcgctgctgcaggagcgcgactcgcacggcgaccgcaagactgacaaccaggcctagcgagtgtgccggatctcatgatccaattcgctcggttctgaacccagtgtactccaaatatgtgatccaacccttacacgtttgatgcaaaatttgttcatttcttgtctttgacttgatctggtggtaccaaggaaataagcacgggaaagatgcaagctttgtgtcgaacatgtgaaaaaaaatatatatgtatgagcaattttttgtcttttttttggggccagttgtagctgttactaccattaaacagtaagcaaaactgtttgcattttatctgtattgctgtgattggtcgattgtcttgctaatacataaaaaattggacccactgggtcaaaaagaagtgcaatttcgaccgagtactgattatcagaatccagtggacattgcgcaggagacctggacacctggtgcaaacaccatctgaaagttggtgacttgattgatacatggttgatttccacggagctgacctcggtatgggtttgatgctttgatgcctaaccccattggttgttcttgtggggagtcggaggaatttgttgtgtagggagcctcaggacgttgatctgcctgctggaccagaagaaacttggatctcacaatgccacttttctgttttggagccaatggtgttgttttgctattatttttccattttttttgtccctttggagcgcatgtactgtgttcactcagtgaagggaactccaca

SEQ ID NO: 31705 - DNA, 297 bp, Zea Mays
gccggatttaccggacccatgcgacgacccgctctggggactctgggtatatggggaagaaaggtctcgctcacgcccctctcaccagacttgcccaaccctcgcgatgccggcaaccctagagcttaagcaaaatccagaccggcgcgactgagtccgggtcgactgccgccgtctgagcttcttcacaccttctctcggctgttgggcaggaccataggggtggtgtgcgagcgctagttggaagcttggtggtcgagcaaacctttgacgatcaagccactgaggatcctggta

SEQ ID NO: 31706 - DNA, 427 bp, Zea Mays
ctgacatgttgcgatcgccaaaattcaccgccaaagccgaagccgagccgcggacgtccccactgcctgctgccgggtgcggccgggcagcagatcgcccggaacacaaaattccccttcccatcccacccaccagtccaccatccgtccccgatcctctcgctcttctgcccgaataatggcggcggaggccaagggcgagagctcgcaattacctggcggcgaggttgatggtcaggtccagacattttgaccagccacggaagtcgcctgttagattgctactactgtagtacagtagcaagcagattgccaatagcctttacgttgctgctaggttcggctactccaaaatttcagtgtattatcactacttaatcacttgtatttacattgttaatagttcagaaatgcagtccattttgcc

SEQ ID NO: 31707 - DNA, 1876 bp, Zea Mays
tatttttgtgttttattaaaataaaattataaaactatatcaatgtacgagcatttgactattaactactttttctgtttttttatttatcgcgttctagtatttcagaacggaggtagtaataattattagtaccagctaatggatgtaaaattgtaaattgtaaacatgattttaaagaagacgtcagaactgagaagagaacactcaaacggaggcggacggaagaagcacatgggaaaaatcctagcgccagagctaccggcggcggtacatgcccacctgtaccggcaaaaacgtgcggacgcacgataaagatcacagcttttcctactctttgcagacacccccgcccctcggcggcggccgcgagcgaaaccaacgacgccacccaaaccggcaaatccgcctcctcccccacgcctttcgccgctcggctgactcgttcgcgttcccaccccactccgacttaaccgggcgcaccgtttccggtgggcggcatcctgcgcctttcgggtcgcgtccgcacgcgctggggtggtggagggagtccgggcgccttttctcgcgtgtcccgagggttgggctgagggagaagaggtccgcagcggcgcgcttctgtgctgtatatcatggtcaatgctacgatatccctttgcccgacccaaacatgtttattgatattatcaacccagatgaatatgttgatcctgaattggtggctgatctggagaagtcacgtcgtagtgttcccagaaaagataatggtgttcctgatgtctgggactcttttattttctctgacaagccagttccagttacaggatggggtgacacggagaccagcttcacccatggccagcagctctctgtaaactgggacaatcagttagaacactcagttgaagcaaatcataagcaaatgtcggcaagttgggactattctgtcaagcaaccttctcaaagaattggtcagcaaaactcagggaactgggaagtgtacaaggaacagcaggatcaagccagcaactggggggagcagacgaatccttgcagtaccaactgggtcatggatggctcccaggatgcttggaagcatggctatggttggggtcctgcagctattcagaccgatccatgggacaactgtcaatatagctatcaggtgcctgacagccagggcacatatggacactggactcactggagaaggcgaaacaatgacttgggtagaagaaacaccaggaatagaggagatcccatcagctcaaagccaatgaaatcaaagtaccaaacggatgaacacagtggtgcaaacaatggttggaggaactgtcgagtgaagaatgatatgtattattactcatatgagcaggctgattataccaagcagtcactggctatgtgagtaagagctaaggggcttacgccatcgagagaagatgacaagttcctctctgccgttcactacgctttagaggtgtcagtagttttacaccagcaatagtaatggtggacatcttgagatgaggtacagtagagttagtagcaggttatgttcacctacccccccccccccccccccccctaagctgctgtatatagtagtaattatcgtcctaatgattgtttcgtttagccatttgcggccgttgtttgtttatatatatctgtctcgatatctgtagttttggtttactggctacttcttagcttcagtgttgcagcagttagaattatgatggttcttctttaatttacatcttcggtggtggtaagaacaaatgctttgactgatttgtatgttggtgtcgaaatggcacgagcagaagcttatatcctgtacatagctgcattgctctctggtaattgtgat

SEQ ID NO: 31708 - DNA, 2111 bp, Zea Mays
tatttttgtgttttattaaaataaaattataaaactatatcaatgtacgagcatttgactattaactactttttctgtttttttatttatcgcgttctagtatttcagaacggaggtagtaataattattagtaccagctaatggatgtaaaattgtaaattgtaaacatgattttaaagaagacgtcagaactgagaagagaacactcaaacggaggcggacggaagaagcacatgggaaaaatcctagcgccagagctaccggcggcggtacatgcccacctgtaccggcaaaaacgtgcggacgcacgataaagatcacagcttttcctactctttgcagacacccccgcccctcggcggcggccgcgagcgaaaccaacgacgccacccaaaccggcaaatccgcctcctcccccacgcctttcgccgctcggctgactcgttcgcgttcccaccccactccgacttaaccgggcgcaccgtttccggtgggcggcatcctgcgcctttcgggtcgcgtccgcacgcgctggggtggtggagggagtccgggcgccttttctcgcgtgtcccgagggttgggctgagggagaagaggtccgcagcggccatccatggcggagatgcgaccgatctacagggagcccggcaagccccggcggccgccacgctctcacggcagtggaagtttctcagttccgttgtgggaaaagaaattttgcactgatgcttgtgctatcccctgggctaaactgtgtgagaccaagagattgatgtctctgtataaaagcgtggttgattgggacgactcagctgcattagaagccttcaatgacgcaaaggcgcgcttctgtgctgtatatcatggtcaatgctacgatatccctttgcccgacccaaacatgtttattgatattatcaacccagatgaatatgttgatcctgaattggtggctgatctggagaagtcacgtcgtagtgttcccagaaaagataatggtgttcctgatgtctgggactcttttattttctctgacaagccagttccagttacaggatggggtgacacggagaccagcttcacccatggccagcagctctctgtaaactgggacaatcagttagaacactcagttgaagcaaatcataagcaaatgtcggcaagttgggactattctgtcaagcaaccttctcaaagaattggtcagcaaaactcagggaactgggaagtgtacaaggaacagcaggatcaagccagcaactggggggagcagacgaatccttgcagtaccaactgggtcatggatggctcccaggatgcttggaagcatggctatggttggggtcctgcagctattcagaccgatccatgggacaactgtcaatatagctatcaggtgcctgacagccagggcacatatggacactggactcactggagaaggcgaaacaatgacttgggtagaagaaacaccaggaatagaggagatcccatcagctcaaagccaatgaaatcaaagtaccaaacggatgaacacagtggtgcaaacaatggttggaggaactgtcgagtgaagaatgatatgtattattactcatatgagcaggctgattataccaagcagtcactggctatgtgagtaagagctaaggggcttacgccatcgagagaagatgacaagttcctctctgccgttcactacgctttagaggtgtcagtagttttacaccagcaatagtaatggtggacatcttgagatgaggtacagtagagttagtagcaggttatgttcacctacccccccccccccccccccccctaagctgctgtatatagtagtaattatcgtcctaatgattgtttcgtttagccatttgcggccgttgtttgtttatatatatctgtctcgatatctgtagttttggtttactggctacttcttagcttcagtgttgcagcagttagaattatgatggttcttctttaatttacatcttcggtggtggtaagaacaaatgctttgactgatttgtatgttggtgtcgaaatggcacgagcagaagcttatatcctgtacatagctgcattgctctctggtaattgtgat

SEQ ID NO: 31709 - DNA, 3987 bp, Zea Mays
ctgagaagtagttggtccttccataaatcatgccatacctggacagaactcccattccctgcaacaaccttcgagactcctttaaaggaggttagtgtcttctggattcccaatgtggacaactcaaatgggggagattcagttaacacagaaagggcctgccagcaagtctatggaaatacaaggacaaacaaatgttcacccggaagaaaagagacagataacagggttttgatagggaaagagggggttttataacgagaaccaaaaggggcagctccggattaagcagggaacacaaaatattgagttaacatgaatgtccatgagctagcaccagttgatagacaaggtcgttgataacctcccgaaatggaaggtctctctgatgaatcgagcaggaagactcacaaaaacatcagttcatacatttgtctaccttctgctggggctagtggaggtatccttgtggcttggagaagacatgttggggtttcaggccagaaaagacaggacactcacagtgtctcagttcagttttgcagtgaagatagaagtgcgtggtggcttacttgtgtgtatggccctccaagaaataatgaaaaggatagttttttacaagaactcagagatattagaactgcttgccctggaccttggatgatagctggagacttcaacctcatttttaaggactctgataagaataatgcaaatctgaatagagtcatgatgagaaggtttagagggctgatcgaggatcttgctcttaaagaaattcctttgcatgggaggaaatttacttggtacaaccatcaagagacacttgttctagtcaagctagaccgtgttctttgttcagttgactgggaactgctcttccccaatgttttacttcaaagtgctgcttcccaggattctgaccattgccccttgcttttggggcttagggataataaatctggaaaacgaaggtttcacttcgaatccttttggaccaagttggatggttttcaggaggttgttcattctggatggaatgcagtgataccggtcccttgcccctttaaaactgtagaattgaagctcaaagaaaccgccaaaaggttgcaggcttggagcgaaaagaaggttggtcacgtgcattctcaacttgctttgaccaaagaagttctccacagacttgaaatggctcaggattttagagtgctcattcaggctgagatttggctcaaaaaccggctgaagaagcaagctttactgctttcctctctcaagcgcaccatggctaggctcagatctagaatctcctggttaaaggagggagatgctaatacaaaactgtttcaccttcatgctcgtcatcgcaagaggaagaattttgtggctaggctggtggatggggactataccctaacaagtcatgttgaaaaggctgcttgtgtggatcgcttctataccaaccttattggaaaatgtgttgatcgtgatagggtgattgatctcgaagccctgggattgccttcttttgagctgtctgagcttgatgcccccttttctgagcaagaagtggaggatatcattaaaaggatccctgctgacgaggcccctgggcctgatggttctactggtcgcttttacaaggtatgctggcctattataaaagttgatatgatggctgcaatctccgctatttggggtaggaagtttgataattttgggcgccttaattctgcatatataaccatgatcccaaagaatgatggagctgaaatggtgaaggatttcaggcctatcagccttgtgcatagcttcgctaagctgatcacaaagatcctagccaataggttggctaaaaggcttaatgagatggtgtcacctaaccagagtgcgttcattaaaggtagattcatccaggacaattttatgttggttcaacaaacctcaagactgcttcaccaacagcataaggcttctttgctctacaagttggatattactaaggctttcgactcgatttcttggcctttcctagttgaagtattgaagcagcttggttttggtcagatttggagggatattatttgtggtttgttgacctcttcctctactcaagtgatgctgaatgggtttccaggacagcacatcatccaccggagaggacttcggcaaggggatcccctatctcctttattgtttattcttgccatggacgtcctagtatatatgttttccaaggcagaggaggagggtttactccagcagttatccaacaggaaaaagctccatcggatctcctgatatgctgatgatgttgccctttttgttcacccatcagcagcagatttatctatcactcttggcattcttcagctttttggggatacctctgggctgcacaataatgcccagaaatctaatgtcattcctatcagatgctcaatggaggatatggtggaaacccaaggtctgctgccttgtggaatatcttcgttcccctgccgttatttgggtcttcctttatccttgcacaagctgtctaggcagcacctccaaccttttattgatagaattgctgaccagctatcaaattggaaggcagacttattgacgaaggcagggagaagaaccctagttcagcatgttcttaccagcatgacggtttatatggcaatggcagtggatatcccacaatggggtttagatgccattgacagattaaggaaaggtttcctttggcgaggtcgaaaaaaggtaaatggggggcactgccttgtggcttggagaaaggtttgccgccctcctcagcttggtgggctgggtatctccagtttaaaagaactctgttgggctcttcgaatgagatggttatggctgtctaaaacagacccctccaggccctggattggtctcccaatgaaaatcccaaaaaaggccacttccttctttaatgaggtagtgctcactgaagttggtgacggggccagcaccaaattctggaaagacaagtggttacacggtaaaaaaattgcagacctggcacctagacttctagctacaattcctaagcggattgtgaacagcagaactgtgattgaagctttgactaacagaaaatggattgccgatataaaaggggctctctcagtgggtgtgttgattgattaccttcagctatgggagatgctctcagccattgagctgtagcctggagttgaagacagacatattttcagtattgccccagatggaatgtattctgcaaaatctgcttataatggactgttcatgggttcagtttcctttggacacatcacaagggtttggaaaacctgggccccgtcaaagtgtcgttttttcatttggcttgctgcccataatagatgctggacatcagatcgtttagctaagaaaggcctaaaccaccatgagaaatgtctgctttgtgaccaagctgaagaaacccttgatcatcttcttgtggtttgctccttctcgagagtcttttggtaccagcttttctggaaatttgggcttcacaccctagctccccagccggcggtcacctccttcttgaattggtgggaggaggtttcagaggtggtctcaggtgtcaccagaaaaggccttaactccctcattatcctgggtgcttggactatttggattcatcggaacaaatgtgtcttcgatggattgtctccttgcctcacctatatccttgcttgggcagacaaggagagaagtcgttgggaggcagctggggcgaaggccctatgttctctggctgcttctgcagctgctccctagagtggtgtgttgtttgatgagttctgttttgatgagttctgttttgtatgctattttctggcccccgtgaggaggcctgctgttgtttggtctattttaaacctttttcctatcttcttaatatataaaggggcgcagctctcctgcgcgttttcgagaaaaaaaaatggaaggcct

SEQ ID NO: 31710 - DNA, 3323 bp, Zea Mays
accaggacaggcgggagcgctgaaccgtggcggtgaccggccgccggtggctgggcccagcgttagcattgggtcgggacggtagggccgcatgtgggccgcccagccgataaggccacactgctgcagcagagaggcccgtttggtccttttcttccggattttatttatttatagattcatctccaagcagaggtttggattctgcttatcccctcagattcttgaacagatctggagttagttcctaccacgaaaatatctagggcggtttcctatcctataaatatgcaacttggattctatggtgcccaccgtcagaggagcacatgtttgcggtgctagggttttgttttgtcatctgccacaagcgattgacatatcggaggattggtcatataaaaatcccttaaaagccttggggttggttgatgtgatccatatcaaaagtaggatctgcagttggaaggcaagaagaaaaacgatctgttcataccaagaccattcaaagtcttggagccttttcttttatacgatttatctacagcactgcagttgaaaggcaactagggaaaaaaagattgaactgcattctagaggtttgcaaaattgcaaccgcccccaccacatgtgcacgtcctcactaatcgttcccaccgcttgtcacttaacatcaaccgcctcgaggaactgtcgacggactacatggacgcggagagagacatcaagcccttcgtctcccctatcatggccaccaccatccagcataggcggagcctccatggccccaacgcttctcagccaactgcattggcatcggagcacgatggcactccagtgttaccgcaaactcagcctcaagcagcatgcgtcttgaacaaggccgcttcagaggtgtcaggtgacgtcagcgaccagtccattagtgcctacgagacactcgagggtacctcgactcgtcggccttgctctgcaccacgattgagcaggaaattctggggcgccggcgattatgacgcggcggcggggaggtccacgccacaacctctaagtctacagaatcgcatgtgcgtccaccccgaatttctccactctaatgcgacttcacataagtggccgtttggagccttggcagagttgttggacaatgcagtcgatgagatagaaactggtggtgctacaacaatattgttggacaaagtcaccgacaaacggaatggatcaccagctatactaattcaagatgatggtggaggcatggatcctgattctttgaggcggtgtatgagctttggattttcagagaaacaatcaggatcttcgattggacaatatggaaatggttttaagactagcacaatgcggcttggggcagatgttattgttttcagtcgctgcactaagagcagtgggcctacacaatccattggtctcctctcttacactttcttggtggaaactggacatacagatgttgtagttcctgtggtggattataaatgcaatctaatgaaaggacaaactcaacgactggagcgtcatggttcggaacaattcttctcaaatttgtcagcattgttgaaatggtccccttttgcaacagaagaagagctgatgcagaatttctgtgacattggtccacatggcaccaagattatagtgttcaatctgtggtccaacgacgatggtaatttggagctcgactttgacacagatccggaggatattatgattagtggagcgccaaatccagaagaaattagaaattctgtaaaaagggctaatgagaaccatttggcaaatcgactacgctattctcttagggtctatgcttctgtgttgtatctgcagctaccagattactttaggatcatacttcgagggcaagaagttaagcgtcatcgcattgccgctgacctaatatatcctgaatgcatcagttataaaccacatagttgtggaataaaagaggctacggttcttacaaccattggattcttaaagggtgccccaactattagcgtgcacggatttaatatctatcataaaaatcgccttattttgccatttcatagagttctgaatacttcaagcagcaaaggtagaagcgtctctggggtgttggaggtagacttcatcaagcccactcatgacaaacaggactttgagaagtcacagctgttccagaagctgatcaaccgcctgaaggagatgactaacgagtactgggaactttacagtgacaagattggatacatgaaaaagccacgcgtgagtgcagctcctcttcctcctccagtaatgctgccgatagcaaatggcactgctgaaccatcagataggagcgcacctgctccgacgcaacccttgaggtcgcacagcaactacttgaatgcagttccaatcgcctcagcgccccctggttttcactcagcacctgtcaaagcagagagcgttgcaccaggagcgcatatgggctactccccgtcctcgctaaacgcgcagaccatgcaagtcaacgggataaaatcgccttccatggtgcctgccaccgattcggtagacacaagaaaaaggaggaacgacgacactactactatgacggtcgcgtttaaaaggaaggctacgcaggatttggctggcagcagctgtgctactgatgagacaaaacaggtatccgggtatatggggatgggagagcgagagacgaaggaattttgcttcctgaagatggaaaaccggatgctccgtgaagagtgctcggattttgttatggcagagaaggcactacgactcaaggaacagaatttacggctcgagattgagaaggcgcgggagcaattcaagagcctactgaacgaatacgtttcgttgtcagctacgccgacacagaaacgggcgacactcccagcccaagatctgtgtttgcgcttcaatgacgactcctcgcatgacgatgaggggtattccctccccgtcgtccatggtggcgctcgacgacagggacatgttaacacactggagaaggtagaggggatttcgggaaggaagaagagaaaacaggggaaactggagacatgagggacgacctgttctctgagttctgtttagtactccctccaatttttttatttatcgcgttttagtttaaaaataaactagtggacaaatattcaaacacggagatagtattataatagattcattgtatacatgccattcaacttttctaaaattagatgcctagtttattttgatgttatggagtagcatgaaaaatgatctagccatctaattttcaaaattttgagcggcatgttttc

SEQ ID NO: 31711 - DNA, 3233 bp, Zea Mays
accaggacaggcgggagcgctgaaccgtggcggtgaccggccgccggtggctgggcccagcgttagcattgggtcgggacggtagggccgcatgtgggccgcccagccgataaggccacactgctgcagcagagaggcccgtttggtccttttcttccggattttatttatttatagattcatctccaagcagaggtttggattctgcttatcccctcagattcttgaacagatctggagttagttcctaccacgaaaatatctagggcggtttcctatcctataaatatgcaacttggattctatggtgcccaccgtcagaggagcacatgtttgcggtgctagggttttgttttgtcatctgccacaagcgattgacatatcggaggattggtcatataaaaatcccttaaaagccttggggttggttgatgtgatccatatcaaaagtaggatctgcagttggaaggcaagaagaaaaacgatctgttcataccaagaccattcaaagtcttggagccttttcttttatacgatttatctacagcactgcagttgaaaggcaactagggaaaaaaagattgaactgcattctagaggtttgcaaaattgcaaccgcccccaccacatgtgcacgtcctcactaatcgttcccaccgcttgtcacttaacatcaaccgcctcgaggaactgtcgacggactacatggacgcggagagagacatcaagcccttcgtctcccctatcatggccaccaccatccagcataggcggagcctccatggccccaacgcttctcagccaactgcattggcatcggagcacgatggcactccagtgttaccgcaaactcagcctcaagcagcatgcgtcttgaacaaggccgcttcagaggtgtcaggtgacgtcagcgaccagtccattagtgcctacgagacactcgagggtacctcgactcgtcggccttgctctgcaccacgattgagcaggaaattctggggcgccggcgattatgacgcggcggcggggaggtccacgccacaacctctaagtctacagaatcgcatgtgcgtccaccccgaatttctccactctaatgcgacttcacataagtggccgtttggagccttggcagagttgttggacaatgcagtcgatgagatagaaactggtggtgctacaacaatattgttggacaaagtcaccgacaaacggaatggatcaccagctatactaattcaagatggaaatggttttaagactagcacaatgcggcttggggcagatgttattgttttcagtcgctgcactaagagcagtgggcctacacaatccattggtctcctctcttacactttcttggtggaaactggacatacagatgttgtagttcctgtggtggattataaatgcaatctaatgaaaggacaaactcaacgactggagcgtcatggttcggaacaattcttctcaaatttgtcagcattgttgaaatggtccccttttgcaacagaagaagagctgatgcagaatttctgtgacattggtccacatggcaccaagattatagtgttcaatctgtggtccaacgacgatggtaatttggagctcgactttgacacagatccggaggatattatgattagtggagcgccaaatccagaagaaattagaaattctgtaaaaagggctaatgagaaccatttggcaaatcgactacgctattctcttagggtctatgcttctgtgttgtatctgcagctaccagattactttaggatcatacttcgagggcaagaagttaagcgtcatcgcattgccgctgacctaatatatcctgaatgcatcagttataaaccacatagttgtggaataaaagaggctacggttcttacaaccattggattcttaaagggtgccccaactattagcgtgcacggatttaatatctatcataaaaatcgccttattttgccatttcatagagttctgaatacttcaagcagcaaaggtagaagcgtctctggggtgttggaggtagacttcatcaagcccactcatgacaaacaggactttgagaagtcacagctgttccagaagctgatcaaccgcctgaaggagatgactaacgagtactgggaactttacagtgacaagattggatacatgaaaaagccacgcgtgagtgcagctcctcttcctcctccagtaatgctgccgatagcaaatggcactgctgaaccatcagataggagcgcacctgctccgacgcaacccttgaggtcgcacagcaactacttgaatgcagttccaatcgcctcagcgccccctggttttcactcagcacctgtcaaagcagagagcgttgcaccaggagcgcatatgggctactccccgtcctcgctaaacgcgcagaccatgcaagtcaacgggataaaatcgccttccatggtgcctgccaccgattcggtagacacaagaaaaaggaggaacgacgacactactactatgacggtcgcgtttaaaaggaaggctacgcaggatttggctggcagcagctgtgctactgatgagacaaaacaggtatccgggtatatggggatgggagagcgagagacgaaggaattttgcttcctgaagatggaaaaccggatgctccgtgaagagtgctcggattttgttatggcagagaaggcactacgactcaaggaacagaatttacggctcgagattgagaaggcgcgggagcaattcaagagcctactgaacgaatacgtttcgttgtcagctacgccgacacagaaacgggcgacactcccagcccaagatctgtgtttgcgcttcaatgacgactcctcgcatgacgatgaggggtattccctccccgtcgtccatggtggcgctcgacgacagggacatgttaacacactggagaaggtagaggggatttcgggaaggaagaagagaaaacaggggaaactggagacatgagggacgacctgttctctgagttctgtttagtactccctccaatttttttatttatcgcgttttagtttaaaaataaactagtggacaaatattcaaacacggagatagtattataatagattcattgtatacatgccattcaacttttctaaaattagatgcctagtttattttgatgttatggagtagcatgaaaaatgatctagccatctaattttcaaaattttgagcggcatgttttc

SEQ ID NO: 31712 - DNA, 3877 bp, Zea Mays
accaggacaggcgggagcgctgaaccgtggcggtgaccggccgccggtggctgggcccagcgttagcattgggtcgggacggtagggccgcatgtgggccgcccagccgataaggccacactgctgcagcagagaggcccgtttggtccttttcttccggattttatttatttatagattcatctccaagcagaggtttggattctgcttatcccctcagattcttgaacagatctggagttagttcctaccacgaaaatatctagggcggtttcctatcctataaatatgcaacttggattctatggtgcccaccgtcagaggagcacatgtttgcggtgctagggttttgttttgtcatctgccacaagcgattgacatatcggaggattggtcatataaaaatcccttaaaagccttggggttggttgatgtgatccatatcaaaagtaggatctgcagttggaaggcaagaagaaaaacgatctgttcataccaagaccattcaaagtcttggagccttttcttttatacgatttatctacagcactgcagttgaaaggcaactagggaaaaaaagattgaactgcattctagaggtttgcaaaattgcaaccgcccccaccacatgtgcacgtcctcactaatcgttcccaccgcttgtcacttaacatcaaccgcctcgaggaactgtcgacggactacatggacgcggagagagacatcaagcccttcgtctcccctatcatggccaccaccatccagcataggcggagcctccatggccccaacgcttctcagccaactgcattggcatcggagcacgatggcactccagtgttaccgcaaactcagcctcaagcagcatgcgtcttgaacaaggccgcttcagaggtgtcaggtgacgtcagcgaccagtccattagtgcctacgagacactcgagggtacctcgactcgtcggccttgctctgcaccacgattgagcaggaaattctggggcgccggcgattatgacgcggcggcggggaggtccacgccacaacctctaagtctacagaatcgcatgtgcgtccaccccgaatttctccactctaatgcgacttcacataagtggccgtttggagccttggcagagttgttggacaatgcagtcgatgagatagaaactggtggtgctacaacaatattgttggacaaagtcaccgacaaacggaatggatcaccagctatactaattcaagatggaaatggttttaagactagcacaatgcggcttggggcagatgttattgttttcagtcgctgcactaagagcagtgggcctacacaatccattggtctcctctcttacactttcttggtggaaactggacatacagatgttgtagttcctgtggtggattataaatgcaatctaatgaaaggacaaactcaacgactggagcgtcatggttcggaacaattcttctcaaatttgtcagcattgttgaaatggtccccttttgcaacagaagaagagctgatgcagaatttctgtgacattggtccacatggcaccaagattatagtgttcaatctgtggtccaacgacgatggtaatttggagctcgactttgacacagatccggaggatattatgattagtggagcgccaaatccagaagaaattagaaattctgtaaaaagggctaatgagaaccatttggcaaatcgactacgctattctcttagggtctatgcttctgtgttgtatctgcagctaccagattactttaggatcatacttcgagggcaagaagttaagcgtcatcgcattgccgctgacctaatatatcctgaatgcatcagttataaaccacatagttgtggaataaaagaggctacggttcttacaaccattggattcttaaagggtgccccaactattagcgtgcacggatttaatatctatcataaaaatcgccttattttgccatttcatagagttctgaatacttcaagcagcaaaggtagaagcgtctctggggtgttggaggtagacttcatcaagcccactcatgacaaacaggactttgagaagtcacagctgttccagaagctgatcaaccgcctgaaggagatgactaacgagtactgggaactttacagtgacaagattggatacatgaaaaagccacgcgtgagtgcagctcctcttcctcctccagtaatgctgccgatagcaaatggcactgctgaaccatcagataggagcgcacctgctccgacgcaacccttgaggtcgcacagcaactacttgaatgcagttccaatcgcctcagcgccccctggttttcactcagcacctgtcaaagcagagagcgttgcaccaggagcgcatatgggctactccccgtcctcgctaaacgcgcagaccatgcaagtcaacgggataaaatcgccttccatggtgcctgccaccgattcggtagacacaagaaaaaggaggaacgacgacactactactatgacggtcgcgtttaaaaggaaggctacgcaggatttggctggcagcagctgtgctactgatgagacaaaacaggtatccgggtatatggggatgggagagcgagagacgaaggaattttgcttcctgaagatggaaaaccggatgctccgtgaagagtgctcggattttgttatggcagagaaggcactacgactcaaggaacagaatttacggctcgagattgagaaggcgcgggagcaattcaagagcctactgaacgaatacgtttcgttgtcagctacgccgacacagaaacggtaggcatcgtcccgaagccaccggccgtggccggcggcttgtgcactcgtgctagctcttcacgacatgtgggtatgttcagaatgccagagaaccgaatgctagcaaggaagcggtgatgcttctggacggctttgccggtggcggtgtagacatagcgcgaaaggcgtgtgtaccaagctctcagaaactcgactttggtttattctccagtgtcgagtgattagatactgtacatacttgtaaaacaagaggtcaccttttctgtgtgacgaaaaaatatatatatttcgaaaattgagaacctgagacgtaaaatggaaaacagtgtactgtttcagttttctgtgagatcttggttcagggcagagctatgcgtgagtgtgaccgttgggtgagccggtgaggtgagcctcccccgcgccggtggtggccactctggccccggcgtccacccaccaggccgccggcgacctctacggtcctggcgccctcgctgcttgacctgcttctcttgccactccgtgtcgggcccaaatcgtgtccgtgctgcctccggcgatgagagtggtagcggctccttccggggttcccgctctggtctcaaaccggatgcctctcctttcgtctgtgcctctcgcagggcgacactcccagcccaagatctgtgtttgcgcttcaatgacgactcctcgcatgacgatgaggggtattccctccccgtcgtccatggtggcgctcgacgacagggacatgttaacacactggagaaggtagaggggatttcgggaaggaagaagagaaaacaggggaaactggagacatgagggacgacctgttctctgagttctgtttagtactccctccaatttttttatttatcgcgttttagtttaaaaataaactagtggacaaatattcaaacacggagatagtattataatagattcattgtatacatgccattcaacttttctaaaattagatgcctagtttattttgatgttatggagtagcatgaaaaatgatctagccatctaattttcaaaattttgagcggcatgttttc

SEQ ID NO: 31713 - DNA, 3967 bp, Zea Mays
accaggacaggcgggagcgctgaaccgtggcggtgaccggccgccggtggctgggcccagcgttagcattgggtcgggacggtagggccgcatgtgggccgcccagccgataaggccacactgctgcagcagagaggcccgtttggtccttttcttccggattttatttatttatagattcatctccaagcagaggtttggattctgcttatcccctcagattcttgaacagatctggagttagttcctaccacgaaaatatctagggcggtttcctatcctataaatatgcaacttggattctatggtgcccaccgtcagaggagcacatgtttgcggtgctagggttttgttttgtcatctgccacaagcgattgacatatcggaggattggtcatataaaaatcccttaaaagccttggggttggttgatgtgatccatatcaaaagtaggatctgcagttggaaggcaagaagaaaaacgatctgttcataccaagaccattcaaagtcttggagccttttcttttatacgatttatctacagcactgcagttgaaaggcaactagggaaaaaaagattgaactgcattctagaggtttgcaaaattgcaaccgcccccaccacatgtgcacgtcctcactaatcgttcccaccgcttgtcacttaacatcaaccgcctcgaggaactgtcgacggactacatggacgcggagagagacatcaagcccttcgtctcccctatcatggccaccaccatccagcataggcggagcctccatggccccaacgcttctcagccaactgcattggcatcggagcacgatggcactccagtgttaccgcaaactcagcctcaagcagcatgcgtcttgaacaaggccgcttcagaggtgtcaggtgacgtcagcgaccagtccattagtgcctacgagacactcgagggtacctcgactcgtcggccttgctctgcaccacgattgagcaggaaattctggggcgccggcgattatgacgcggcggcggggaggtccacgccacaacctctaagtctacagaatcgcatgtgcgtccaccccgaatttctccactctaatgcgacttcacataagtggccgtttggagccttggcagagttgttggacaatgcagtcgatgagatagaaactggtggtgctacaacaatattgttggacaaagtcaccgacaaacggaatggatcaccagctatactaattcaagatgatggtggaggcatggatcctgattctttgaggcggtgtatgagctttggattttcagagaaacaatcaggatcttcgattggacaatatggaaatggttttaagactagcacaatgcggcttggggcagatgttattgttttcagtcgctgcactaagagcagtgggcctacacaatccattggtctcctctcttacactttcttggtggaaactggacatacagatgttgtagttcctgtggtggattataaatgcaatctaatgaaaggacaaactcaacgactggagcgtcatggttcggaacaattcttctcaaatttgtcagcattgttgaaatggtccccttttgcaacagaagaagagctgatgcagaatttctgtgacattggtccacatggcaccaagattatagtgttcaatctgtggtccaacgacgatggtaatttggagctcgactttgacacagatccggaggatattatgattagtggagcgccaaatccagaagaaattagaaattctgtaaaaagggctaatgagaaccatttggcaaatcgactacgctattctcttagggtctatgcttctgtgttgtatctgcagctaccagattactttaggatcatacttcgagggcaagaagttaagcgtcatcgcattgccgctgacctaatatatcctgaatgcatcagttataaaccacatagttgtggaataaaagaggctacggttcttacaaccattggattcttaaagggtgccccaactattagcgtgcacggatttaatatctatcataaaaatcgccttattttgccatttcatagagttctgaatacttcaagcagcaaaggtagaagcgtctctggggtgttggaggtagacttcatcaagcccactcatgacaaacaggactttgagaagtcacagctgttccagaagctgatcaaccgcctgaaggagatgactaacgagtactgggaactttacagtgacaagattggatacatgaaaaagccacgcgtgagtgcagctcctcttcctcctccagtaatgctgccgatagcaaatggcactgctgaaccatcagataggagcgcacctgctccgacgcaacccttgaggtcgcacagcaactacttgaatgcagttccaatcgcctcagcgccccctggttttcactcagcacctgtcaaagcagagagcgttgcaccaggagcgcatatgggctactccccgtcctcgctaaacgcgcagaccatgcaagtcaacgggataaaatcgccttccatggtgcctgccaccgattcggtagacacaagaaaaaggaggaacgacgacactactactatgacggtcgcgtttaaaaggaaggctacgcaggatttggctggcagcagctgtgctactgatgagacaaaacaggtatccgggtatatggggatgggagagcgagagacgaaggaattttgcttcctgaagatggaaaaccggatgctccgtgaagagtgctcggattttgttatggcagagaaggcactacgactcaaggaacagaatttacggctcgagattgagaaggcgcgggagcaattcaagagcctactgaacgaatacgtttcgttgtcagctacgccgacacagaaacggtaggcatcgtcccgaagccaccggccgtggccggcggcttgtgcactcgtgctagctcttcacgacatgtgggtatgttcagaatgccagagaaccgaatgctagcaaggaagcggtgatgcttctggacggctttgccggtggcggtgtagacatagcgcgaaaggcgtgtgtaccaagctctcagaaactcgactttggtttattctccagtgtcgagtgattagatactgtacatacttgtaaaacaagaggtcaccttttctgtgtgacgaaaaaatatatatatttcgaaaattgagaacctgagacgtaaaatggaaaacagtgtactgtttcagttttctgtgagatcttggttcagggcagagctatgcgtgagtgtgaccgttgggtgagccggtgaggtgagcctcccccgcgccggtggtggccactctggccccggcgtccacccaccaggccgccggcgacctctacggtcctggcgccctcgctgcttgacctgcttctcttgccactccgtgtcgggcccaaatcgtgtccgtgctgcctccggcgatgagagtggtagcggctccttccggggttcccgctctggtctcaaaccggatgcctctcctttcgtctgtgcctctcgcagggcgacactcccagcccaagatctgtgtttgcgcttcaatgacgactcctcgcatgacgatgaggggtattccctccccgtcgtccatggtggcgctcgacgacagggacatgttaacacactggagaaggtagaggggatttcgggaaggaagaagagaaaacaggggaaactggagacatgagggacgacctgttctctgagttctgtttagtactccctccaatttttttatttatcgcgttttagtttaaaaataaactagtggacaaatattcaaacacggagatagtattataatagattcattgtatacatgccattcaacttttctaaaattagatgcctagtttattttgatgttatggagtagcatgaaaaatgatctagccatctaattttcaaaattttgagcggcatgttttc

SEQ ID NO: 31714 - DNA, 3224 bp, Zea Mays
accaggacaggcgggagcgctgaaccgtggcggtgaccggccgccggtggctgggcccagcgttagcattgggtcgggacggtagggccgcatgtgggccgcccagccgataaggccacactgctgcagcagagaggcccgtttggtccttttcttccggattttatttatttatagattcatctccaagcagaggtttggattctgcttatcccctcagattcttgaacagatctggagttagttcctaccacgaaaatatctagggcggtttcctatcctataaatatgcaacttggattctatggtgcccaccgtcagaggagcacatgtttgcggtgctagggttttgttttgtcatctgccacaagcgattgacatatcggaggattggtcatataaaaatcccttaaaagccttggggttggttgatgtgatccatatcaaaagtaggatctgcagttggaaggcaagaagaaaaacgatctgttcataccaagaccattcaaagtcttggagccttttcttttatacgatttatctacagcactgcagttgaaaggcaactagggaaaaaaagattgaactgcattctagaggtttgcaaaattgcaaccgcccccaccacatgtgcacgtcctcactaatcgttcccaccgcttgtcacttaacatcaaccgcctcgaggaactgtcgacggactacatggacgcggagagagacatcaagcccttcgtctcccctatcatggccaccaccatccagcataggcggagcctccatggccccaacgcttctcagccaactgcattggcatcggagcacgatggcactccagtgttaccgcaaactcagcctcaagcagcatgcgtcttgaacaaggccgcttcagaggtgtcaggtgacgtcagcgaccagtccattagtgcctacgagacactcgagggtacctcgactcgtcggccttgctctgcaccacgattgagcaggaaattctggggcgccggcgattatgacgcggcggcggggaggtccacgccacaacctctaagtctacagaatcgcatgtgcgtccaccccgaatttctccactctaatgcgacttcacataagtggccgtttggagccttggcagagttgttggacaatgcagtcgatgagatagaaactggtggtgctacaacaatattgttggacaaagtcaccgacaaacggaatggatcaccagctatactaattcaagatggaaatggttttaagactagcacaatgcggcttggggcagatgttattgttttcagtcgctgcactaagagcagtgggcctacacaatccattggtctcctctcttacactttcttggtggaaactggacatacagatgttgtagttcctgtggtggattataaatgcaatctaatgaaaggacaaactcaacgactggagcgtcatggttcggaacaattcttctcaaatttgtcagcattgttgaaatggtccccttttgcaacagaagaagagctgatgcagaatttctgtgacattggtccacatggcaccaagattatagtgttcaatctgtggtccaacgacgatggtaatttggagctcgactttgacacagatccggaggatattatgattagtggagcgccaaatccagaagaaattagaaattctgtaaaaagggctaatgagaaccatttggcaaatcgactacgctattctcttagggtctatgcttctgtgttgtatctgcagctaccagattactttaggatcatacttcgagggcaagaagttaagcgtcatcgcattgccgctgacctaatatatcctgaatgcatcagttataaaccacatagttgtggaataaaagaggctacggttcttacaaccattggattcttaaagggtgccccaactattagcgtgcacggatttaatatctatcataaaaatcgccttattttgccatttcatagagttctgaatacttcaagcagcaaaggtagaagcgtctctggggtgttggaggtagacttcatcaagcccactcatgacaaacaggactttgagaagtcacagctgttccagaagctgatcaaccgcctgaaggagatgactaacgagtactgggaactttacagtgacaagattggatacatgaaaaagccacgcgtgagtgcagctcctcttcctcctccagtaatgctgccgatagcaaatggcactgctgaaccatcagataggagcgcacctgctccgacgcaacccttgaggtcgcacagcaactacttgaatgcagttccaatcgcctcagcgccccctggttttcactcagcacctgtcaaagcagagagcgttgcaccaggagcgcatatgggctactccccgtcctcgctaaacgcgcagaccatgcaagtcaacgggataaaatcgccttccatggtgcctgccaccgattcggtagacacaagaaaaaggaggaacgacgacactactactatgacggtcgcgtttaaaaggaaggctacgcaggatttggctggcagcagctgtgctactgatgaggtatccgggtatatggggatgggagagcgagagacgaaggaattttgcttcctgaagatggaaaaccggatgctccgtgaagagtgctcggattttgttatggcagagaaggcactacgactcaaggaacagaatttacggctcgagattgagaaggcgcgggagcaattcaagagcctactgaacgaatacgtttcgttgtcagctacgccgacacagaaacgggcgacactcccagcccaagatctgtgtttgcgcttcaatgacgactcctcgcatgacgatgaggggtattccctccccgtcgtccatggtggcgctcgacgacagggacatgttaacacactggagaaggtagaggggatttcgggaaggaagaagagaaaacaggggaaactggagacatgagggacgacctgttctctgagttctgtttagtactccctccaatttttttatttatcgcgttttagtttaaaaataaactagtggacaaatattcaaacacggagatagtattataatagattcattgtatacatgccattcaacttttctaaaattagatgcctagtttattttgatgttatggagtagcatgaaaaatgatctagccatctaattttcaaaattttgagcggcatgttttc

SEQ ID NO: 31715 - DNA, 3758 bp, Zea Mays
accaggacaggcgggagcgctgaaccgtggcggtgaccggccgccggtggctgggcccagcgttagcattgggtcgggacggtagggccgcatgtgggccgcccagccgataaggccacactgctgcagcagagaggcccgtttggtccttttcttccggattttatttatttatagattcatctccaagcagaggtttggattctgcttatcccctcagattcttgaacagatctggagttagttcctaccacgaaaatatctagggcggtttcctatcctataaatatgcaacttggattctatggtgcccaccgtcagaggagcacatgtttgcggtgctagggttttgttttgtcatctgccacaagcgattgacatatcggaggattggtcatataaaaatcccttaaaagccttggggttggttgatgtgatccatatcaaaagtaggatctgcagttggaaggcaagaagaaaaacgatctgttcataccaagaccattcaaagtcttggagccttttcttttatacgatttatctacagcactgcagttgaaaggcaactagggaaaaaaagattgaactgcattctagaggtttgcaaaattgcaaccgcccccaccacatgtgcacgtcctcactaatcgttcccaccgcttgtcacttaacatcaaccgcctcgaggaactgtcgacggactacatggacgcggagagagacatcaagcccttcgtctcccctatcatggccaccaccatccagcataggcggagcctccatggccccaacgcttctcagccaactgcattggcatcggagcacgatggcactccagtgttaccgcaaactcagcctcaagcagcatgcgtcttgaacaaggccgcttcagaggtgtcaggtgacgtcagcgaccagtccattagtgcctacgagacactcgagggtacctcgactcgtcggccttgctctgcaccacgattgagcaggaaattctggggcgccggcgattatgacgcggcggcggggaggtccacgccacaacctctaagtctacagaatcgcatgtgcgtccaccccgaatttctccactctaatgcgacttcacataagtggccgtttggagccttggcagagttgttggacaatgcagtcgatgagatagaaactggtggtgctacaacaatattgttggacaaagtcaccgacaaacggaatggatcaccagctatactaattcaagatggaaatggttttaagactagcacaatgcggcttggggcagatgttattgttttcagtcgctgcactaagagcagtgggcctacacaatccattggtctcctctcttacactttcttggtggaaactggacatacagatgttgtagttcctgtggtggattataaatgcaatctaatgaaaggacaaactcaacgactggagcgtcatggttcggaacaattcttctcaaatttgtcagcattgttgaaatggtccccttttgcaacagaagaagagctgatgcagaatttctgtgacattggtccacatggcaccaagattatagtgttcaatctgtggtccaacgacgatggtaatttggagctcgactttgacacagatccggaggatattatgattagtggagcgccaaatccagaagaaattagaaattctgtaaaaagggctaatgagaaccatttggcaaatcgactacgctattctcttaggctaccagattactttaggatcatacttcgagggcaagaagttaagcgtcatcgcattgccgctgacctaatatatcctgaatgcatcagttataaaccacatagttgtggaataaaagaggctacggttcttacaaccattggattcttaaagggtgccccaactattagcgtgcacggatttaatatctatcataaaaatcgccttattttgccatttcatagagttctgaatacttcaagcagcaaaggtagaagcgtctctggggtgttggaggtagacttcatcaagcccactcatgacaaacaggactttgagaagtcacagctgttccagaagctgatcaaccgcctgaaggagatgactaacgagtactgggaactttacagtgacaagattggatacatgaaaaagccacgcgtgagtgcagctcctcttcctcctccagtaatgctgccgatagcaaatggcactgctgaaccatcagataggagcgcacctgctccgacgcaacccttgaggtcgcacagcaactacttgaatgcagttccaatcgcctcagcgccccctggttttcactcagcacctgtcaaagcagagagcgttgcaccaggagcgcatatgggctactccccgtcctcgctaaacgcgcagaccatgcaagtcaacgggataaaatcgccttccatggtgcctgccaccgattcggtagacacaagaaaaaggaggaacgacgacactactactatgacggtcgcgtttaaaaggaaggctacgcaggatttggctggcagcagctgtgctactgatgaggtgctcggattttgttatggcagagaaggcactacgactcaaggaacagaatttacggctcgagattgagaaggcgcgggagcaattcaagagcctactgaacgaatacgtttcgttgtcagctacgccgacacagaaacggtaggcatcgtcccgaagccaccggccgtggccggcggcttgtgcactcgtgctagctcttcacgacatgtgggtatgttcagaatgccagagaaccgaatgctagcaaggaagcggtgatgcttctggacggctttgccggtggcggtgtagacatagcgcgaaaggcgtgtgtaccaagctctcagaaactcgactttggtttattctccagtgtcgagtgattagatactgtacatacttgtaaaacaagaggtcaccttttctgtgtgacgaaaaaatatatatatttcgaaaattgagaacctgagacgtaaaatggaaaacagtgtactgtttcagttttctgtgagatcttggttcagggcagagctatgcgtgagtgtgaccgttgggtgagccggtgaggtgagcctcccccgcgccggtggtggccactctggccccggcgtccacccaccaggccgccggcgacctctacggtcctggcgccctcgctgcttgacctgcttctcttgccactccgtgtcgggcccaaatcgtgtccgtgctgcctccggcgatgagagtggtagcggctccttccggggttcccgctctggtctcaaaccggatgcctctcctttcgtctgtgcctctcgcagggcgacactcccagcccaagatctgtgtttgcgcttcaatgacgactcctcgcatgacgatgaggggtattccctccccgtcgtccatggtggcgctcgacgacagggacatgttaacacactggagaaggtagaggggatttcgggaaggaagaagagaaaacaggggaaactggagacatgagggacgacctgttctctgagttctgtttagtactccctccaatttttttatttatcgcgttttagtttaaaaataaactagtggacaaatattcaaacacggagatagtattataatagattcattgtatacatgccattcaacttttctaaaattagatgcctagtttattttgatgttatggagtagcatgaaaaatgatctagccatctaattttcaaaattttgagcggcatgttttc

SEQ ID NO: 31716 - DNA, 3841 bp, Zea Mays
accaggacaggcgggagcgctgaaccgtggcggtgaccggccgccggtggctgggcccagcgttagcattgggtcgggacggtagggccgcatgtgggccgcccagccgataaggccacactgctgcagcagagaggcccgtttggtccttttcttccggattttatttatttatagattcatctccaagcagaggtttggattctgcttatcccctcagattcttgaacagatctggagttagttcctaccacgaaaatatctagggcggtttcctatcctataaatatgcaacttggattctatggtgcccaccgtcagaggagcacatgtttgcggtgctagggttttgttttgtcatctgccacaagcgattgacatatcggaggattggtcatataaaaatcccttaaaagccttggggttggttgatgtgatccatatcaaaagtaggatctgcagttggaaggcaagaagaaaaacgatctgttcataccaagaccattcaaagtcttggagccttttcttttatacgatttatctacagcactgcagttgaaaggcaactagggaaaaaaagattgaactgcattctagaggtttgcaaaattgcaaccgcccccaccacatgtgcacgtcctcactaatcgttcccaccgcttgtcacttaacatcaaccgcctcgaggaactgtcgacggactacatggacgcggagagagacatcaagcccttcgtctcccctatcatggccaccaccatccagcataggcggagcctccatggccccaacgcttctcagccaactgcattggcatcggagcacgatggcactccagtgttaccgcaaactcagcctcaagcagcatgcgtcttgaacaaggccgcttcagaggtgtcaggtgacgtcagcgaccagtccattagtgcctacgagacactcgagggtacctcgactcgtcggccttgctctgcaccacgattgagcaggaaattctggggcgccggcgattatgacgcggcggcggggaggtccacgccacaacctctaagtctacagaatcgcatgtgcgtccaccccgaatttctccactctaatgcgacttcacataagtggccgtttggagccttggcagagttgttggacaatgcagtcgatgagatagaaactggtggtgctacaacaatattgttggacaaagtcaccgacaaacggaatggatcaccagctatactaattcaagatggaaatggttttaagactagcacaatgcggcttggggcagatgttattgttttcagtcgctgcactaagagcagtgggcctacacaatccattggtctcctctcttacactttcttggtggaaactggacatacagatgttgtagttcctgtggtggattataaatgcaatctaatgaaaggacaaactcaacgactggagcgtcatggttcggaacaattcttctcaaatttgtcagcattgttgaaatggtccccttttgcaacagaagaagagctgatgcagaatttctgtgacattggtccacatggcaccaagattatagtgttcaatctgtggtccaacgacgatggtaatttggagctcgactttgacacagatccggaggatattatgattagtggagcgccaaatccagaagaaattagaaattctgtaaaaagggctaatgagaaccatttggcaaatcgactacgctattctcttaggctaccagattactttaggatcatacttcgagggcaagaagttaagcgtcatcgcattgccgctgacctaatatatcctgaatgcatcagttataaaccacatagttgtggaataaaagaggctacggttcttacaaccattggattcttaaagggtgccccaactattagcgtgcacggatttaatatctatcataaaaatcgccttattttgccatttcatagagttctgaatacttcaagcagcaaaggtagaagcgtctctggggtgttggaggtagacttcatcaagcccactcatgacaaacaggactttgagaagtcacagctgttccagaagctgatcaaccgcctgaaggagatgactaacgagtactgggaactttacagtgacaagattggatacatgaaaaagccacgcgtgagtgcagctcctcttcctcctccagtaatgctgccgatagcaaatggcactgctgaaccatcagataggagcgcacctgctccgacgcaacccttgaggtcgcacagcaactacttgaatgcagttccaatcgcctcagcgccccctggttttcactcagcacctgtcaaagcagagagcgttgcaccaggagcgcatatgggctactccccgtcctcgctaaacgcgcagaccatgcaagtcaacgggataaaatcgccttccatggtgcctgccaccgattcggtagacacaagaaaaaggaggaacgacgacactactactatgacggtcgcgtttaaaaggaaggctacgcaggatttggctggcagcagctgtgctactgatgaggtatccgggtatatggggatgggagagcgagagacgaaggaattttgcttcctgaagatggaaaaccggatgctccgtgaagagtgctcggattttgttatggcagagaaggcactacgactcaaggaacagaatttacggctcgagattgagaaggcgcgggagcaattcaagagcctactgaacgaatacgtttcgttgtcagctacgccgacacagaaacggtaggcatcgtcccgaagccaccggccgtggccggcggcttgtgcactcgtgctagctcttcacgacatgtgggtatgttcagaatgccagagaaccgaatgctagcaaggaagcggtgatgcttctggacggctttgccggtggcggtgtagacatagcgcgaaaggcgtgtgtaccaagctctcagaaactcgactttggtttattctccagtgtcgagtgattagatactgtacatacttgtaaaacaagaggtcaccttttctgtgtgacgaaaaaatatatatatttcgaaaattgagaacctgagacgtaaaatggaaaacagtgtactgtttcagttttctgtgagatcttggttcagggcagagctatgcgtgagtgtgaccgttgggtgagccggtgaggtgagcctcccccgcgccggtggtggccactctggccccggcgtccacccaccaggccgccggcgacctctacggtcctggcgccctcgctgcttgacctgcttctcttgccactccgtgtcgggcccaaatcgtgtccgtgctgcctccggcgatgagagtggtagcggctccttccggggttcccgctctggtctcaaaccggatgcctctcctttcgtctgtgcctctcgcagggcgacactcccagcccaagatctgtgtttgcgcttcaatgacgactcctcgcatgacgatgaggggtattccctccccgtcgtccatggtggcgctcgacgacagggacatgttaacacactggagaaggtagaggggatttcgggaaggaagaagagaaaacaggggaaactggagacatgagggacgacctgttctctgagttctgtttagtactccctccaatttttttatttatcgcgttttagtttaaaaataaactagtggacaaatattcaaacacggagatagtattataatagattcattgtatacatgccattcaacttttctaaaattagatgcctagtttattttgatgttatggagtagcatgaaaaatgatctagccatctaattttcaaaattttgagcggcatgttttc

SEQ ID NO: 31717 - DNA, 2864 bp, Zea Mays
atggcgacgacacatagggaggggttgacagcagcgacatcgacaacacgagtgagggagaggtggcggcagggacgcaaggggatgggagaggaggttgttgcggtggggtcgcgagggcggggagggatgaggaatgatccaaataatattgtccattggatttggtctgagtgtaatttgtttggtggatttagtggaggttatggatgtgtgggtgatttggttgtgtttgcaaaattgcaaccgcccccaccacatgtgcacgtcctcactaatcgttcccaccgcttgtcacttaacatcaaccgcctcgaggaactgtcgacggactacatggacgcggagagagacatcaagcccttcgtctcccctatcatggccaccaccatccagcataggcggagcctccatggccccaacgcttctcagccaactgcattggcatcggagcacgatggcactccagtgttaccgcaaactcagcctcaagcagcatgcgtcttgaacaaggccgcttcagaggtgtcaggtgacgtcagcgaccagtccattagtgcctacgagacactcgagggtacctcgactcgtcggccttgctctgcaccacgattgagcaggaaattctggggcgccggcgattatgacgcggcggcggggaggtccacgccacaacctctaagtctacagaatcgcatgtgcgtccaccccgaatttctccactctaatgcgacttcacataagtggccgtttggagccttggcagagttgttggacaatgcagtcgatgagatagaaactggtggtgctacaacaatattgttggacaaagtcaccgacaaacggaatggatcaccagctatactaattcaagatggaaatggttttaagactagcacaatgcggcttggggcagatgttattgttttcagtcgctgcactaagagcagtgggcctacacaatccattggtctcctctcttacactttcttggtggaaactggacatacagatgttgtagttcctgtggtggattataaatgcaatctaatgaaaggacaaactcaacgactggagcgtcatggttcggaacaattcttctcaaatttgtcagcattgttgaaatggtccccttttgcaacagaagaagagctgatgcagaatttctgtgacattggtccacatggcaccaagattatagtgttcaatctgtggtccaacgacgatggtaatttggagctcgactttgacacagatccggaggatattatgattagtggagcgccaaatccagaagaaattagaaattctgtaaaaagggctaatgagaaccatttggcaaatcgactacgctattctcttagggtctatgcttctgtgttgtatctgcagctaccagattactttaggatcatacttcgagggcaagaagttaagcgtcatcgcattgccgctgacctaatatatcctgaatgcatcagttataaaccacatagttgtggaataaaagaggctacggttcttacaaccattggattcttaaagggtgccccaactattagcgtgcacggatttaatatctatcataaaaatcgccttattttgccatttcatagagttctgaatacttcaagcagcaaaggtagaagcgtctctggggtgttggaggtagacttcatcaagcccactcatgacaaacaggactttgagaagtcacagctgttccagaagctgatcaaccgcctgaaggagatgactaacgagtactgggaactttacagtgacaagattggatacatgaaaaagccacgcgtgagtgcagctcctcttcctcctccagtaatgctgccgatagcaaatggcactgctgaaccatcagataggagcgcacctgctccgacgcaacccttgaggtcgcacagcaactacttgaatgcagttccaatcgcctcagcgccccctggttttcactcagcacctgtcaaagcagagagcgttgcaccaggagcgcatatgggctactccccgtcctcgctaaacgcgcagaccatgcaagtcaacgggataaaatcgccttccatggtgcctgccaccgattcggtagacacaagaaaaaggaggaacgacgacactactactatgacggtcgcgtttaaaaggaaggctacgcaggatttggctggcagcagctgtgctactgatgagacaaaacaggtatccgggtatatggggatgggagagcgagagacgaaggaattttgcttcctgaagatggaaaaccggatgctccgtgaagagtgctcggattttgttatggcagagaaggcactacgactcaaggaacagaatttacggctcgagattgagaaggcgcgggagcaattcaagagcctactgaacgaatacgtttcgttgtcagctacgccgacacagaaacgggcgacactcccagcccaagatctgtgtttgcgcttcaatgacgactcctcgcatgacgatgaggggtattccctccccgtcgtccatggtggcgctcgacgacagggacatgttaacacactggagaaggtagaggggatttcgggaaggaagaagagaaaacaggggaaactggagacatgagggacgacctgttctctgagttctgtttagtactccctccaatttttttatttatcgcgttttagtttaaaaataaactagtggacaaatattcaaacacggagatagtattataatagattcattgtatacatgccattcaacttttctaaaattagatgcctagtttattttgatgttatggagtagcatgaaaaatgatctagccatctaattttcaaaattttgagcggcatgttttc

SEQ ID NO: 31718 - DNA, 882 bp, Zea Mays
agtgtcgccaaatgcggtgaactcgctaccgttcactattgtctcttacctcccgcgccgccgccttctgattcactcccacgctgctcggaagtcagaaccctcttgtgttgtcgcgtcgaccgagcatcacatcgtctctgtggtatgtctccgatgacattgagctcccccccttccgcgcacgctccctcgactccccatccaatcctcacacagcaagcccccaatctctgccaccactctcgctccggcaattgttcctcgaggtatgatgtggggttcgatggtggcagcgactctgattagacggcgagggtgcggtcggaagcggtgagagggcgaggggcacaggatgggacgacttcgtgatgaatcgggcaagggtttcagcggtcgttgacctgcccccaggtttcttcaagctaatccagccaccagcccaccatcgctgccggtgccgttatcagcttatgcgacgaagcaattctggaaggccgagactacaacggaaagccgctctttgatggggtggctagcagacacgctgttgcaagagcagcatcagttaattgatcagaatgacagtgacccaatttccatgtgtgctctgcctacggcgccctcagcaaaaccaaaacctgatgttgtgctgttctcttcaattattttgttaaatttttacgttgacatgccagttatatataaagacagaagatgtataccagtcttggtatggcaacgttccttcttttaaaaaatccttgcattcttatttagtagtatgtattgttttgaaggttgtaaattatagtggatgaattcattgtgcatgcattgagcagaagccatcaccatactaaatgcagattgttctctcaa

SEQ ID NO: 31719 - DNA, 1769 bp, Zea Mays
gtcgggccactatccctctggcctcgtctcgtcttctcttctcgcgaatggcggcgctgtgcgatctccgtcgctgccccctccgccagtgatttctgggacgcgcgacgaacacgagttggaaggaggtggtcgtgctttgggcggcgaaggacctgggcgctagcagcctcagaccctgacagatcacaacctgacagatcacagcgatcacaggcgctaccaaaagcgacgggcggccgacggcggcattgcagttggagcgagcgagcgcggtgcctttcggacgacactgagcacagataatgggttcttgggaggagaatgttaggcaatttttgttggaggaggaggaagatgatgatgaactattctttgttattctccctgctataatcccatacctctcggaagagaaaagacccatccacacatcctccctcaccggtgctaaaaaggttaaagaaattcttgaagggcatgagagctggtgcaaatctgagtttagaatggaaaaggaaatattcaaagccacgtcaaattttcttagaagggagaatttactacgtgacacacgaggagttagtgttgagaagcaacttgggatgttcatgtatatgatctcccacaacgccagtaaccaaatgctacaaaaggcttttcaacacagtggagagactatccatcgaaaaatatctgaagtttttgagatagttcccatactaactcaacgatttgtgaagcttcctagctcagttcaaactcatgctaggattgcaacagattctaggttcatgcccttttttcagaattgccttggtgccattgacggcacacatgtatccatcactatcgcagaagatagggcccctccatatagaaatagaaaaggaactctttcacacaatgttatggtagtctgcgactttgatctcaattttacatttgtctcgtgtggatgggaagggtcggcatcagacgcaggggtgcttcgatctgctattagcaaaagatttagtgtgccagaaggaaagttttatcttgtagatggtgggtatgcaaatacaccatcatacattgcaccatacagaggtgttcgataccatctcagtcaatttaggaggagtcgttcatcacaaagtggttatgcaaactacaaagagttattcaatcatcgccatgcaattctccgcaaccatatagagagggccattggtgttcttaagaaaaggttcccaattctaaaagtagacacattccatcccatagaaaatcaaatcaagatcgcagctgcagccattacatttcacaacataattagagggcaaaatggtgatgaaggatggctggacaaccaactagattatatatctccaagccattacattggtgttacttggtacttgcagagtgctgagtggaagcaacatatgaagctgacacggaaaaggaaaatggatgatctccttggttatgtttccctgtcttgtgcatgctgcatttcctgctaccgtgaagaccggggtccaggagagtaggagactgaaagcactgtcgagaagactgaaattatcacattgacatgaagaccaaagccatctcttacctacttatctttgtagcttacgtttctattttattctgtcatgaaaactaaagtcttatgtatggtcattatgtactattttggttctgaaaatatttgtttatgttatgaaaactattggttgaaagaatggtgattacggttttggcttgaaggttcagaa

SEQ ID NO: 31720 - DNA, 436 bp, Zea Mays
gcgaatcaacaatggatgcgaactggacatacatggacagcttcctgacaacatggaatgagtgggagatccgcatgcttgtgctcaccagcctcgccctccaggtgttcctcctcttctccgccggcatccgcaagcgtaacgtctccgccgtgctgagcctgcttctatggttggcctacctgctcgcggactccatcgccatctacgcgctcgggtacctctcccagacgcgcgtgcccaagggcgtggacccacagtccttcgagcgcactcaccgcgtccaggccttctgggcaccgttcctcctcctccactcggcggccaggacaccatcaccgccttctccaccgaagacaacgagctctggaagcgccacctgctcagcctcctcacccaggtcgccctcgccgtgtatgtcttcgccaagtcgcac

SEQ ID NO: 31721 - DNA, 886 bp, Zea Mays
cagacgggcaggagagcctagtggtcgcatggctccccagtgtttttctttttttggttattgaatctctagaacttttcccaacattatttgtaaatgtaataggtagttcgtgtctagaaactcactttcagtcatagtttcagtgtcctcgctgaacttcctgcagattgatcactagtgcaaaattgaacgccagttactagtgaagtagtgatttatacttgtgcaccattactgtcacagcaatggccaggccaataaagttgatgaaacagcgtcacacagagcaaatggaacacttctaaaagcattcttcttcccctaattgaactttaccttgtggctgaatagaaagcaatttagtgcaggcgtccatgttgatactgttgtcatgaatcctccctttggtacacgaaggaatggagcagacatggagttcctctctatggccttgcaggtcagaaccggtgcttgtttgcgactagcagtttcctttggaattaacaaggacacaagtcttcactgagacacaaccatagttgaacgtacataactacttaatagaaaaatagcatcaggaagatatcgtttgaagttgttgaagatcaaacttcaatgctgccctcagcgtcacagcaggaagagcaagtgggaagttttgtccttagctgaccaaacaagttcgtcaacatatacctcttttggctcatcatttgagctactactgtcatgacacgtattatgatgagatggctcttgaatttctatgcttcggctttcataagccaaagcttgatgatgtaactaagctagcgaaaagaactgtgtgctacctaatttttcttttaagtatggacgcaccccattgaaagctaactttgct

SEQ ID NO: 31722 - DNA, 705 bp, Zea Mays
cagacgggcaggagagcctagtggtcgcatggctccccagtgtttttctttttttggttattgaatctctagaacttttcccaacattatttgtaaatgtaataggtagttcgtgtctagaaactcactttcagtcatagtttcagtgtcctcgctgaacttcctgcagattgatcactagtgcaaaattgaacgccagttactagtgaagtagtgatttatacttgtgcaccattactgtcacagcaatggccaggccaataaagttgatgaaacagcgtcacacagagcaaatggaacacttctaaaagcattcttcttcccctaattgaactttaccttgtggctgaatagaaagcaatttagtgcaggcgtccatgttgatactgttgtcatgaatcctccctttggtacacgaaggaatggagcagacatggagttcctctctatggccttgcagggaagagcaagtgggaagttttgtccttagctgaccaaacaagttcgtcaacatatacctcttttggctcatcatttgagctactactgtcatgacacgtattatgatgagatggctcttgaatttctatgcttcggctttcataagccaaagcttgatgatgtaactaagctagcgaaaagaactgtgtgctacctaatttttcttttaagtatggacgcaccccattgaaagctaactttgct

SEQ ID NO: 31723 - DNA, 1461 bp, Zea Mays
agagcctagtggtcgcatggctccccagtgtttttctttttttggttattgaatctctagaacttttcccaacattatttgtaaatgtaataggtagttcgtgtctagaaactcactttcagtcatagtttcagtgtcctcgctgaacttcctgcagattgatcactagtgcaaaattgaacgccagttactagtgaagtagtgatttatacttgtgcaccattactgtcacagcaatggccaggccaataaagttgatgaaacagcgtcacacagagcaaatggaacacttctaaaagcattcttcttcccctaattgaactttaccttgtggctgaatagaaagcaatttagtgcaggcgtccatgttgatactgttgtcatgaatcctccctttggtacacgaaggaatggagcagacatggagttcctctctatggccttgcaggtcagaaccggtgcttgtttgcgactagcagtttcctttggaattaacaaggacacaagtcttcactgagacacaaccatagttgaacgtacataactacttaatagaaaaatagcatcaggaagatatcgtttgaagttgttgaagatcaaacttcaatgctgccctcagcgtcacagcagtaagttctttgaagtacactccacaatccacgccatagcagctagaaatgaaacaatatatatggattaacatatagcacttgctatagatattgaggatagaaaccattaggatatttatacataggtggggggcctcggccacatggttaggagcggatcctgatatgttgacttttacaaatatcctatgggagtatgggtaatttttttggaggttctagatgttccatgtattagggagtaggctcccatattccggtcgaactaggcctttcttgttattcatctcaaatgtattgacagggaacaactatttatcaatttgcacatcttcaaatatcaactgaccttcatttattgtctattgtatccaccgatagaaaacattgcaatcgatggtggcatgaaaaaaaggagttatgcaatttacactaagcacgccttttcaattcatctgttggaggaattgtgtgggataatttaatgtttccgctcttaataatttatcaaatatcttgtcacacttagcaacattgaatgtgaacttaacttctctttgtcgattcttttgaaccgactgcagggaagagcaagtgggaagttttgtccttagctgaccaaacaagttcgtcaacatatacctcttttggctcatcatttgagctactactgtcatgacacgtattatgatgagatggctcttgaatttctatgcttcggctttcataagccaaagcttgatgatgtaactaagctagcgaaaagaactgtgtgctacctaatttttcttttaagtatggacgcaccccattgaaagctaactttgct

SEQ ID NO: 31724 - DNA, 1976 bp, Zea Mays
gtcgaatctggtcagaccgcaagcgagcgcccccacacaaacacgcacgcacacacagcacgactcgaacgcgtcgcgtctcttctctcttttctcccgtcctttgtccctctgccctgcaggcctctctgcctccgccccgcagttccgcacccaccctacgctctcctccctctccacggaacgcctcgcgagggaacgcccacgcagctgccgggaggattcggcgggcgtccgcctggacgcgaaatgcccgcccagaagggcccgctcccgtcgcccacccccgatgattccgaaggccgcgtcgcagtgcggcacaccgccgccagcggtgatggaggcaggagcggagcctcacatgagatggatggggaggcctccgcgcgtcaggagagcccaccgcatcggggacctcgcgacggtgatcccgacgataaggaagagggtggctgcggcggaggcgacggagtcgacaccaccagcgaatcgtctctgactccgagcgccggaagcatggacgagtttatgctagtgaaattagcagagataaggaaggaggttcagtgccctatctgtttaggcattattcggaagacaaggacagttatggaatgtctgcaccgcttctgtagagactgcattgacaaatctatgcggctaggaaataatgaatgcccatcgtgtcgcactcattgtgcaagtcgacgttctttgagggacgatcctaactatgatgcactgattgcagccttatatccagatattgataagtacgaggaagaggaacttgcttttaatgagcaggagatgactcggaatcaaaagatacaagaaaccattgaggaaacattccgaagacagtcccaggcaattggtaagaaacgttctatagcaaaagaaactggcactgcctttgcaaggaagtacagaagaaatatgcgaacacgggggagaggtagaactactacccctgatattgctcctactagctcaaatgaggaggatagggaaggagaaaatgtcaatgaggtcaccaaagtaccatcttctgctgacgatcattctccagatttaagacagaaaagatgcaggaagacgtccacatcacaagcatcgcctgctagaaacattggcagtagtgatcacagctttgaggagaacgatgaattagttgccgcaaaagaaattttagccacctctccattgcgaggggagatgcttgcatggggtaaaaatggtacacggagccaaaatcgacatggcagtgctggttcaaatggcaggattggaaggagcgggcgcattgccaaattggtggatcacctatgtaatgctgatgaaatggataaagagttccagttgtatctggttctgcttcctgtcgatggacaaaccatacctcacttggaaaagccttatctaagttgtcaaccaaccttgtccattcaacatcttgtagagttaattgctcttcagttgtctcggaaagtcgaagaacttgagatgtacataaggatggacggcgaccatggaagtgttggctcgatggcttgcagtataggtgaatttgatggcttggaaaggctgagggaagataaacttctttcggaacttcatccttcgtttgcctctagcaacggtgatctggagttgcgatatgctttgaaaactcgagactagatcagttttaatcttcagctactaatttatgaagtcactgtccatacggtggtgatgcaaatgagatctgcatctggtgaacggatttatgtaaaaagaatattcaatgtgaaaaaatggtgaacctgtttttctgatgagtcttgctaggttaatttaccaactttgtaaatatataatgaactgaattgtgaatgtttgcagtaggtgaacatgctgtctaatatttatattcactgttcatttatatgagaagtgagataataggagtcaagctgattacagtaatataa

SEQ ID NO: 31725 - DNA, 1742 bp, Zea Mays
ctctgcctccgccccgcagttccgcacccaccctacgctctcctccctctccacggaacgcctcgcgagggaacgcccacgcagctgccgggaggattcggcgggcgtccgcctggacgcgaaatgcccgcccagaagggcccgctcccgtcgcccacccccgatgattccgaaggccgcgtcgcagtgcggcacaccgccgccagcggtgatggaggcaggagcggagcctcacatgagatggatggggaggcctccgcgcgtcaggagagcccaccgcatcggggacctcgcgacggtgatcccgacgataaggaagagggtggctgcggcggaggcgacggagtcgacaccaccagcgaatcgtctctgactccgagcgccggaagcatggacgagtttatgctagtgaaattagcagagataaggaaggaggttcagtgccctatctgtttaggcattattcggaagacaaggacagttatggaatgtctgcaccgcttctgtagagactgcattgacaaatctatgcggctaggaaataatgaatgcccatcgtgtcgcactcattgtgcaagtcgacgttctttgagggacgatcctaactatgatgcactgattgcagccttatatccagatattgataagtacgaggaagaggaacttgcttttaatgagcaggagatgactcggaatcaaaagatacaagaaaccattgaggaaacattccgaagacagtcccaggcaattggtaagaaacgttctatagcaaaagaaactggcactgcctttgcaaggaagtacagaagaaatatgcgaacacgggggagaggtagaactactacccctgatattgctcctactagctcaaatgaggaggatagggaaggagaaaatgtcaatgaggtcaccaaagtaccatcttctgctgacgatcattctccagatttaagacagaaaagatgcaggaagacgtccacatcacaagcatcgcctgctagaaacattggcagtagtgatcacagctttgaggagaacgatgaattagttgccgcaaaagaaattttagccacctctccattgcgaggggagatgcttgcatggggtaaaaatggtacacggagccaaaatcgacatggcagtgctggttcaaatggcaggattggaaggagcgggcgcattgccaaattggtggatcacctatgtaatgctgatgaaatggataaagagttaattgctcttcagttgtctcggaaagtcgaagaacttgagatgtacataaggatggacggcgaccatggaagtgttggctcgatggcttgcagtataggtgaatttgatggcttggaaaggctgagggaagataaacttctttcggaacttcatccttcgtttgcctctagcaacggtgatctggagttgcgatatgctttgaaaactcgagactagatcagttttaatcttcagctactaatttatgaagtcactgtccatacggtggtgatgcaaatgagatctgcatctggtgaacggatttatgtaaaaagaatattcaatgtgaaaaaatggtgaacctgtttttctgatgagtcttgctaggttaatttaccaactttgtaaatatataatgaactgaattgtgaatgtttgcagtaggtgaacatgctgtctaatatttatattcactgttcatttatatgagaagtgagataataggagtcaagctgattacagtaatataa

SEQ ID NO: 31726 - DNA, 1622 bp, Zea Mays
cgctcccgtcgcccacccccgatgattccgaaggccgcgtcgcagtgcggcacaccgccgccagcggtgatggaggcaggagcggagcctcacatgagatggatggggaggcctccgcgcgtcaggagagcccaccgcatcggggacctcgcgacggtgatcccgacgataaggaagagggtggctgcggcggaggcgacggagtcgacaccaccagcgaatcgtctctgactccgagcgccggaagcatggacgagtttatgctagtgaaattagcagagataaggaaggaggttcagtgccctatctgtttaggcattattcggaagacaaggacagttatggaatgtctgcaccgcttctgtagagactgcattgacaaatctatgcggctaggccttatatccagatattgataagtacgaggaagaggaacttgcttttaatgagcaggagatgactcggaatcaaaagatacaagaaaccattgaggaaacattccgaagacagtcccaggcaattggtaagaaacgttctatagcaaaagaaactggcactgcctttgcaaggaagtacagaagaaatatgcgaacacgggggagaggtagaactactacccctgatattgctcctactagctcaaatgaggaggatagggaaggagaaaatgtcaatgaggtcaccaaagtaccatcttctgctgacgatcattctccagatttaagacagaaaagatgcaggaagacgtccacatcacaagcatcgcctgctagaaacattggcagtagtgatcacagctttgaggagaacgatgaattagttgccgcaaaagaaattttagccacctctccattgcgaggggagatgcttgcatggggtaaaaatggtacacggagccaaaatcgacatggcagtgctggttcaaatggcaggattggaaggagcgggcgcattgccaaattggtggatcacctatgtaatgctgatgaaatggataaagagttccagttgtatctggttctgcttcctgtcgatggacaaaccatacctcacttggaaaagccttatctaagttgtcaaccaaccttgtccattcaacatcttgtagagttaattgctcttcagttgtctcggaaagtcgaagaacttgagatgtacataaggatggacggcgaccatggaagtgttggctcgatggcttgcagtataggtgaatttgatggcttggaaaggctgagggaagataaacttctttcggaacttcatccttcgtttgcctctagcaacggtgatctggagttgcgatatgctttgaaaactcgagactagatcagttttaatcttcagctactaatttatgaagtcactgtccatacggtggtgatgcaaatgagatctgcatctggtgaacggatttatgtaaaaagaatattcaatgtgaaaaaatggtgaacctgtttttctgatgagtcttgctaggttaatttaccaactttgtaaatatataatgaactgaattgtgaatgtttgcagtaggtgaacatgctgtctaatatttatattcactgttcatttatatgagaagtgagataataggagtcaagctgattacagtaatataa

SEQ ID NO: 31727 - DNA, 596 bp, Zea Mays
cgcagatcccgacgataaggaagagggtggctgcggcggaggcgacggagtcgacaccaccagcgaatcgtctctgactccgagcgccggaagcatggacgagtaagccaaataacgcccgctctattgtcatctctcaccctctgacctctcccaggttgcctaggctatccagtcacccaacgacctcgtcgtagcctcgtgtctagtgcgctagcggctagctgctagctccagttcgtagtcgtccactcgtcctgcacgctggcatccggcaaggcacgtgctgacccggtgaactgagcggagagtgttagaatagaacaatgtgctagacgattgcttccttcggaatgtttttaattaacctctggtcatggtgtccacgagctgatcacgagctagcgcactggcagcaagatatatggaccattgctagaagaattgaacgtgcgtggaatcgggttttcgatggtatgcatgtctccgccatggtgactgctttcgttgagatggcacgagctgtggcggcgagtatcaggagcaccatagtccatactccatatcaacattaacgcttccacggcgtacccact

SEQ ID NO: 31728 - DNA, 1490 bp, Zea Mays
gtcgacaccaccagcgaatcgtctctgactccgagcgccggaagcatggacgagtttatgctagtgaaattagcagagataaggaaggaggttcagtgccctatctgtttaggcattattcggaagacaaggacagttatggaatgtctgcaccgcttctgtagagactgcattgacaaatctatgcggctaggaaataatgaatgcccatcgtgtcgcactcattgtgcaagtcgacgttctttgagggacgatcctaactatgatgcactgattgcagccttatatccagatattgataagtacgaggaagaggaacttgcttttaatgagcaggagatgactcggaatcaaaagatacaagaaaccattgaggaaacattccgaagacagtcccaggcaattggtaagaaacgttctatagcaaaagaaactggcactgcctttgcaaggaagtacagaagaaatatgcgaacacgggggagaggtagaactactacccctgatattgctcctactagctcaaatgaggaggatagggaaggagaaaatgtcaatgaggtcaccaaagtaccatcttctgctgacgatcattctccagatttaagacagaaaagatgcaggaagacgtccacatcacaagcatcgcctgctagaaacattggcagtagtgatcacagctttgaggagaacgatgaattagttgccgcaaaagaaattttagccacctctccattgcgaggggagatgcttgcatggggtaaaaatggtacacggagccaaaatcgacatggcagtgctggttcaaatggcaggattggaaggagcgggcgcattgccaaattggtggatcacctatgtaatgctgatgaaatggataaagagttccagttgtatctggttctgcttcctgtcgatggacaaaccatacctcacttggaaaagccttatctaagttgtcaaccaaccttgtccattcaacatcttgtagagttgtctcggaaagtcgaagaacttgagatgtacataaggatggacggcgaccatggaagtgttggctcgatggcttgcagtataggtgaatttgatggcttggaaaggctgagggaagataaacttctttcggaacttcatccttcgtttgcctctagcaacggtgatctggagttgcgatatgctttgaaaactcgagactagatcagttttaatcttcagctactaatttatgaagtcactgtccatacggtggtgatgcaaatgagatctgcatctggtgaacggatttatgtaaaaagaatattcaatgtgaaaaaatggtgaacctgtttttctgatgagtcttgctaggttaatttaccaactttgtaaatatataatgaactgaattgtgaatgtttgcagtaggtgaacatgctgtctaatatttatattcactgttcatttatatgagaagtgagataataggagtcaagctgattacagtaatataa

SEQ ID NO: 31729 - DNA, 1959 bp, Zea Mays
cgacttcctaagccagtcagagaagcagcaggcgccggtccccaccggcagcctctcagatagacccaaacctgcgatgcaaacccaccacaagacgaacacctctcgcaactcgcgagcccctgcctatttcctcttccctccgaagtccgcatcccttccaggctctcgcatctacctggccacctcccacctctctccatatactacccctccccctcctccgcatcctccccgtcgagccacaccacctcccctccctcccaaaccccagcgcctcggcagggtggtgaaccaccgcccccgcgcccttgctgcaatccgagaaccaagatcccaggggcagaaagccagaatgcctgcgcaaaagcgccggctcccatcgccgtcttcgaaaccccgcgacgacgtcgcggctacagcctctgatgccgccgccggcggaggcgtaggagaaggaagaggaggacgcccgccgctgccgagcagggacgccgccaaacggtggttgactgacccggagccacagcaaggattcgaagacgattcggacgcggaggatgatggcggcgcggacggcgacagcgagttctcccagagcgacggcggcggcaacgacgggtttatgctagtgaaattagcagagataaggaaggaggttcagtgccctatctgtttaggcattattcggaagacaaggacagttatggaatgtctgcaccgcttctgtagagactgcattgacaaatctatgcggctaggaaataatgaatgcccatcgtgtcgcactcattgtgcaagtcgacgttctttgagggacgatcctaactatgatgcactgattgcagccttatatccagatattgataagtacgaggaagaggaacttgcttttaatgagcaggagatgactcggaatcaaaagatacaagaaaccattgaggaaacattccgaagacagtcccaggcaattggtaagaaacgttctatagcaaaagaaactggcactgcctttgcaaggaagtacagaagaaatatgcgaacacgggggagagatttaagacagaaaagatgcaggaagacgtccacatcacaagcatcgcctgctagaaacattggcagtagtgatcacagctttgaggagaacgatgaattagttgccgcaaaagaaattttagccacctctccattgcgaggggagatgcttgcatggggtaaaaatggtacacggagccaaaatcgacatggcagtgctggttcaaatggcaggattggaaggagcgggcgcattgccaaattggtggatcacctatgtaatgctgatgaaatggataaagagttccagttgtatctggttctgcttcctgtcgatggacaaaccatacctcacttggaaaagccttatctaagttgtcaaccaaccttgtccattcaacatcttgtagagttaattgctcttcagttgtctcggaaagtcgaagaacttgagatgtacataaggatggacggcgaccatggaagtgttggctcgatggcttgcagtataggtgaatttgatggcttggaaaggctgagggaagataaacttctttcggaacttcatccttcgtttgcctctagcaacggtgatctggagttgcgatatgctttgaaaactcgagactagatcagttttaatcttcagctactaatttatgaagtcactgtccatacggtggtgatgcaaatgagatctgcatctggtgaacggatttatgtaaaaagaatattcaatgtgaaaaaatggtgaacctgtttttctgatgagtcttgctaggttaatttaccaactttgtaaatatataatgaactgaattgtgaatgtttgcagtaggtgaacatgctgtctaatatttatattcactgttcatttatatgagaagtgagataataggagtcaagctgattacagtaatataa

SEQ ID NO: 31730 - DNA, 1979 bp, Zea Mays
ctgatcaaatctttaaattttaccataaaatttagagctcattaacacccatgtggctggttgacgagacaaacggggatctggatctaccggagaagagaaaaataaaaggagaggaaaaaaataaaaaataaagtaaatatgggccccacctgtcataatatgcattgggaatgagatattggtaatctgctgcagtatgttggccaataatcccgtcctgtttccggcggtataaaacgaaaatacggtacaggactggccattcctatcaatacttccacacggcacaactatcggcggcggcaacgagccaggaccctgttgtgatgctaccgtcgccgccggtgctactacgcccttgcgctgcccgggcctccccgcttccgccccctagacctagagctgcaaatcctaacaccgagtcggcgacgacgacaaccgccgccacttcagcggacagagcggccaccatgggcgcggcagcgtggtggcggcgcgccctggggcagcggttcaacccagccggtgtggccgcggtggcggccgtcgcggcgtccaagccgcgcctggcgctgccgcacgtgtcggtgcaagacatcaggtggctcgactgggctgagctccgccgcgccgggttccgcggcgtcgttttcgacaaggacaacacgctcacggccccctacgcgcccgcgctctggccgccgctcgctgcagcatttgaccagtgccgtgcgacgttcccgcccggtgcgctcgccatctacagcaactccgcagggttgacggagtatgatccggacggggtggatgcgagggcgatcgaagctgtcatcgagggggttcatgtgatcaggcatggcaagtgcagaatcgctacctgtctatcgtgtttgtcctttgaaatttacctgatagcccaaagaagctctgttcgatgaattagtgctcagtttcataatcttacttcaaattggtggttcttagctttgtacacttgtaaattgacttgttcttggtaatttcaaaagttattgggtctaatgcctaacttttaaggaaactcagtggatggatcattggagctaacttgtttcctcgatggtccatttgcattgtgcagtactgcagtaccattttagttttagttattgtttcattaatataagttgtgtaccaaatacgcctcatgatattttcaaatgtgtacggtgtacctgtacctgtgtccgtctcttataatttgacttttctatataagggggagctctaaatcatcattttcatgtttaagatataatgtttgcgtttctgttctattgattgcagatataaagaaaccaggtggactagctactgaaatagagagttactttggttgttcagcctcaaatcttgtgttggttggtgaccgttacttcactgatgtggtctatggaaacaagaatggctttcttacagtcctgacagagcctttaaacatcactgatgaatcatacattgtcaaaagggttaggaaactggaggcgtacatcatcagttattggtacaagaaagggcacaaaccaatagagcatcctttgctcccagatgcaagaagaatagtgaagtttgacccatatgacgactcagtttcaaccagaatataatgtaatgatgtatcttgcacctgctcatcagagagtgagatctactgtttgtagcttagggtgtgtttgtttccttctaaattatataaactggattatggtggaagggtaagaccgtaagagagtaaaatattacattgtgacaacaaataagctgaaataaactaatattggatagcttattttagcttatttgtaatcccaaagtggtaccataatccaatttatataaacatacagggcctcagcagaagattacaagggataaacatatggtgtgtagatttgctgtctctctctttcactctcgcagaatgcaatttttcaggg

SEQ ID NO: 31731 - DNA, 1492 bp, Zea Mays
ctgatcaaatctttaaattttaccataaaatttagagctcattaacacccatgtggctggttgacgagacaaacggggatctggatctaccggagaagagaaaaataaaaggagaggaaaaaaataaaaaataaagtaaatatgggccccacctgtcataatatgcattgggaatgagatattggtaatctgctgcagtatgttggccaataatcccgtcctgtttccggcggtataaaacgaaaatacggtacaggactggccattcctatcaatacttccacacggcacaactatcggcggcggcaacgagccaggaccctgttgtgatgctaccgtcgccgccggtgctactacgcccttgcgctgcccgggcctccccgcttccgccccctagacctagagctgcaaatcctaacaccgagtcggcgacgacgacaaccgccgccacttcagcggacagagcggccaccatgggcgcggcagcgtggtggcggcgcgccctggggcagcggttcaacccagccggtgtggccgcggtggcggccgtcgcggcgtccaagccgcgcctggcgctgccgcacgtgtcggtgcaagacatcaggtggctcgactgggctgagctccgccgcgccgggttccgcggcgtcgttttcgacaaggacaacacgctcacggccccctacgcgcccgcgctctggccgccgctcgctgcagcatttgaccagtgccgtgcgacgttcccgcccggtgcgctcgccatctacagcaactccgcagggttgacggagtatgatccggacggggtggatgcgagggcgatcgaagctgtcatcgagggggttcatgtgatcaggcatgatataaagaaaccaggtggactagctactgaaatagagagttactttggttgttcagcctcaaatcttgtgttggttggtgaccgttacttcactgatgtggtctatggaaacaagaatggctttcttacagtcctgacagagcctttaaacatcactgatgaatcatacattgtcaaaagggttaggaaactggaggcgtacatcatcagttattggtacaagaaagggcacaaaccaatagagcatcctttgctcccagatgcaagaagaatagtgaagtttgacccatatgacgactcagtttcaaccagaatataatgtaatgatgtatcttgcacctgctcatcagagagtgagatctactgtttgtagcttagggtgtgtttgtttccttctaaattatataaactggattatggtggaagggtaagaccgtaagagagtaaaatattacattgtgacaacaaataagctgaaataaactaatattggatagcttattttagcttatttgtaatcccaaagtggtaccataatccaatttatataaacatacagggcctcagcagaagattacaagggataaacatatgagatgactttggcttgacggatgaagacttgtgtcc

SEQ ID NO: 31732 - DNA, 878 bp, Zea Mays
ccacttaatttaacatatagtgggccgaaccctgttccgcggttcgcgcaagcagacatacgctccattttataaccaaccggcggtccatctgaggaggaccaagaaacatagagagagcggttctacgtccgagtcgtcgcatcaggtcccctcgattcgccggcggcgccaccaaccaagctcatacatctgaattgactagtcaaactcagtgatctctttggggactaatcaaactcaagaactaagtttcatgtctgatctcgacgtccagcttccatctgcttttgatccgtttgcagaggcaaatgctgaggactccagtgctggtgctggatcaaaggactatgtgcacgtgcgtattcagcagcgcaacggaaggaagagtctgacaactgttcagggcttgaagaaagagtacagctacaacaagatcctcaaggatctcaaaaaagagttctgctgcaatggtactgtagtccaggatccagagctaggccaggtcattcaactgcaaggtgatcagcgtaaaaatgtcgctacttttctagtccaggccggaatcgtgaaaaaagatagcatcaagattcacggattttagactgcaaattttgagtgcttgtgtgtgcctatcatatggtaccatatgataccagtatgttttgtaagtgttacctgcatgaaagtatcgtttgtctggggaactgtctactactgatattgaataacaagagagattgctgttcgtgttcgtctatgaattattatgatctttccccagacttgagctttccaatccgtgttcttttatgatcactttgcttctcatgtgctttctgatatgtatttgaccttcacctcaagttgtatctttt

SEQ ID NO: 31733 - DNA, 634 bp, Zea Mays
gttgatgcgcgtcggggcgagcagcagaaaatggaacaagagaagctggagaagctcgcacgcaagggccccagctcaggagagcaaccttcgtcgactacagtctctgcagcaagtgatgtgaagactggggctgggccaacagagtcagcgtctgcaaacgtgtctaccgacaagaacaggaactacgctgtcctggcaggcacaattgctgctctgagtggcctgggttggtatctattgtcaaagcctaagaagtcggaggaggttgtggactgaagagggggttacgaatgcgagctgtggatggttggccttatatttcaccatggtttactttctgcgcacaccttctggaaataattgttgaaacatacgctgcagtctgcattacttgttctgaggcctgttgcaacaccgaacattgaagtctgtactcgagacgttccgtagttctctccctcgcttgacaggttgcaaatgttgagtgatgcttgtcctacgtcgttgctggagaagtggagaggtttttttggtactgatgttttgaatgtaaactcgttgccactggccagcacacatgacgaagagcattctgtgataatgagaatgtgttacacgcgttcccagtccc

SEQ ID NO: 31734 - DNA, 1615 bp, Zea Mays
gtttttcaccagccctaccacaaaactccccgagcctcgagtccaaactccaaactcctacccccgcctcaagaatctctcttcgctccgagcgccggggccgatacggccatacccactgcaatgctccgcgttccacggccatggccttcctcaagaccctaaaccctctaatacgcaggcaggccaccccgatcgctatccccaggctgctcctctccctccacactgtcctcgattcatcctcccccaccactaccgccgccgccaccccgtttgccaacgctgtgcacacccatgtccccatccggtccggcggtccgctgttcctctcgtcggccccatggatgctgtcgcagtcggcgacaccgctcacggccgcggctgccgcccttggcgccaagctccacagggcccaggccctccccggcggccgcgcgctggccgtcgcggccgcagtggggtgggagcacatgcggatctccaggggtgaagcggaggttgcgacgtcttcgggaattgtgggatatggaggatgatcgtgaatgaatggtatcttcctgcctttgccacattggctatctcgggtgcaagtgattggttggatggctttttagctagaaagatgggcatcaattctgtatttggatcatatttggaccctctggctgacaaggttttgattggctgtgttgctgtagccatggttgaaaaagaccttttacatcctggtcttgttggcctcgttgtcgtaagagacttgctccttgtgggtggtgctttctacaagcgggcttctagtctgggatggaagtggaatagttggtcagaatttgttaacctagatgttattcatcgtgaaaaggttgaacctctgttcatcagcaaggtaaacacagtcttccaattaatgttggttgccgctgcacttcttcagccagaatttggcacagaggagactcagaattatattgcacttctgagttggcttgtggctactacgacaatcacttccacaataggttatggtgtgaagcactaccgaatcaaaccaaggagtcggtgactgttgctgcaggctattcatggattaatttgctgctgctgatgacatacatcaagtgacttactgacttgtatcaagcatgctgttgtttcttaagcttcgtcaacttcccaatttgcagctgcacaactataggtcttgttgcccccctttgtcctcatggatttccttaacggcaaaattttgggcaatattggagaaaggagtgaagaacggtctcatgaattgaatgtaatcggtgcatgatttgtgcggtaggcctctggccgtcctcctgtagctgttaagtcgtggtgactacttttgcctagttttggcctaaagtgtccatcaatttgtcagagatcaaactagccgaacctttgccttttgctttgtccagacacattagctatattgcaggtgtacatatgtacttcagaatacttgaacttggcaaatggcgatcgctaggtgatatcacgcttccagatgtctgcaggttaaatgcatttacaactatgttcatgcatcaatgcaactgtttagcagggcttttttatgagaaaa

SEQ ID NO: 31735 - DNA, 1620 bp, Zea Mays
ccaaactcctacccccgcctcaagaatctctcttcgctccgagcgccggggccgatacggccatacccactgcaatgctccgcgttccacggccatggccttcctcaagaccctaaaccctctaatacgcaggcaggccaccccgatcgctatccccaggctgctcctctccctccacactgtcctcgattcatcctcccccaccactaccgccgccgccaccccgtttgccaacgctgtgcacacccatgtccccatccggtccggcggtccgctgttcctctcgtcggccccatggatgctgtcgcagtcggcgacaccgctcacggccgcggctgccgcccttggcgccaagctccacagggcccaggccctccccggcggccgcgcgctggccgtcgcggccgcagtggggtgggagcacatgcggatctccaggggtgaagcggaggttgcgacgtcttcgggaattgtgggatatggaggtgagaggtttctgaatgcgcccaatttagtgtcgattggacggatggtgtcagggccggtcattggatggatgatcgtgaatgaatggtatcttcctgcctttgccacattggctatctcgggtgcaagtgattggctagaaagatgggcatcaattctgtatttggatcatatttggaccctctggctgacaaggttttgattggctgtgttgctgtagccatggttgaaaaagaccttttacatcctggtcttgttggcctcgttgtcgtaagagacttgctccttgtgggtggtgctttctacaagcgggcttctagtctgggatggaagtggaatagttggtcagaatttgttaacctagatgttattcatcgtgaaaaggttgaacctctgttcatcagcaaggtaaacacagtcttccaattaatgttggttgccgctgcacttcttcagccagaatttggcacagaggagactcagaattatattgcacttctgagttggcttgtggctactacgacaatcacttccacaataggttatggtgtgaagcactaccgaatcaaaccaaggagtcggtgactgttgctgcaggctattcatggattaatttgctgctgctgatgacatacatcaagtgacttactgacttgtatcaagcatgctgttgtttcttaagcttcgtcaacttcccaatttgcagctgcacaactataggtcttgttgcccccctttgtcctcatggatttccttaacggcaaaattttgggcaatattggagaaaggagtgaagaacggtctcatgaattgaatgtaatcggtgcatgatttgtgcggtaggcctctggccgtcctcctgtagctgttaagtcgtggtgactacttttgcctagttttggcctaaagtgtccatcaatttgtcagagatcaaactagccgaacctttgccttttgctttgtccagacacattagctatattgcaggtgtacatatgtacttcagaatacttgaacttggcaaatggcgatcgctaggtgatatcacgcttccagatgtctgcaggttaaatgcatttacaactatgttcatgcatcaatgcaactgtttagcagggcttttttatgagaaaa

SEQ ID NO: 31736 - DNA, 1112 bp, Zea Mays
atctcttcatttcgagcctgcctctattccagatgatcgtgaatgaatggtatcttcctgcctttgccacattggctatctcgggtgcaagtgattggttggatggctttttagctagaaagatgggcatcaattctgtatttggatcatatttggaccctctggctgacaaggttttgattggctgtgttgctgtagccatggttgaaaaagaccttttacatcctggtcttgttggcctcgttgtcgtaagagacttgctccttgtgggtggtgctttctacaagcgggcttctagtctgggatggaagtggaatagttggtcagaatttgttaacctagatgttattcatcgtgaaaaggttgaacctctgttcatcagcaaggtaaacacagtcttccaattaatgttggttgccgctgcacttcttcagccagaatttggcacagaggagactcagaattatattgcacttctgagttggcttgtggctactacgacaatcacttccacaataggttatggtgtgaagcactaccgaatcaaaccaaggagtcggtgactgttgctgcaggctattcatggattaatttgctgctgctgatgacatacatcaagtgacttactgacttgtatcaagcatgctgttgtttcttaagcttcgtcaacttcccaatttgcagctgcacaactataggtcttgttgcccccctttgtcctcatggatttccttaacggcaaaattttgggcaatattggagaaaggagtgaagaacggtctcatgaattgaatgtaatcggtgcatgatttgtgcggtaggcctctggccgtcctcctgtagctgttaagtcgtggtgactacttttgcctagttttggcctaaagtgtccatcaatttgtcagagatcaaactagccgaacctttgccttttgctttgtccagacacattagctatattgcaggtgtacatatgtacttcagaatacttgaacttggcaaatggcgatcgctaggtgatatcacgcttccagatgtctgcaggttaaatgcatttacaactatgttcatgcatcaatgcaactgtttagcagggcttttttatgagaaaa

SEQ ID NO: 31737 - DNA, 813 bp, Zea Mays
gaacatttgtttggtaaaccaggcgacggctaggcgttagcccaagctgcactgcctagcacctaggcgttgtgtctaggcttgtttcagcgttaaggtgttgggcttaatctatgcatgaaaatgggacagattagagatggagaaagatgaactgtggtcatattatttatcgatgcatgttggcttgtggctactacgacaatcacttccacaataggttatggtgtgaagcactaccgaatcaaaccaaggagtcggtgactgttgctgcaggctattcatggattaatttgctgctgctgatgacatacatcaagtgacttactgacttgtatcaagcatgctgttgtttcttaagcttcgtcaacttcccaatttgcagctgcacaactataggtcttgttgcccccctttgtcctcatggatttccttaacggcaaaattttgggcaatattggagaaaggagtgaagaacggtctcatgaattgaatgtaatcggtgcatgatttgtgcggtaggcctctggccgtcctcctgtagctgttaagtcgtggtgactacttttgcctagttttggcctaaagtgtccatcaatttgtcagagatcaaactagccgaacctttgccttttgctttgtccagacacattagctatattgcaggtgtacatatgtacttcagaatacttgaacttggcaaatggcgatcgctaggtgatatcacgcttccagatgtctgcaggttaaatgcatttacaactatgttcatgcatcaatgcaactgtttagcagggcttttttatgagaaaa

SEQ ID NO: 31738 - DNA, 1858 bp, Zea Mays
ggcccacttgccatatatatctgcgaagaaaaaccctacgtgtcacaagcctccgcctcttctcccgtttgcgacgactgggtgggctacgccgccgccgccgccgctgccgctgctctacggtgctgagtcctttgccgatttcttcccggcgaagagcgccaccagatccgcccctgctgaaaacgcactcgatggcgtccgcgacggggggttcctcctcggagatggcggtggaccacgcgacggggctgggcaccgtggagaagccgcggtttgatgctctgatgccgagtgagatgagcggcgggaggacccagttccggaaagtgaccgtgccgcagcaccggttcgcgccgctcaagcgatgctggatggaaatctacacacccgtttacgagcacatgaagatcgacatacgcatgaatctcaaggtaaggagatagcccagtgtcaatttattctcgtgaacgcggcgcgctttgttctgtatgagcttggttggcgttgcttcggcgttctcgtttctgaatcgtatagatggtttcagattcagcacagttatgtttagacattatatgtattcgtattccattctcatggctacatttgaatctcaaaatcttcgatgtctgcattagactgacagcacgtattcgaggcagagttatcctattgttttgtttgttggatgaagttttatgaatattttgttgaagactgacagctaggaattctacaagaattctgatcatagtattgtagctgctaagcaagtaatgcacaatcgaatatattggcccctcgtctagtttaagctcatactagtcacctcagtaaaataactacatgtgatgagtgttctgtacatgcatatcttgcctgagccattgctaaactaaaccacaatattatagttgtttctgttttgataattgcttaggactcaactggtttgtccttgtcagtttagactgttggctcagaacttaatgtatggctgtctgctattattttctacttaaatactcttatgttgtaagcctattactgaatgctcaaggtgtagtatgcatcatatctgttgggcccattaaaccgttttctctgttccaggcgaggagggtggagctaaagacaaggcaagacacaccagatgtcagcaaccttcagaaatgtgctgactttgtgcatgcttttatgctcgggttcgacattgctgatgccgtcgccttgctgcgtcttgatgatctgtatgtggattcctttgagatcaaggacgtgaagaccttgcgaggggagcatctgtcgcgcgctattggccgcttatcagggaaaggaggcaagaccaagtacgccattgagaactcaaccaggacccgcattgtcatcgctgatacaaagatccacatacttggatccttcgttaacatcaaggtcgcacgggattcactttgcagtctcatcttgggttctcctgctggcaaagtgtattctaaactaagggctgtatcagctaggttggcggaaaggtattaaattaaatggggtttgcccgcaccgtataagggcatgttcggttcccgctcaattcatatggattggaggggtttgagtgggattaattccatatcaagtcaaaatccttcataatttttttcaatgctttccaatcccatgaggtataggaataactgaacaaggcctaattgttgcagttttggtcacattcacacagtgtgttatagtagcagtttgtgtgctcgggacactggggaagtttaatgtatccttaccttatgaatagcggactatgatgaagggagatttaaattgatatgtattctgtgtttgctct

SEQ ID NO: 31739 - DNA, 1861 bp, Zea Mays
ggcccacttgccatatatatctgcgaagaaaaaccctacgtgtcacaagcctccgcctcttctcccgtttgcgacgactgggtgggctacgccgccgccgccgccgctgccgctgctctacggtgctgagtcctttgccgatttcttcccggcgaagagcgccaccagtagatccgcccctgctgaaaacgcactcgatggcgtccgcgacggggggttcctcctcggagatggcggtggaccacgcgacggggctgggcaccgtggagaagccgcggtttgatgctctgatgccgagtgagatgagcggcgggaggacccagttccggaaagtgaccgtgccgcagcaccggttcgcgccgctcaagcgatgctggatggaaatctacacacccgtttacgagcacatgaagatcgacatacgcatgaatctcaaggtaaggagatagcccagtgtcaatttattctcgtgaacgcggcgcgctttgttctgtatgagcttggttggcgttgcttcggcgttctcgtttctgaatcgtatagatggtttcagattcagcacagttatgtttagacattatatgtattcgtattccattctcatggctacatttgaatctcaaaatcttcgatgtctgcattagactgacagcacgtattcgaggcagagttatcctattgttttgtttgttggatgaagttttatgaatattttgttgaagactgacagctaggaattctacaagaattctgatcatagtattgtagctgctaagcaagtaatgcacaatcgaatatattggcccctcgtctagtttaagctcatactagtcacctcagtaaaataactacatgtgatgagtgttctgtacatgcatatcttgcctgagccattgctaaactaaaccacaatattatagttgtttctgttttgataattgcttaggactcaactggtttgtccttgtcagtttagactgttggctcagaacttaatgtatggctgtctgctattattttctacttaaatactcttatgttgtaagcctattactgaatgctcaaggtgtagtatgcatcatatctgttgggcccattaaaccgttttctctgttccaggcgaggagggtggagctaaagacaaggcaagacacaccagatgtcagcaaccttcagaaatgtgctgactttgtgcatgcttttatgctcgggttcgacattgctgatgccgtcgccttgctgcgtcttgatgatctgtatgtggattcctttgagatcaaggacgtgaagaccttgcgaggggagcatctgtcgcgcgctattggccgcttatcagggaaaggaggcaagaccaagtacgccattgagaactcaaccaggacccgcattgtcatcgctgatacaaagatccacatacttggatccttcgttaacatcaaggtcgcacgggattcactttgcagtctcatcttgggttctcctgctggcaaagtgtattctaaactaagggctgtatcagctaggttggcggaaaggtattaaattaaatggggtttgcccgcaccgtataagggcatgttcggttcccgctcaattcatatggattggaggggtttgagtgggattaattccatatcaagtcaaaatccttcataatttttttcaatgctttccaatcccatgaggtataggaataactgaacaaggcctaattgttgcagttttggtcacattcacacagtgtgttatagtagcagtttgtgtgctcgggacactggggaagtttaatgtatccttaccttatgaatagcggactatgatgaagggagatttaaattgatatgtattctgtgtttgctct

SEQ ID NO: 31740 - DNA, 1903 bp, Zea Mays
ggcccacttgccatatatatctgcgaagaaaaaccctacgtgtcacaagcctccgcctcttctcccgtttgcgacgactgggtgggctacgccgccgccgccgccgctgccgctgctctacggtgctgagtcctttgccgatttcttcccggcgaagagcgccaccagccttttgcataaatcatcgggtatacatccatcttcatttagtagatccgcccctgctgaaaacgcactcgatggcgtccgcgacggggggttcctcctcggagatggcggtggaccacgcgacggggctgggcaccgtggagaagccgcggtttgatgctctgatgccgagtgagatgagcggcgggaggacccagttccggaaagtgaccgtgccgcagcaccggttcgcgccgctcaagcgatgctggatggaaatctacacacccgtttacgagcacatgaagatcgacatacgcatgaatctcaaggtaaggagatagcccagtgtcaatttattctcgtgaacgcggcgcgctttgttctgtatgagcttggttggcgttgcttcggcgttctcgtttctgaatcgtatagatggtttcagattcagcacagttatgtttagacattatatgtattcgtattccattctcatggctacatttgaatctcaaaatcttcgatgtctgcattagactgacagcacgtattcgaggcagagttatcctattgttttgtttgttggatgaagttttatgaatattttgttgaagactgacagctaggaattctacaagaattctgatcatagtattgtagctgctaagcaagtaatgcacaatcgaatatattggcccctcgtctagtttaagctcatactagtcacctcagtaaaataactacatgtgatgagtgttctgtacatgcatatcttgcctgagccattgctaaactaaaccacaatattatagttgtttctgttttgataattgcttaggactcaactggtttgtccttgtcagtttagactgttggctcagaacttaatgtatggctgtctgctattattttctacttaaatactcttatgttgtaagcctattactgaatgctcaaggtgtagtatgcatcatatctgttgggcccattaaaccgttttctctgttccaggcgaggagggtggagctaaagacaaggcaagacacaccagatgtcagcaaccttcagaaatgtgctgactttgtgcatgcttttatgctcgggttcgacattgctgatgccgtcgccttgctgcgtcttgatgatctgtatgtggattcctttgagatcaaggacgtgaagaccttgcgaggggagcatctgtcgcgcgctattggccgcttatcagggaaaggaggcaagaccaagtacgccattgagaactcaaccaggacccgcattgtcatcgctgatacaaagatccacatacttggatccttcgttaacatcaaggtcgcacgggattcactttgcagtctcatcttgggttctcctgctggcaaagtgtattctaaactaagggctgtatcagctaggttggcggaaaggtattaaattaaatggggtttgcccgcaccgtataagggcatgttcggttcccgctcaattcatatggattggaggggtttgagtgggattaattccatatcaagtcaaaatccttcataatttttttcaatgctttccaatcccatgaggtataggaataactgaacaaggcctaattgttgcagttttggtcacattcacacagtgtgttatagtagcagtttgtgtgctcgggacactggggaagtttaatgtatccttaccttatgaatagcggactatgatgaagggagatttaaattgatatgtattctgtgtttgctct

SEQ ID NO: 31741 - DNA, 2364 bp, Zea Mays
ctccagcctcgtctttcggctacgtcctttggcacttccctccgttcctactttcctaggcaaacggtcgaacacctcagcggcaaggctcggcgccaccacccatgcgcgctctacttcacctccggcgctggcaatctctacctctgatcgcgaggacctcctccacaatcactttctcatcctcctcctcttccgagcctcacgaaatccccaccatctactccttcctccagccatctatcttcgcgccgcgccccaggtcccaaccgccacagccgccgcccccgcccccgcccggagcccatgatcccgcccgcaggaagacgctccccgtcgctgacgccgccgcgctggagtccgacctcctcgccgccgtctccgagggccgctcggacgacgcgtggctcgcgttcaagtccctggccgcggcatcctgctcgccctcgccccacgccgcggcggcgctcgtatcccacctcgccgccgccgctggacagcaccgtctcggcctcaaacgtgccttcgccgcggccgtcttcctgctggagaagagcccgcacgcggcgcccgttccggagccagcactcgaggcgctcttctccgcgttcgtcgcggcggggtccgccgccccggcggtggcgcttgcgcgcgcgatgctccgctgcgggcgccgcctcccggcgttctccgtctgggggcacccgcttatcgagctcacccgcaccgatcctggcgccttcgcggccttcctgacgttgttcgacgaggcctgcaagctcgtggtggaggagaaatcccctgctgaagcggcggcgatgcgccctgaccgcgctgcgtgcaattctgtcctttctggttgctgccgcgggctaggttcgctggcagatgcagagcgggtgctggagactatgtcggcggttggtgtctcgccagatgtagagagctttgggtgcctcgccttcctgtatgcttggagaggtgttcccagtcgggttgatgaactggatacattgtttgatgctctgggcttcagcaagaaggggtttttcaagaacctggttagtgggtacctcaaatctggtgacttcgagtcggtttcaccaatcattcttcgtgcagtgaaggaccgcagagttggggatgacaatggacttgatgaggaaacctatactgaggttgctcagtgctttgtggatcgtgcgaggattagggaactagctcagttgatcatccaagctcatgagattgagctcgctcaacaatctatatcagttgaggattctgttgggtttggaattgtgaatgcttgtgttgagctcggcctattgaacaaagctcatagcatactcgatgaaatgacagctcaaggagcctctgtagggcttggtgtgtactcgtcaatcttgaaagcctattgcaaggagcaaaagactgcagaagctgcacaacttgtggcagagattagtgcagccgggctacagcttgatgctggtagttatgatgctcttattgatgcttccatgacagcccacgatttccagtctgcatttgctcttttcaaggacatgagggaggcaaggctaccagaacttaggacaagttatcttactataatgacaggcttaacagaaaacaacaagcctggcctcatggcttccttcttggactcggtggttgatgacccgagaatagagattgctacacacgattggaattcaataatacatgctttctgcaaggtcgggaggttagatgatgctagaaggacataccgaaggatggtattccttagatttgaaccaaataatcagacatacctctcactcatcaacggttatgtctcaactgagaaatactttagtgtgctcatactgtggacagaagtaaggaggagggggattgaattcaaccatgagttgattgatgcctttctttatgctttggtaaaaggagggttctttgatatggcgatgcaggtgattgaaaaggcgcaagagttcaaaatatttatcgataaatggaggtacaagcaagcattcatggaaacacacaaaaaactgaaagtggcaaagctaagaaagcggaacttcaggaaaatggaagccctagtggctttcagaaattgggctggtatcaacacataacatcgcaaccttgattttatcaacctgtcatgtgtcatgactgaatttatgatcttcagaaagctgtagcaagcgctatggatctttagagatggttaaagtaaagcagctgtttggctgtggtaaatttgcattttgcaacaaggatggagacagcgtcgtcgcttccgacaccattggcgacacgaacctcctccttcacggagcctccgttcac

SEQ ID NO: 31742 - DNA, 3883 bp, Zea Mays
cggcctcagcccggcgtcagcctgccaagtcaagtcgtctcgctcaccaccttcctcgcataaaccgcgcacagggtaatcgtagagtcccaaggtctagtcagcgcggccatctatcctccacctctccacatttgcagtgtgagttttcttgattcccttcatccttttgttgcttcgtcactaaggacgctacaccagttcatcactcgctacttgtccactagtccagtctcggatatctcagctcggacgcctaccgatctgtccgtttcctacagccgctccccaaaaattccaactgattcctccgcctcttccgagttccccagaatccccagtttgatgctgcctctggccccctgcccaccgattggatcttggtcgatttctccgttcttcagatcctgtgcgcatccgctctaggtagtggccctttgctcggctcccttcctcctccttcgcccatgctcggatctttcaatctgcgccggttttgagttcttgcccctgctagctgccggccgtcaaaggctagagctttaatttcctggcaaagattggggattcctgctcgcgaggatggaattcgtggcgtccattgtcgacacggtgttccggccgctcaaggactacttcgcgcggaccgtcggctacgtcatgtcctgcggcgactacatcgacgcgatgggcaacgagatgaacgagctcaagagcaagcgcgacgacgtcaagcgcatggtcgacgccgccgagcgccagggcatggaggccaccagccaggtcaagtggtggctagagtgcgtcgccctgctcgaggacgccgccgcgcggatcgtcgacgagtaccaggcgcgcctgcagctccctcccgaccagccccccggctacaaggccacctaccacctcagcaagaaggccgacgaggctcgcgaagaggccgcgggcctcaaggacaaggccgacttccacaaggtcgccgacgaactcgtccaggtccgcttcgaggagatgccgagcgcgccggtcctcggcagggacgcgctactccacgagctccacgcctgcgtccgggacggcgacgtgggcatcgttggcatctacggcatggcgggggtcggcaagaccgcgctgctcaacaagttcaacaacgacttcctcatcaactcccacgacgtcaatgtcgccatctacatcgaggtcggcaaggacttcgatctcaacgacatccagaggatcatcggcgaccggctcggcgtgtcatgggagaaccggacgctcaaggagcgcgccggtgtgctctacagagtgctcagcaagatgaacttcgtgctgctgctggacgacgtttgggagccactcaatttccggatgcttggcatcccggtgcccaagcacaactcccagagcaagatcgtcttgacgaccaggatcgaggatgtgtgcgaccgcatggacgtccgccgcaagctcaagatggagtgccttccctgggagccctcgtgggagctcttccgtgagaaggttggcgaccacctgatgagcgctagccctgagatccggcaccaagcgcaggcgctggccatgaagtgcggcgggctgcccctcgctatcatcactgttggccgggcgatggccagcaagcgcactgcaaaagagtggaagcacgccatcactgtgctaaagattgccccatggcagctccttggcatggagtttgatgttcttgagcctctcaagaagagttatgataacctgcccagtgacaagttaaggctctgcctgctatattgctcattgttcccagaggagttctctatttccaaggattggatcataggctactgcatcggtgaaggtttcatagacgacttgtatactgagatggatgaaatatacaacaaggggcatgaccttcttggtgatctcaagattgcctctttgctggagaaaggtgaagatgaggatcatatcaagatgcaccctatggttcgtgccatggctctgtggattgcatcagatttcggcaccaaggagaccaaatggcttgtccgtgctggagttgggctgaaggaggcaccaggcgcagagaaatggaacgatgctgagcggatttctttcatgcggaacaacattcttgagttgtatgagaggcctaactgccccttactgaagacattgatgctgcaaggaaatcctgggctggacaagatatgtgatggattcttccaatacatgccatctctcagagtgttagatctgtctcatacctctatcagcgaattgccttcagggatcagttcattggttgagttgcagtacctggatttgtataacacaaacatcaggtcacttccaagggagctaggatctctatcgactctgcggttcttgcttctctcgcatatgccgctggaaacgatcccaggtggtgttatatgcagcctcacaatgctgcaagttctgtacatggacctcagctatggagattggaaggttggtgcaagtgggaatggtgttgattttcaggagcttgagagcctgcgtaggctcaaggcgctggacatcacaatacaatctgttgaggctctggagcggctgtcacggtcatatcgcctcgctggttccacaagaaacctactgataaagacatgctcgagcctgacaaagatagagcttccttccagcaacctgtggaagaacatgactaacctgaagagggtgtggattgtcagctgcggcaacttagctgaggtaatcatcgatagcagcaaagaagctgtgaatagcaatgcgcttccccgttccatcttgcaagctcgggcggaacttgtcgacgaagagcagcctatccttccaaccctgcacgatatcatccttcagggactgtacaaggtaaagatcgtctacaaaggcgggtgtgtacagaatctagcatcactgttcatctggtattgccatgggctggaagagctgattactgttagtgaagaacaagacatggcggcaagcggtggcggaggacaaggttcggcagcgtttagagtcatcacacccttccccaacctcaaggaactgtacctccatggcttggcaaagttcaggaggctcagcagcagcacatgtacactgcacttccccgcgctggagagcctgaaagttatcgagtgcccgaatttgaagaagctgaaactctcagctgggggactcaacgtgatacaatgcaacagggaatggtgggatgggcttgagtgggatgatgaggaagtcaaagcttcttatgagccattgttccgcccattgcactgaactcagttttggttgctagagattcttctgttattttagaggttgctcttccccgtgcatgcagtagatcgcgtgaattcagagatggccagtctgcactctgcagtgggtgtgattgtttgtattgtccatcttgcaagtacaagttgggcgattctttcttttttacccagctcgtgttctatagaaagaccagtcagcatgtgtggcagccaggaaactggcagatgtaactgtcgaaatctcctgaacagaatggctggtggataccggtcagaaattcagaacattgatagcagcttccttctgcatgagtgttgtgaagaaacagggaaggtccccatctgagcaagcccaaaaagctaaggtaggctggtatttaatccccaaagaccaaagtcctgagtaggacaaaactaggctctcagcacagcaaaatccatcaaacaaacaaagcaaaaaataactggccacccatagtcccgaattcaacagataaggtttgaccgtttgacctctttaaaagaaacgcttgtttggttggtctgtaaggatcagagaaccctaatttgtg

SEQ ID NO: 31743 - DNA, 1883 bp, Zea Mays
aaaccgcgcacagggtaatcgtagagtcccaaggtctagtcagcgcggccatctatcctccacctctccacatttgcagtgtgagttttcttgattcccttcatccttttgttgcttcgtcactaaggacgctacaccagttcatcactcgctacttgtccactagtccagtctcggatatctcagctcggacgcctaccgatctgatcatatcaagatgcaccctatggttcgtgccatggctctgtggattgcatcagatttcggcaccaaggagaccaaatggcttgtccgtgctggagttgggctgaaggaggcaccaggcgcagagaaatggaacgatgctgagcggatttctttcatgcggaacaacattcttgagttgtatgagaggcctaactgccccttactgaagacattgatgctgcaaggaaatcctgggctggacaagatatgtgatggattcttccaatacatgccatctctcagagtgttagatctgtctcatacctctatcagcgaattgccttcagggatcagttcattggttgagttgcagtacctggatttgtataacacaaacatcaggtcacttccaagggagctaggatctctatcgactctgcggttcttgcttctctcgcatatgccgctggaaacgatcccaggtggtgttatatgcagcctcacaatgctgcaagttctgtacatggacctcagctatggagattggaaggttggtgcaagtgggaatggtgttgattttcaggagcttgagagcctgcgtaggctcaaggcgctggacatcacaatacaatctgttgaggctctggagcggctgtcacggtcatatcgcctcgctggttccacaagaaacctactgataaagacatgctcgagcctgacaaagatagagcttccttccagcaacctgtggaagaacatgactaacctgaagagggtgtggattgtcagctgcggcaacttagctgaggtaatcatcgatagcagcaaagaagctgtgaatagcaatgcgcttccccgttccatcttgcaagctcgggcggaacttgtcgacgaagagcagcctatccttccaaccctgcacgatatcatccttcagggactgtacaaggtaaagatcgtctacaaaggcgggtgtgtacagaatctagcatcactgttcatctggtattgccatgggctggaagagctgattactgttagtgaagaacaagacatggcggcaagcggtggcggaggacaaggttcggcagcgtttagagtcatcacacccttccccaacctcaaggaactgtacctccatggcttggcaaagttcaggaggctcagcagcagcacatgtacactgcacttccccgcgctggagagcctgaaagttatcgagtgcccgaatttgaagaagctgaaactctcagctgggggactcaacgtgatacaatgcaacagggaatggtgggatgggcttgagtgggatgatgaggaagtcaaagcttcttatgagccattgttccgcccattgcactgaactcagttttggttgctagagattcttctgttattttagaggttgctcttccccgtgcatgcagtagatcgcgtgaattcagagatggccagtctgcactctgcagtgggtgtgattgtttgtattgtccatcttgcaagtacaagttgggcgattctttcttttttacccagctcgtgttctatagaaagaccagtcagcatgtgtggcagccaggaaactggcagatgtaactgtcgaaatctcctgaacagaatggctggtggataccggtacaaccattttctctaattctccgtttctgctctctgtgagaaataagttgagggtgtca

SEQ ID NO: 31744 - DNA, 1796 bp, Zea Mays
tttgtattccgctagctagccgggttctgagatcccgaaagcgagggtcgacctacctaccactgcctcgctttcagcgaagactttcccatcacttgtttatgctcgcgcccggggggagggctggctggcggatacttgcagttttatactccaggcgtacgctacgcggttgggccgcgggcgtccagttctctgccttctccgatccaccgatcgaattccagttccaggcggccgatggcattgaggcggcggctgttgctgctggtggtggtcgtggcggccgccgtcgctcgctgccgggcggacgaccccgcggtgagcatgctgctgccgggactcccggtcgccggcctcgccgtggggttctacaacgagaagtgcccgcaggcggaggacctggtgctcgccgagatgcggaccctcgtcgacaaagacgagaccatcggcccggcgctgctgcgcttcatgttccacgactgcctcgtccggggctgcgacgcgtcgatcatgctcgtctcgcggaacgggactgcggagagggacgccttcccgagctacggcctccggggctacgccgagatcgagcacatcaaggccaagctggaggacgcgtgcccgctgaccgtgtcgtgcgcggacatcatcgtcatggcggcccgggacgccgtgtacctgagcaacgggccgcggtacgccgtggagaccggccgccgcgacggcaaggtgtcggcggagtacgacgccgacaacgacctcccgccgccctcctccaaaatcgtcgacctcaagacctacttcagcttcaaggggttgggctggaaggacctcgtcgtgctgtcagccacacgatcgggagggcgcagtgcaccacgttcgcgtcggaccggctgtacaactacagcggccacgtggggcaggacccgtcgctgaacaaggcgtacgcggcgcagctgcgggagatgtgcgagccggggctcgccgacgacaccaccatggtggagatggacccgcgcagcccctacaccttcgacctcagctactaccgcaacgtgcgcgccaaccggggcctcttcacctcggaccaggccctcctcgacgacccgtggaccagcgcgtacgtcgagcgcatggccgacgcggcgtcgcccgacgaattcttcgccgactacgcggccgccatcaccaacatgggccgcatcgaggtgctcacgggtgacaacggcgagatcaggagcgcctgcgccgcgtacgttgactagaaattactaaccgatcgaggtcgaggaataggatagccagcgagtggttggcttggctgctgccctgctctgggcggcggtgccgttgttgacctggtcttgtcgtgcgagcgagtgcaattggtggatggatcgtcagccgtcgcgtcatgtggccacgacaacgtgggagccaaccaggatgcagtagttgcggtattctcttctctccgccgtttgggctggggtccatctgttttgttctttacgttgcgcctccattgtttgctgaggtgtgtgtgaagagacggacggtatggttgctcattcagacattcacacgacaaccacacaatggcaggaaatttttttgtcaaattatattaattcaaacagtaattgtgcttttggcaattggatgcttctgttggaatccagcgaagagacggcagttgagtagtgatggaactggacatcgagtgtttcgttttgtaagaattaattcgtatccaataaaaattgactacgtatatttgtatattcatattcatt

SEQ ID NO: 31745 - DNA, 843 bp, Zea Mays
atctatcagaatacactttcaagttatggagggtgaaactttagaagcagacaatgctgatgtaatttcaggggaagttgaagtagaaaaagtccagacccacaacatagaatcaaggtcaaagaatctcataccagtcttcgactccctccatacatcaaggtttcaacagacaaggttgaacgctcctgataacagcaggtgcgggctgctgcagcgacagaaatctgggatttcagaagatggtagactctctcgcagaagcagctgtagttctttggactgcatgtctgaagggcccaaaagctctgatgacggtgctttcagtaaatatgtagtagatgataacagttctgctgtaattaacaacccaagtgttaaatttcatgccgagcttgtaaataatactgggagcctcaagtcagaggcccagctcggatttgtaaatagcgaggaggatggtggaggtggagagcaactcccagacttgtgatgttgactatgtcaagatggtcgatggtgatggaggagcctctttaatcgctgaagtcttcattgtgcgtgtgtagctgaattctttcatttctccatcctgagttctttacctctcttctatctatagttctattcataggcattcatgaaaattttaccgagagaaaagataggaagggaggtttaattctggccctatgggtgtggaagctttggtgatgttagttcgatatcttacaagttgtaaataacatgcaataatagcacgtaatttgtgaatatttaaatcataatgtgtccaactgaggtacgagacatcttccaccatttcagacgcgtcttttcttt

SEQ ID NO: 31746 - DNA, 3500 bp, Zea Mays
cagcggccgccccaccccacttcacccgtctcgccctgcttccgcgccgtattctctcttctctcctacccacaaacaaacccgaactgaacactgcttagcagctagtattctatttctcttaatcccgtcgtctcgtccagcgaaaagaggaggaaaaaaacacacggaaccgcaggcaaaccctcgctttctccgatcgaattgctcgtccccgtgcaaccaccaccggttcggccgctccccaccaccagtcctccccgcccccgcccgccggacgatctactaggcctctcgccccgcgcgtgccgatttcccccacctcgagcgccgccctcctcccgcgcccatggcgagcacctgaggatacggtcagtgggctgtttctctgcgagagtcccacgagtccccacagaaacagcccgggggcatcagcgatcgattcggaacgccttggttcggtctgattgccggattggtggtttcgtctcggcctcggcttcctcaactatctagcttggaagccaagtctgggcttgcttcgtgtggattgcatctggggaggcggtagcgtgcacgggtgtgattctcggaccggcttcatgcgggacggcgcgccggctcctcgcgccggcgggggcttcttctcggcgcggtcgctctccaactgcatgaggatcgtgtcgtcgggggcgtccacggccgcctccacgctgcgctcggccggggcatcgctggtcaactcgatggccagccacgaggaggatgcaagtcgtgaccaggtacagtgggctggctttgataaacttgaatgtgggggtggcttgctacggcaagttttgttgctggcttataaatctggtttccaagtgtgggatgtggaacatgctgatgatgtaagacagctagaatccagacacgatggtgctgtttcgtttattcaagtgctgaaggatccaattttcacaacagaatctggagacagatttgcagacacacgaccattgctagctcttgcctgtgaaggaactcacacaggaagtggaaagaaccatgatactaatgttcctgtttttgatggaaccaatggtgctttccatagtataggcggtgaaaaccttcctactgtcttactattttattcactgagaacccatgaatatgtgcatacattgaggttcagatcagctgtttattccataaggtgcagtccgagagtcgtagctatttcacaggctactcagatacattgttttgatgccgcgaccatggagagagaatatactgttcttaccagtcctacggttgcacaagtttcaggctatggcccacttggattgggtcctagatggattgcatattctgggaatccagttccggttccagatactggacgtgttagcccacagcttcttagtctatctccctctgttccacctcctggttcaaatggtagtgtggtggcatattatgcaaaagaatcaagcaagcaactggcagctggcattgcaacacttggtgaggttggatataataagctgtccaagtactatgcagatttcattccaaatggtaatggtaccataaagcaaagaagttctgtttacaaagcaaatggtgtaacaaatggccacctcattgacagtgaatatgctggaacggtcatagttcgagatattgtctctaaattattgatagttcagttcagggcacacactagtcccatttctgcactttgctttgatccaagtggaactttgctggtgacagcatctgttcatggtcaaaacatgaatgttttccgcattatacctccacatgggacatcagaagctggtcaaattggaacctatgttcatctgtacaaactgcaaagaggcataaccaatgcgatcataaaagacatcagctttagtgatgatagtgactggataatgattagctcttcaagaggaactagccatttgttttcaatctctccatattgtggatcaacaagattccgttacagtgataacaaccctgtagaaaatgattacacagtggattcatcagttaatcatactgctcattggtcccaaaattcagcaacctctttgagtctgagtcagaagactctcttcgtatctggaccccctgtcacattgtctgttgttagtaggataagaaatgggagtaacgtgtttaagggtgctgtccatggtgctgctgcatttgcaactggtgcttccactccaatttctggtgcgattgcttcaacttttcacaaccgcatggctggtgacatcgattcagatggcagtttgcgcatgaagtattatttactagtattttctccatcaggaagcatcatacagtatgctctccatctctcagctgaacaggattctggattggatttccggacaagccccatttcttatgggccagagagagaaactgatacaaaatttgttattgaagctcttcagaagtgggatgtttgttataaaagaaatagaagagacagtgctgagagttttgcatatagtgattttgagaatggagaaaataataaacttttgctgaaagctatgtggaaagggactagtatctacccatttgactgttctgttgaaaggcaaaagctcagtgctgatgaaaaccgtaatctctatatttctcagaatacactttcaagttatggagggtgaaactttagaagcagacaatgctgatgtaatttcaggggaagttgaagtagaaaaagtccagacccacaacatagaatcaaggtcaaagaatctcataccagtcttcgactccctccatacatcaaggtttcaacagacaaggttgaacgctcctgataacagcaggtgcgggctgctgcagcgacagaaatctgggatttcagaagatggtagactctctcgcagaagcagctgtagttctttggactgcatgtctgaagggcccaaaagctctgatgacggtgctttcagtaaatatgtagtagatgataacagttctgctgtaattaacaacccaagtgttaaatttcatgccgagcttgtaaataatactgggagcctcaagtcagaggcccagctcggatttgtaaatagcgaggaggatggtggaggtggagagcaactcccagacttgtgatgttgactatgtcaagatggtcgatggtgatggaggagcctctttaatcgctgaagtcttcattgtgcgtgtgtagctgaattctttcatttctccatcctgagttctttacctctcttctatctatagttctattcataggcattcatgaaaattttaccgagagaaaagataggaagggaggtttaattctggccctatgggtgtggaagctttggtgatgttagttcgatatcttacaagttgtaaataacatgcaataatagcacgtaatttgtgaatatttaaatcataatgtgtccaactgaggtacgagacatcttccaccatttcagacgcgtcttttcttt

SEQ ID NO: 31747 - DNA, 3818 bp, Zea Mays
caccccacttcacccgtctcgccctgcttccgcgccgtattctctcttctctcctacccacaaacaaacccgaactgaacactgcttagcagctagtattctatttctcttaatcccgtcgtctcgtccagcgaaaagaggaggaaaaaaacacacggaaccgcaggcaaaccctcgctttctccgatcgaattgctcgtccccgtgcaaccaccaccggttcggccgctccccaccaccagtcctccccgcccccgcccgccggacgatctactaggcctctcgccccgcgcgtgccgatttcccccacctcgagcgccgccctcctcccgcgcccatggcgagcacctgaggatacggtcagtgggctgtttctctgcgagagtcccacgagtccccacagaaacagcccgggggcatcagcgatcgattcggaacgccttggttcggtctgattgccggattggtggtttcgtctcggcctcggcttcctcaactatctagcttggaagccaagtctgggcttgcttcgtgtggattgcatctggggaggcggtagcgtgcacgggtgtgattctcggaccggcttcatgcgggacggcgcgccggctcctcgcgccggcgggggcttcttctcggcgcggtcgctctccaactgcatgaggatcgtgtcgtcgggggcgtccacggccgcctccacgctgcgctcggccggggcatcgctggtcaactcgatggccagccacgaggaggatgcaagtcgtgaccaggtacagtgggctggctttgataaacttgaatgtgggggtggcttgctacggcaagttttgttgctggcttataaatctggtttccaagtgtgggatgtggaacatgctgatgatgtaagacagctagaatccagacacgatggtgctgtttcgtttattcaagtgctgaaggatccaattttcacaacagaatctggagacagatttgcagacacacgaccattgctagctcttgcctgtgaaggaactcacacaggaagtggaaagaaccatgatactaatgttcctgtttttgatggaaccaatggtgctttccatagtataggcggtgaaaaccttcctactgtcttactattttattcactgagaacccatgaatatgtgcatacattgaggttcagatcagctgtttattccataaggtgcagtccgagagtcgtagctatttcacaggctactcaggtatgcaattttcactgttccagagcagttcttggatcatgagtgatcctgatggggaaaataccttttgcagatacattgttttgatgccgcgaccatggagagagaatatactgttcttaccagtcctacggttgcacaagtttcaggctatggcccacttggattgggtcctagatggattgcatattctgggaatccagttccggttccagatactggacgtgttagcccacagcttcttagtctatctccctctgttccacctcctggttcaaatggtagtgtggtggcatattatgcaaaagaatcaagcaagcaactggcagctggcattgcaacacttggtgaggttggatataataagctgtccaagtactatgcagatttcattccaaatggtaatggtaccataaagcaaagaagttctgtttacaaagcaaatggtgtaacaaatggccacctcattgacagtgaatatgctggaacggtcatagttcgagatattgtctctaaattattgatagttcagttcagggcacacactagtcccatttctgcactttgctttgatccaagtggaactttgctggtgacagcatctgttcatggtcaaaacatgaatgttttccgcattatacctccacatgggacatcagaagctggtcaaattggaacctatgttcatctgtacaaactgcaaagaggcataaccaatgcgatcataaaagacatcagctttagtgatgatagtgactggataatgattagctcttcaagaggaactagccatttgttttcaatctctccatattgtggatcaacaagattccgttacagtgataacaaccctgtagaaaatgattacacagtggattcatcagttaatcatactgctcattggtcccaaaattcagcaacctctttgagtctgagtcagaagactctcttcgtatctggaccccctgtcacattgtctgttgttagtaggataagaaatgggagtaacgtgtttaagggtgctgtccatggtgctgctgcatttgcaactggtgcttccactccaatttctggtgcgattgcttcaacttttcacaaccgcatggctggtgacatcgattcagatggcagtttgcgcatgaagtattatttactagtattttctccatcaggaagcatcatacagtatgctctccatctctcagctgaacaggattctggattggatttccggacaagccccatttcttatgggccagagagagaaactgatacaaaatttgttattgaagctcttcagaagtgggatgtttgttataaaagaaatagaagagacagtgctgagagttttgcatatagtgattttgagaatggagaaaataataaacttttgctgaaagctatgtggaaagggactagtatctacccatttgactgttctgttgaaaggcaaaagctcagtgctgatgaaaaccgtaatctctatatttctcagagtgagttgcagactcatgttgtgcaaactccactctggtctaaatccaggatacactttcaagttatggagggtgaaactttagaagcagacaatgctgatgtaatttcaggggaagttgaagtagaaaaagtccagacccacaacatagaatcaaggtcaaagaatctcataccagtcttcgactccctccatacatcaaggtttcaacagacaaggtatattcaaattgtacacttgagcacttttgttagtggctgattaatgccaatactgctacataaggtatttcatctatgtggttgataaaggctgggtaattattgctggataattcaggccttcatcctgattttggaaattgctgctattgttttgtctgattagatttctcctgtggtgacttttatatttttaccctccaggttgaacgctcctgataacagcaggtgcgggctgctgcagcgacagaaatctgggatttcagaagatggtagactctctcgcagaagcagctgtagttctttggactgcatgtctgaagggcccaaaagctctgatgacggtgctttcagtaaatatgtagtagatgataacagttctgctgtaattaacaacccaagtgttaaatttcatgccgagcttgtaaataatactgggagcctcaagtcagaggcccagctcggatttgtaaatagcgaggaggatggtggaggtggagagcaactcccagacttgtgatgttgactatgtcaagatggtcgatggtgatggaggagcctctttaatcgctgaagtcttcattgtgcgtgtgtagctgaattctttcatttctccatcctgagttctttacctctcttctatctatagttctattcataggcattcatgaaaattttaccgagagaaaagataggaagggaggtttaattctggccctatgggtgtggaagctttggtgatgttagttcgatatcttacaagttgtaaataacatgcaataatagcacgtaatttgtgaatatttaaatcataatgtgtccaactgaggtacgagacatcttccaccatttcagacgcgtcttttcttt

SEQ ID NO: 31748 - DNA, 3417 bp, Zea Mays
cctgcttccgcgccgtattctctcttctctcctacccacaaacaaacccgaactgaacactgcttagcagctagtattctatttctcttaatcccgtcgtctcgtccagcgaaaagaggaggaaaaaaacacacggaaccgcaggcaaaccctcgctttctccgatcgaattgctcgtccccgtgcaaccaccaccggttcggccgctccccaccaccagtcctccccgcccccgcccgccggacgatctactaggcctctcgccccgcgcgtgccgatttcccccacctcgagcgccgccctcctcccgcgcccatggcgagcacctgaggatacggtcagtgggctgtttctctgcgagagtcccacgagtccccacagaaacagcccgggggcatcagcgatcgattcggaacgccttggttcggtctgattgccggattggtggtttcgtctcggcctcggcttcctcaactatctagcttggaagccaagtctgggcttgcttcgtgtggattgcatctggggaggcggtagcgtgcacgggtgtgattctcggaccggcttcatgcgggacggcgcgccggctcctcgcgccggcgggggcttcttctcggcgcggtcgctctccaactgcatgaggatcgtgtcgtcgggggcgtccacggccgcctccacgctgcgctcggccggggcatcgctggtcaactcgatggccagccacgaggaggatgcaagtcgtgaccaggtacagtgggctggctttgataaacttgaatgtgggggtggcttgctacggcaagttttgttgctggcttataaatctggtttccaagtgtgggatgtggaacatgctgatgatgtaagacagctagaatccagacacgatggtgctgtttcgtttattcaagtgctgaaggatccaattttcacaacagaatctggagacagatttgcagacacacgaccattgctagctcttgcctgtgaaggaactcacacaggaagtggaaagaaccatgatactaatgttcctgtttttgatggaaccaatggtgctttccatagtataggcggtgaaaaccttcctactgtcttactattttattcactgagaacccatgaatatgtgcatacattgaggttcagatcagctgtttattccataaggtgcagtccgagagtcgtagctatttcacaggctactcagatacattgttttgatgccgcgaccatggagagagaatatactgttcttaccagtcctacggttgcacaagtttcaggctatggcccacttggattgggtcctagatggattgcatattctgggaatccagttccggttccagatactggacgtgttagcccacagcttcttagtctatctccctctgttccacctcctggttcaaatggtagtgtggtggcatattatgcaaaagaatcaagcaagcaactggcagctggcattgcaacacttggtgaggttggatataataagctgtccaagtactatgcagatttcattccaaatggtaatggtaccataaagcaaagaagttctgtttacaaagcaaatggtgtaacaaatggccacctcattgacagtgaatatgctggaacggtcatagttcgagatattgtctctaaattattgatagttcagttcagggcacacactagtcccatttctgcactttgctttgatccaagtggaactttgctggtgacagcatctgttcatggtcaaaacatgaatgttttccgcattatacctccacatgggacatcagaagctggtcaaattggaacctatgttcatctgtacaaactgcaaagaggcataaccaatgcgatcataaaagacatcagctttagtgatgatagtgactggataatgattagctcttcaagaggaactagccatttgttttcaatctctccatattgtggatcaacaagattccgttacagtgataacaaccctgtagaaaatgattacacagtggattcatcagttaatcatactgctcattggtcccaaaattcagcaacctctttgagtctgagtcagaagactctcttcgtatctggaccccctgtcacattgtctgttgttagtaggataagaaatgggagtaacgtgtttaagggtgctgtccatggtgctgctgcatttgcaactggtgcttccactccaatttctggaagcatcatacagtatgctctccatctctcagctgaacaggattctggattggatttccggacaagccccatttcttatgggccagagagagaaactgatacaaaatttgttattgaagctcttcagaagtgggatgtttgttataaaagaaatagaagagacagtgctgagagttttgcatatagtgattttgagaatggagaaaataataaacttttgctgaaagctatgtggaaagggactagtatctacccatttgactgttctgttgaaaggcaaaagctcagtgctgatgaaaaccgtaatctctatatttctcagagtgagttgcagactcatgttgtgcaaactccactctggtctaaatccaggatacactttcaagttatggagggtgaaactttagaagcagacaatgctgatgtaatttcaggggaagttgaagtagaaaaagtccagacccacaacatagaatcaaggtcaaagaatctcataccagtcttcgactccctccatacatcaaggtttcaacagacaaggttgaacgctcctgataacagcaggtgcgggctgctgcagcgacagaaatctgggatttcagaagatggtagactctctcgcagaagcagctgtagttctttggactgcatgtctgaagggcccaaaagctctgatgacggtgctttcagtaaatatgtagtagatgataacagttctgctgtaattaacaacccaagtgttaaatttcatgccgagcttgtaaataatactgggagcctcaagtcagaggcccagctcggatttgtaaatagcgaggaggatggtggaggtggagagcaactcccagacttgtgatgttgactatgtcaagatggtcgatggtgatggaggagcctctttaatcgctgaagtcttcattgtgcgtgtgtagctgaattctttcatttctccatcctgagttctttacctctcttctatctatagttctattcataggcattcatgaaaattttaccgagagaaaagataggaagggaggtttaattctggccctatgggtgtggaagctttggtgatgttagttcgatatcttacaagttgtaaataacatgcaataatagcacgtaatttgtgaatatttaaatcataatgtgtccaactgaggtacgagacatcttccaccatttcagacgcgtcttttcttt

SEQ ID NO: 31749 - DNA, 4111 bp, Zea Mays
tattctctcttctctcctacccacaaacaaacccgaactgaacactgcttagcagctagtattctatttctcttaatcccgtcgtctcgtccagcgaaaagaggaggaaaaaaacacacggaaccgcaggcaaaccctcgctttctccgatcgaattgctcgtccccgtgcaaccaccaccggttcggccgctccccaccaccagtcctccccgcccccgcccgccggacgatctactaggcctctcgccccgcgcgtgccgatttcccccacctcgagcgccgccctcctcccgcgcccatggcgagcacctgaggatacggtcagtgggctgtttctctgcgagagtcccacgagtccccacagaaacagcccgggggcatcagcgatcgattcggaacgccttggttcggtctgattgccggattggtggtttcgtctcggcctcggcttcctcaactatctagcttggaagccaagtctgggcttgcttcgtgtggattgcatctggggaggcggtagcgtgcacgggtgtgattctcggaccggcttcatgcgggacggcgcgccggctcctcgcgccggcgggggcttcttctcggcgcggtcgctctccaactgcatgaggatcgtgtcgtcgggggcgtccacggccgcctccacgctgcgctcggccggggcatcgctggtcaactcgatggccagccacgaggaggatgcaagtcgtgaccaggtacagtgggctggctttgataaacttgaatgtgggggtggcttgctacggcaagttttgttgctggcttataaatctggtttccaagtgtgggatgtggaacatgctgatgatgtaagacagctagaatccagacacgatggtgctgtttcgtttattcaagtgctgaaggatccaattttcacaacagaatctggagacagatttgcagacacacgaccattgctagctcttgcctgtgaaggaactcacacaggaagtggaaagaaccatgatactaatgttcctgtttttgatggaaccaatggtgctttccatagtataggcggtgaaaaccttcctactgtcttactattttattcactgagaacccatgaatatgtgcatacattgaggttcagatcagctgtttattccataaggtgcagtccgagagtcgtagctatttcacaggctactcagatacattgttttgatgccgcgaccatggagagagaatatactgttcttaccagtcctacggttgcacaagtttcaggctatggcccacttggattgggtcctagatggattgcatattctgggaatccagttccggttccagatactggacgtgttagcccacagcttcttagtctatctccctctgttccacctcctggttcaaatggtagtgtggtggcatattatgcaaaagaatcaagcaagcaactggcagctggcattgcaacacttggtgaggttggatataataagctgtccaagtactatgcagatttcattccaaatggtaatggtaccataaagcaaagaagttctgtttacaaagcaaatggtgtaacaaatggccacctcattgacagtgaatatgctggaacggtacagacctcttgtacatattttcatcgttaattctgttatcctggagttggcaataaacttgattaacattgttgctagcattaccatgtcatctctgtatactagtattagtaagaactaaccaaccctaaggctgtcagggaccacggaattcacctggccagtttgctaacaatttgatgatcttgctattcttcctcaggaattggccacggctgatcttctgtctcctgcatttgtatacacgctttacagaaatatatccgtggcagattgtgtacttcattttacatgcctgccattttgttcagttgtttgctttcattttacatccgtggcagaagtgtgaacaatattatccatcgaaactagacgagatagtatagcaggtaaggtgggtaattagttcttcatctggatggaatggaattcaaaagtagagtagcctaatggatgcggatggatggaaattttcttatctccgtgattaagtgttcagtgtatacaaatggttttttgccattacaagttcaattaatatgatcatgctgtattttttattttttttctttacttatctcacatgattttgatattgcaatggcaggtcatagttcgagatattgtctctaaattattgatagttcagttcagggcacacactagtcccatttctgcactttgctttgatccaagtggaactttgctggtgacagcatctgttcatggtcaaaacatgaatgttttccgcattatacctccacatgggacatcagaagctggtcaaattggaacctatgttcatctgtacaaactgcaaagaggcataaccaatgcgatcataaaagacatcagctttagtgatgatagtgactggataatgattagctcttcaagaggaactagccatttgttttcaatctctccatattgtggatcaacaagattccgttacagtgataacaaccctgtagaaaatgattacacagtggattcatcagttaatcatactgctcattggtcccaaaattcagcaacctctttgagtctgagtcagaagactctcttcgtatctggaccccctgtcacattgtctgttgttagtaggataagaaatgggagtaacgtgtttaagggtgctgtccatggtgctgctgcatttgcaactggtgcttccactccaatttctggtgcgattgcttcaacttttcacaaccgcatggctggtgacatcgattcagatggcagtttgcgcatgaagtattatttactagtattttctccatcaggaagcatcatacagtatgctctccatctctcagctgaacaggattctggattggatttccggacaagccccatttcttatgggccagagagagaaactgatacaaaatttgttattgaagctcttcagaagtgggatgtttgttataaaagaaatagaagagacagtgctgagagttttgcatatagtgattttgagaatggagaaaataataaacttttgctgaaagctatgtggaaagggactagtatctacccatttgactgttctgttgaaaggcaaaagctcagtgctgatgaaaaccgtaatctctatatttctcagagtgagttgcagactcatgttgtgcaaactccactctggtctaaatccaggatacactttcaagttatggagggtgaaactttagaagcagacaatgctgatgtaatttcaggggaagttgaagtagaaaaagtccagacccacaacatagaatcaaggtcaaagaatctcataccagtcttcgactccctccatacatcaaggtttcaacagacaaggttgaacgctcctgataacagcaggtgcgggctgctgcagcgacagaaatctgggatttcagaagatggtagactctctcgcagaagcagctgtagttctttggactgcatgtctgaagggcccaaaagctctgatgacggtgctttcagtaaatatgtagtagatgataacagttctgctgtaattaacaacccaagtgttaaatttcatgccgagcttgtaaataatactgggagcctcaagtcagaggcccagctcggatttgtaaatagcgaggaggatggtggaggtggagagcaactcccagacttgtgatgttgactatgtcaagatggtcgatggtgatggaggagcctctttaatcgctgaagtcttcattgtgcgtgtgtagctgaattctttcatttctccatcctgagttctttacctctcttctatctatagttctattcataggcattcatgaaaattttaccgagagaaaagataggaagggaggtttaattctggccctatgggtgtggaagctttggtgatgttagttcgatatcttacaagttgtaaataacatgcaataatagcacgtaatttgtgaatatttaaatcataatgtgtccaactgaggtacgagacatcttccaccatttcagacgcgtcttttcttt

SEQ ID NO: 31750 - DNA, 3363 bp, Zea Mays
acggaaccgcaggcaaaccctcgctttctccgatcgaattgctcgtccccgtgcaaccaccaccggttcggccgctccccaccaccagtcctccccgcccccgcccgccggacgatctactaggcctctcgccccgcgcgtgccgatttcccccacctcgagcgccgccctcctcccgcgcccatggcgagcacctgaggatacggtcagtgggctgtttctctgcgagagtcccacgagtccccacagaaacagcccgggggcatcagcgatcgattcggaacgccttggttcggtctgattgccggattggtggtttcgtctcggcctcggcttcctcaactatctagcttggaagccaagtctgggcttgcttcgtgtggattgcatctggggaggcggtagcgtgcacgggtgtgattctcggaccggcttcatgcgggacggcgcgccggctcctcgcgccggcgggggcttcttctcggcgcggtcgctctccaactgcatgaggatcgtgtcgtcgggggcgtccacggccgcctccacgctgcgctcggccggggcatcgctggtcaactcgatggccagccacgaggaggatgcaagtcgtgaccaggtacagtgggctggctttgataaacttgaatgtgggggtggcttgctacggcaagttttgttgctggcttataaatctggtttccaagtgtgggatgtggaacatgctgatgatgtaagacagctagaatccagacacgatggtgctgtttcgtttattcaagtgctgaaggatccaattttcacaacagaatctggagacagatttgcagacacacgaccattgctagctcttgcctgtgaaggaactcacacaggaagtggaaagaaccatgatactaatgttcctgtttttgatggaaccaatggtgctttccatagtataggcggtgaaaaccttcctactgtcttactattttattcactgagaacccatgaatatgtgcatacattgaggttcagatcagctgtttattccataaggtgcagtccgagagtcgtagctatttcacaggctactcagatacattgttttgatgccgcgaccatggagagagaatatactgttcttaccagtcctacggttgcacaagtttcaggctatggcccacttggattgggtcctagatggattgcatattctgggaatccagttccggttccagatactggacgtgttagcccacagcttcttagtctatctccctctgttccacctcctggttcaaatggtagtgtggtggcatattatgcaaaagaatcaagcaagcaactggcagctggcattgcaacacttggtgaggttggatataataagctgtccaagtactatgcagatttcattccaaatggtaatggtaccataaagcaaagaagttctgtttacaaagcaaatggtgtaacaaatggccacctcattgacagtgaatatgctggaacggtcatagttcgagatattgtctctaaattattgatagttcagttcagggcacacactagtcccatttctgcactttgctttgatccaagtggaactttgctggtgacagcatctgttcatggtcaaaacatgaatgttttccgcattatacctccacatgggacatcagaagctggtcaaattggaacctatgttcatctgtacaaactgcaaagaggcataaccaatgcgatcataaaagacatcagctttagtgatgatagtgactggataatgattagctcttcaagaggaactagccatttgttttcaatctctccatattgtggatcaacaagattccgttacagtgataacaaccctgtagaaaatgattacacagtggattcatcagttaatcatactgctcattggtcccaaaattcagcaacctctttgagtctgagtcagaagactctcttcgtatctggaccccctgtcacattgtctgttgttagtaggataagaaatgggagtaacgtgtttaagggtgctgtccatggtgctgctgcatttgcaactggtgcttccactccaatttctggtgcgattgcttcaacttttcacaaccgcatggctggtgacatcgattcagatggcagtttgcgcatgaagtattatttactagtattttctccatcaggaagcatcatacagtatgctctccatctctcagctgaacaggattctggattggatttccggacaagccccatttcttatgggccagagagagaaactgatacaaaatttgttattgaagctcttcagaagtgggatgtttgttataaaagaaatagaagagacagtgctgagagttttgcatatagtgattttgagaatggagaaaataataaacttttgctgaaagctatgtggaaagggactagtatctacccatttgactgttctgttgaaaggcaaaagctcagtgctgatgaaaaccgtaatctctatatttctcagagtgagttgcagactcatgttgtgcaaactccactctggtctaaatccaggatacactttcaagttatggagggtgaaactttagaagcagacaatgctgatgtaatttcaggggaagttgaagtagaaaaagtccagacccacaacatagaatcaaggtcaaagaatctcataccagtcttcgactccctccatacatcaaggtttcaacagacaagcaggtgcgggctgctgcagcgacagaaatctgggatttcagaagatggtagactctctcgcagaagcagctgtagttctttggactgcatgtctgaagggcccaaaagctctgatgacggtgctttcagtaaatatgtagtagatgataacagttctgctgtaattaacaacccaagtgttaaatttcatgccgagcttgtaaataatactgggagcctcaagtcagaggcccagctcggatttgtaaatagcgaggaggatggtggaggtggagagcaactcccagacttgtgatgttgactatgtcaagatggtcgatggtgatggaggagcctctttaatcgctgaagtcttcattgtgcgtgtgtagctgaattctttcatttctccatcctgagttctttacctctcttctatctatagttctattcataggcattcatgaaaattttaccgagagaaaagataggaagggaggtttaattctggccctatgggtgtggaagctttggtgatgttagttcgatatcttacaagttgtaaataacatgcaataatagcacgtaatttgtgaatatttaaatcataatgtgtccaactgaggtacgagacatcttccaccatttcagacgcgtcttttcttt

SEQ ID NO: 31751 - DNA, 1931 bp, Zea Mays
gaacaatattatccatcgaaactagacgagatagtatagcaggtcatagttcgagatattgtctctaaattattgatagttcagttcagggcacacactagtcccatttctgcactttgctttgatccaagtggaactttgctggtgacagcatctgttcatggtcaaaacatgaatgttttccgcattatacctccacatgggacatcagaagctggtcaaattggaacctatgttcatctgtacaaactgcaaagaggcataaccaatgcgatcataaaagacatcagctttagtgatgatagtgactggataatgattagctcttcaagaggaactagccatttgttttcaatctctccatattgtggatcaacaagattccgttacagtgataacaaccctgtagaaaatgattacacagtggattcatcagttaatcatactgctcattggtcccaaaattcagcaacctctttgagtctgagtcagaagactctcttcgtatctggaccccctgtcacattgtctgttgttagtaggataagaaatgggagtaacgtgtttaagggtgctgtccatggtgctgctgcatttgcaactggtgcttccactccaatttctggtgcgattgcttcaacttttcacaaccgcatggctggtgacatcgattcagatggcagtttgcgcatgaagtattatttactagtattttctccatcaggaagcatcatacagtatgctctccatctctcagctgaacaggattctggattggatttccggacaagccccatttcttatgggccagagagagaaactgatacaaaatttgttattgaagctcttcagaagtgggatgtttgttataaaagaaatagaagagacagtgctgagagttttgcatatagtgattttgagaatggagaaaataataaacttttgctgaaagctatgtggaaagggactagtatctacccatttgactgttctgttgaaaggcaaaagctcagtgctgatgaaaaccgtaatctctatatttctcagagtgagttgcagactcatgttgtgcaaactccactctggtctaaatccaggatacactttcaagttatggagggtgaaactttagaagcagacaatgctgatgtaatttcaggggaagttgaagtagaaaaagtccagacccacaacatagaatcaaggtcaaagaatctcataccagtcttcgactccctccatacatcaaggtttcaacagacaaggttgaacgctcctgataacagcaggtgcgggctgctgcagcgacagaaatctgggatttcagaagatggtagactctctcgcagaagcagctgtagttctttggactgcatgtctgaagggcccaaaagctctgatgacggtgctttcagtaaatatgtagtagatgataacagttctgctgtaattaacaacccaagtgttaaatttcatgccgagcttgtaaataatactgggagcctcaagtcagaggcccagctcggatttgtaaatagcgaggaggatggtggaggtggagagcaactcccagacttgtgatgttgactatgtcaagatggtcgatggtgatggaggagcctctttaatcgctgaagtcttcattgtgcgtgtgtagctgaattctttcatttctccatcctgagttctttacctctcttctatctatagttctattcataggcattcatgaaaattttaccgagagaaaagataggaagggaggtttaattctggccctatgggtgtggaagctttggtgatgttagttcgatatcttacaagttgtaaataacatgcaataatagcacgtaatttgtgaatatttaaatcataatgtgtccaactgaggtacgagacatcttccaccatttcagacgcgtcttttcttt

SEQ ID NO: 31752 - DNA, 872 bp, Zea Mays
ctccctccgggtgtgtctccttgttctccgctctcttcctcctcccctcccccgcaactgctccctttcaccttgtggcactaaggtagaggaaggagggtcagaaaaaccccgtcggcccccgaccaccccatgcagttgaatcaagctccacctccccgacaccaccacacatcgtcgtttgttcgtgttcatcgcgccccacctccgccgcacccaagccaagccaaacctcggtggggagcgtgtctccgtcaatcaatcaagcgcatggccaccgttcccagcaacaccctcgtcaaggtggcggagctcgtgtcgacgcactcctcgccagagtcggtctatggcgcaggtcatggggtggaagccgatgctcgcgcttgcgctcatgtacctgaggaagcaccacacggggtgcctgttctcggtcgaggtcgatgctactcgtggcgtgccggcctccatggaggggttccgcctcgctgtctgtgcacaaggtggagactagggatggcttagtgcagaccccgccgtgctgggtatgcgacgtcaccacggacttcgacgagtcgctctttgtcaaattccccctcccctcgtgctctctggatcggactgtggtggcttggactgttccccttgcagtgttgtctcggagggaggaacaagaccattgcagctgtgttgaccgttgagttacccacgatcgtctccacatgtcctattcctgttcaaggaggagtgcggtgagccagtacccggtgacgccgttgcggaccctgctcgacaagctcttcagtggcgacagcccctacgtgggcttccctcctgagcacacgacaaccgagtctggagaggtaattgacgat

SEQ ID NO: 31753 - DNA, 1316 bp, Zea Mays
gttctccgctctcttcctcctcccctcccccgcaactgctccctttcaccttgtggcactaaggtagaggaaggagggtcagaaaaaccccgtcggcccccgaccaccccatgcagttgaatcaagctccacctccccgacaccaccacacatcgtcgtttgttcgtgttcatcgcgccccacctccgccgcacccaagccaagccaaacctcggtggggagcgtgtctccgtcaatcaatcaagcgcatggccaccgttcccagcaacaccctcgtcaaggtggcggagctcgtgtcgacgcactcctcgccagagtcggtctatggcgcaggtcatggggtggaagccgatgctcgcgcttgcgctcatgtacctgaggaagcaccacacggggtgcctgttctcggtcgaggtcgatgctactcgtggcgtgccggcctccatggaggggttccgcctcgctgtctgtgcacaaggtggagactagggatggcttagtgcagaccccgccgtgctgggtatgcgacgtcaccacggacttcgacgagtcgctctttgtcaaattccccctcccctcgtgctctctggatcggactgtggtggcttggactgttccccttgcagtgttgtctcggagggaggaacaagaccattgcagctgtgttgaccgttgagttacccacgatcgtctccacatgtcctattcctgttcaaggaggagtgcggtgagccagtacccggtgacgccgttgcggaccctgctcgacaagctcttcagtggcgacagcccctacgtgggcttccctcctgagcacacgacaaccgccagatatccaattcatcattatgttgtggtcatggcaaagtcgggagaaccatatttcgaccaaagcaagcagaggcaggggtgtgaggagcagatggattacgatggctgcagtggggaggaagcatgagagatatggggaatgatctgcatggtcgtcactgctcgaatcgtgatgccaagggcaacggtgaggctttcagcaggccgaatatggttctccatgccagatcaagcactctgcttccttggtggggccaactcaatctttgctaacgagaaacttctcacaaccgcgaacaacgactttgacgtggaccaggcgatgtttacattctgttcacctatatatgcctatgctatttattgactcaatcattgtagcaaaaaattatattgcactagcaaatatgatgtttttatattctctagcagatttttaagctatgtaaacctacttaacttttaaaaaatacacgtgagcatag

SEQ ID NO: 31754 - DNA, 503 bp, Zea Mays
cgggcattcgcgttcctccctaatgttgctgcaaagtccatatatatagttcatcctgctgggcgtggaaggcgtcgggcaggcctgcgtttacgccggggtatgcttcgccggctcggtcgcgggggtcgtcgtgatcgagcgagccgtcagcaagtctggccgggtctcgctcatcgtgttcctcgtcaccgccatcatggcgctcagcgctgtcatcgtcacctgcttcggagcgttagacgtctggatgcagtacaccaccggggaatacatgggcttcaagctaccttgctgacatcttgctcggtgttatgggcttcgttttggttttgcgtttgtgctcttcaccttgtaatgtctggaaagagaggccggagtaggactggttgtgcatgggcactcattgtaatttccaattttcaggttttatatagtgtgaattgtcatcttcacttgtttatttactcccacggggaaaaatatatatgttcatgagtgca

SEQ ID NO: 31755 - DNA, 3218 bp, Zea Mays
atttatttctggcagacagtttggaatttttaggtcgaatgggcttttggtgattgaatttacttctgaaacccacatgcagtagtgatacagaggaacacctgaaccacaaatggtgccgtcggttccttgtccaagtggcctgtgactgtgaggctgtgaccagagataagcagccacagcccacagctccccctggccggtggccgccactccacgctccacgacattcaccaccaccacggcaccaccctgtcccttcagctccaacgtgcatgagagacgccactcgcggtacccacgcggcggcagaggcgctggcggcccgtcgtccgcgccgagcaatggcgtccccactgctctgcggctgcgccctcctcctctacctacttggccacctcgcgacctgccacgccgccagggacaccatcacgccgagcagcccgctggcggccaacgagacgctggtctcgggcggcgacggcaacttcgcgctgggcttcttcaccccgccgggcgccaacagcacgtacctcggcgtgtggtacaacaaggtctccctccgcactgtggtgtgggtggccaaccgcgaggccccgatcgcgggcgccgtcggggacaacccgggcgccacgctgtcggtctccggcggcggcacgctggccattgccgcggggaacgggaccgtggtgtggtccgtccggagcgcgtccagcaggcggctggcgagcccggccgcccagatcctcgacaacggcaacctggtgctgaaagacggtgccggcggcggcggcgccgtggcgtgggaggggttcgactacccgacggacacgctgctcccggagatgaagctggggatcgactacgtgaaggggaagaaccggacgctgacgtcgtggaagagcccgtcggacccgtccacgggccccgtcgccatggtgatggacaccacgggcgacccgcaggtgttcatctggaacggcggcgagaaggtctggcgctccggcccctgggacggcgtccagttcaccggcgtgcccgacaccgccacctactccggcttcaccttcagcttcataaacagcgcgcaggaagtaacgtacagcttccaggtgcataacgcgtcgatcatctcgcatctgggcgtcgtgagctcgggcaactacggcctgctgcagcgttcgacgtgggtggaggcggcgcgggcgtggaacctgtactggtacgctcccaaggaccagtgcgacgcggtgtcgccgtgcggcgccaacggcgtgtgcgacaccaacaacatgccggtgtgctcctgcctgcgcggcttcacacccaggacccccgcggcgtgggcgctgcgggacgggcgcgacggctgcgtgcggtcgacgccgctggactgccgccgtaacggcaccaccagcaccaccgacgggttcgtcgcggtgcggcacgccaaggtgcccgacacggagcgcagcgcggtggactggagcctgacgctggagcagtgccggcaggcgtgcctccgcaactgctcctgcacggcgtacgcgagcgccaacgtcagcagcggcggcggcgggcgcggcggcggcgccggcggagggtcgggctgcgtcatgtggaccacgggactcaccgacctgcgcgtgtaccccgacttcgggcaggacctcttcgtccgcctcgccgcctctgatctcgatgtgctggaaggcagatcaagggcggcacgcattagaatcgcggttggtgtcagcgtctcgctgctggcgcttcttctagcggttgctggcctcctcatctggttaagaaagagaaggctaacgagaacagccggatccagcaaatggagcggctcacgcagcaccggccgtcggtacgaggggagcagccatggtgacgatctggagctgccaatatttgatctgggcacaattgcagccgctacggatggtttctccatcaacaacaagcttggcgagggtggctttggaccagtatacaagggtaaactcgaggatggaatggagatcgcagtgaaaacactctcgaagacatccgcacaaggtcttgacgagttcaagaacgaggttttgctgatagccaagctccagcaccggaatcttgttcgccttctcggatgcagcattagcggacaggaaaggatgcttgtttacgagtacatggcaaacaagagcctggacttcttcctgtttgagaaagacactgtggtgcttgactggcaagtgcggtatcgtataatagaaggcatcactcgaggtttactctacctccaccaggactcgagactttggcatggcaagaatatttggcaacgaagagacggaaattaacaccttaaaagtggttggcacatatggttacatgtctccggagtacgcaatggatgggatcttctctgtcaagtcggacgtgttcagctatggagtactattgctggagatcgttagtggcaggaggaacaggggagtgtattccagttcaaacaaccaaagccttctaggccatgcatggagcttgtggaacgaggagaagagcatagagctagcagatgagagaatgaacggacaattcaactcagacgaagtgcagaagtgcgtcagggttgggctactgtgcgtgcaagagaatccagacgaccgtccgctgatgtctcaggtgcttctgatgttagctagtcctgatgccgcatcactgccgactcctaagcaacctggcttcgcagctaggagagttctaatggaaacagacacatcatcgaccaagcccgactgcagcgtgtttgacagtgcgacaaccatcatgcttgaaggtcgatagaagttactcgatcactcgcctcagaataagtgtcgtgtcagtcaagttttttttaaagttttgactaggtttgtagaaatattagcatcttcaaataagtttattaaaaatagatttaatgatctatctatcatatatactataaatattaatatttttatatatttagttacatttaaaattatttaatttctagaaagcgagacagctcttattttcggacggaaggaacatgactaacacaccttgttgaaactgaaactagtcgaaaaatttgtattctagactaaatttcgtggcatcttcagtatcttgtatgattaggcagcaaaaaattatatgaatattagataatagtagtaggtagaatcttcgtt

SEQ ID NO: 31756 - DNA, 2998 bp, Zea Mays
atttatttctggcagacagtttggaatttttaggtcgaatgggcttttggtgattgaatttacttctgaaacccacatgcagtagtgatacagaggaacacctgaaccacaaatggtgccgtcggttccttgtccaagtggcctgtgactgtgaggctgtgaccagagataagcagccacagcccacagctccccctggccggtggccgccactccacgctccacgacattcaccaccaccacggcaccaccctgtcccttcagctccaacgtgcatgagagacgccactcgcggtacccacgcggcggcagaggcgctggcggcccgtcgtccgcgccgagcaatggcgtccccactgctctgcggctgcgccctcctcctctacctacttggccacctcgcgacctgccacgccgccagggacaccatcacgccgagcagcccgctggcggccaacgagacgctggtctcgggcggcgacggcaacttcgcgctgggcttcttcaccccgccgggcgccaacagcacgtacctcggcgtgtggtacaacaaggtctccctccgcactgtggtgtgggtggccaaccgcgaggccccgatcgcgggcgccgtcggggacaacccgggcgccacgctgtcggtctccggcggcggcacgctggccattgccgcggggaacgggaccgtggtgtggtccgtccggagcgcgtccagcaggcggctggcgagcccggccgcccagatcctcgacaacggcaacctggtgctgaaagacggtgccggcggcggcggcgccgtggcgtgggaggggttcgactacccgacggacacgctgctcccggagatgaagctggggatcgactacgtgaaggggaagaaccggacgctgacgtcgtggaagagcccgtcggacccgtccacgggccccgtcgccatggtgatggacaccacgggcgacccgcaggtgttcatctggaacggcggcgagaaggtctggcgctccggcccctgggacggcgtccagttcaccggcgtgcccgacaccgccacctactccggcttcaccttcagcttcataaacagcgcgcaggaagtaacgtacagcttccaggtgcataacgcgtcgatcatctcgcatctgggcgtcgtgagctcgggcaactacggcctgctgcagcgttcgacgtgggtggaggcggcgcgggcgtggaacctgtactggtacgctcccaaggaccagtgcgacgcggtgtcgccgtgcggcgccaacggcgtgtgcgacaccaacaacatgccggtgtgctcctgcctgcgcggcttcacacccaggacccccgcggcgtgggcgctgcgggacgggcgcgacggctgcgtgcggtcgacgccgctggactgccgccgtaacggcaccaccagcaccaccgacgggttcgtcgcggtgcggcacgccaaggtgcccgacacggagcgcagcgcggtggactggagcctgacgctggagcagtgccggcaggcgtgcctccgcaactgctcctgcacggcgtacgcgagcgccaacgtcagcagcggcggcggcgggcgcggcggcggcgccggcggagggtcgggctgcgtcatgtggaccacgggactcaccgacctgcgcgtgtaccccgacttcgggcaggacctcttcgtccgcctcgccgcctctgatctcgatgtgctggaaggcagatcaagggcggcacgcattagaatcgcggttggtgtcagcgtctcgctgctggcgcttcttctagcggttgctggcctcctcatctggttaagaaagagaaggctaacgagaacagccggatccagcaaatggagcggctcacgcagcaccggccgtcggtacgaggggagcagccatggtgacgatctggagctgccaatatttgatctgggcacaattgcagccgctacggatggtttctccatcaacaacaagcttggcgagggtggctttggaccagtatacaagggtaaactcgaggatggaatggagatcgcagtgaaaacactctcgaagacatccgcacaaggtcttgacgagttcaagaacgaggttttgctgatagccaagctccagcaccggaatcttgttcgccttctcggatgcagcattagcggacaggaaaggatgcttgtttacgagtacatggcaaacaagagcctggacttcttcctgtttgagaaagacactgtggtgcttgactggcaagtgcggtatcgtataatagaaggcatcactcgaggtttactctacctccaccaggactcgaggtacagaatcatccatagagatctgaaggcggccaatgttctcctagacaaggagatgactcccaagatttcagactttggcatggcaagaatatttggcaacgaagagacggaaattaacaccttaaaagtggttggcacatatggttacatgtctccggagtacgcaatggatgggatcttctctgtcaagtcggacgtgttcagctatggagtactattgctggagatcgttagtggcaggaggaacaggggagtgtattccagttcaaacaaccaaagccttctaggccatgcatggagcttgtggaacgaggagaagagcatagagctagcagatgagagaatgaacggacaattcaactcagacgaagtgcagaagtgcgtcagggttgggctactgtgcgtgcaagagaatccagacgaccgtccgctgatgtctcagctaggagagttctaatggaaacagacacatcatcgaccaagcccgactgcagcgtgtttgacagtgcgacaaccatcatgcttgaaggtcgatagaaaacatgactaacacaccttgttgaaactgaaactagtcgaaaaatttgtattctagactaaatttcgtggcatcttcagtatcttgtatgattaggcagcaaaaaattatatgaatattagataatagtagtaggtagaatcttcgtt

SEQ ID NO: 31757 - DNA, 1534 bp, Zea Mays
catgggttttgctcggtgctctgtttggttggacggctggcgcctggcgcggcgcgcagtcgagaagcagggcctcactctgaaaaggacctcggatgcggctgacgaggtgttcatgcagacctggatcagctgacagatctatccacgcaacagcagtacagcacccgatgtgctggaaggcagatcaagggcggcacgcattagaatcgcggttggtgtcagcgtctcgctgctggcgcttcttctagcggttgctggcctcctcatctggttaagaaagagaaggctaacgagaacagccggatccagcaaatggagcggctcacgcagcaccggccgtcggtacgaggggagcagccatggtgacgatctggagctgccaatatttgatctgggcacaattgcagccgctacggatggtttctccatcaacaacaagcttggcgagggtggctttggaccagtatacaagggtaaactcgaggatggaatggagatcgcagtgaaaacactctcgaagacatccgcacaaggtcttgacgagttcaagaacgaggttttgctgatagccaagctccagcaccggaatcttgttcgccttctcggatgcagcattagcggacaggaaaggatgcttgtttacgagtacatggcaaacaagagcctggacttcttcctgtttgagaaagacactgtggtgcttgactggcaagtgcggtatcgtataatagaaggcatcactcgaggtttactctacctccaccaggactcgaggtacagaatcatccatagagatctgaaggcggccaatgttctcctagacaaggagatgactcccaagatttcagactttggcatggcaagaatatttggcaacgaagagacggaaattaacaccttaaaagtggttggcacatatggttacatgtctccggagtacgcaatggatgggatcttctctgtcaagtcggacgtgttcagctatggagtactattgctggagatcgttagtggcaggaggaacaggggagtgtattccagttcaaacaaccaaagccttctaggccatgcatggagcttgtggaacgaggagaagagcatagagctagcagatgagagaatgaacggacaattcaactcagacgaagtgcagaagtgcgtcagggttgggctactgtgcgtgcaagagaatccagacgaccgtccgctgatgtctcaggtgcttctgatgttagctagtcctgatgccgcatcactgccgactcctaagcaacctggcttcgcagctaggagagttctaatggaaacagacacatcatcgaccaagcccgactgcagcgtgtttgacagtgcgacaaccatcatgcttgaaggtcgatagaaaacatgactaacacaccttgttgaaactgaaactagtcgaaaaatttgtattctagactaaatttcgtggcatcttcagtatcttgtatgattaggcagcaaaaaattatatgaatattagataatagtagtaggtagaatcttcgtt

SEQ ID NO: 31758 - DNA, 1976 bp, Zea Mays
aattaattaaaaaaaagaagaagatcgcgtcaagagtcagaacctgcggcgttgagcgcgtctatctccgactgcgcgagccgtatgtacacgtcctcaacgtccgtggtgtagagccgcatgtccagcagatcgacggcccagatgacgcagccgcggtcgacacccccgctgacgttcgccgccgcgtacgcccggcagctgcagttgctgaggcacgcctgcctgcactgctccagcgtcaggccggcgtacaccgtcgcgttggtggcctccggcagcttcatctggtcgacgacccagaacccgtcgctgctggcgttggcgccgccgccgcagccgaggctggtcctcctcacgcagccggccgacccgtcgcggaggttccactgctgcggggaccgtggctcgaaccccgggaggcagaagcaggccggggactggccggtgccgtcgcagtacccgaacggcccgcacttggcgtaggtgtcgcacgggtcggtggggtagtaccagaagttgctccacccgccgttgagcatcacgaagcgctgcacctgccccgccgcctcgtccacgacgagccgcgacagcagcgcgtcgacgccgatggagtaggtgtagtacgtctcgtcggggctccacacgaccctgaaggtgaagtcgttcgagctgaggtacggcacgccggtgaggatctcgccgttccacggcccgctcgtgtacagcctcgccttgccccggaggaggaagaactgcggcagcccgccggtgatcagcttgaaggtgacgtcgcccggcgacgggtcggacgcgctgcgccacgccgtgatgttccgggtgatgccggccctggcgtccaccccgagcttcatgcccgggagcagcgtgtccgtcgggtagtcgaagctctgccacgccacgctctggtcggagccgctcccgtccgagctgagcacgaggttgccgctgtccagcagccgcgcggtggcgccggcggtcacgttcctggtcggcgccgccgaggcccacaccgtgccgttctggccgtcgaggacgaggaggcggccgtcggcgccggagagccggaggacggctggagagctgaggaccgggctctggcggttggcgacccacacgatggtgcgcaccgtgatgttgtagtaccaaatcccgaggtacgtcctggcgccatccgggctgaagaagccgagctggaagacgtcgccggccgagacgagcgtctggttattgccggcgatggaggcggacgtgccgagggtgtcggtggaggtggagagtgggaagaacgcggcggtggcgaggaggacgagggggagcgcgcacgccctcatgctcgatctcgcctgaatcgcacaccccgcgccagggcaaaacggactactgctaactctcaggacattgcgcccccagttgccttgtgacggtgcctgcgctgcgcctgcaaacctcgagggaggcttcggatcagcgggagggagaggacgttgtcttgtaccgggtaatcaaccagtgcgacggtgcggccgagaatttgttattctagtcagtcacatactcacatggggcagtggccacgtttgagttctttttttttatcaacaggcttttaacaagacaagatcccagccctgtgcgggttggttggcatttggagaactggagtataagaagccgggcgagtcagagttggagacttgggaggctggaacggcgagctgtttccacgcgggttggttggcatttggagaacgagtttgatccgcatgcgaactacaaaaccaaacacacgcgtgcgcacaggtttcctcctccgccgccgcacacgcctgccatatagagatgtcaatgtgctcgataccctttcgccgtcgacgaattcctgattgccgaacttgcggaacagatgtaggtatattccctgtgcgggtaaatacgaagaaaaaattgtttca

SEQ ID NO: 31759 - DNA, 742 bp, Zea Mays
caggaaggcatgggcgcggtcatgccgagtgatggtggcagcaacttttgatagacaaccttgttggatatgatactatacctacaaacagcttggtgatttctcctggtcatggttatttatacaactttgagatgaaggagctaaatggtcttagttatggccatgaaacaccagaaggtcctacaaaatttggagcttggaagatggtgctacgattttcaagagctgctagccaacgccaatgcatctcgtttaagatcgtgcatgtgacctttcctctcctctcctgatgttaggccttcacaacttgtattatgtgcgggcagaaaaaatccactcttttatatagcaaccacctgctgttaagacctttttgactctatatcctaaggctgcaaactgtgttctctaagtatatgtgtaaccagcatcttttattggcccaaaaatgtatttgattccatgcctcacttatggttgtttacttttatttatagttatttctgtaccttaagtctagctggaggtgcttttatatacttgtgctaactgaaagttagcattgtaccttaagtctaactggaattgttatttctatacttgcactaactaaatgttcccacacgaatgctatagcgcccgatagggcgctccttttcctagtgctataaaaagcaagttctatacctcatgaagttggatggtaattaccaactagtgtcatatcttacacaactcc

SEQ ID NO: 31760 - DNA, 2977 bp, Zea Mays
gtcatgccgagtgatggtgcgggtccccctctgctccgttttccaattagtgaaccagataggagtcttcttcctccccgaccacaccgctcctctccttccaagccctcgtcaccaccagcctgctctcattcctgtgccacctggatctcaactgcttgcgctcaacatgctccccacacactctcgctgcggcgtgtgcccgcccaacccgtgcatcgctctctgtcgcttccgcctcatcataggtgatggcgtcgtcgtccccgcagcagcacacgaggtcggctcgtcctcgaacctcgcgcaatttaggaatagcggcggatccttcccaggtagacttggatgttgcggtccagcgaatgtcgggggtgtggaaggagatctccaccgctggagggctctccacgcccatcctccctcccccatccccgctgccagctctgacgctgacagtgccgcagagacgacgctggagtattgtattagtttgtttatcttttgttttgatctaggtcttaatttgccttgatatgtgcaaggcctgcagttgaatgcaatgcgagcaacagctcagttatgtgtgtgtgacgctgaagggatctatctctatgctcaagcataagaagcataattttgttattcattgaatgaagaactggctactctacccgttccaaattatatatacttcaagctgtacatgataatcaggtggcaaaagaatgtcaactcaattttttctatgttttctttttcaggtggcagcaacttttgatagacaaccttgttggatatgatactatacctacaaacagcttggtgatttctcctggtcatggttatttatacaactttgagatgaaggagctaaatggtcttagttatggccatgaaacaccagaaggtcctacaaaatttggaggttggtatagctaactttgttttctcaatatgttggttcaactcttgagtgttttctacatgacatcactgtaatttctaaattacaatgaactttgtgattggaaaatacgagcagaaggcatgttaaccccgctggaccccaaccctctattcacgccaaacctcagcctaaccttcattgcttcaagtgttagagcctccacctcagctttgtcttatgtgatctctttcgataattcgtcacagacttcttccacgagcacacgtgccttcctccttctcacaatcttacaaataacgttggcagcagactttatctcagatagatcattgagcaatttggaattcattatctccgcactctattaccgtttcctctcctgattcagttcttcctttgagccaataaaaatagtggcagcataagcattcttctaattaccctcccttgaacactattggctgataagtatggactgggccaaggaaaacgtcattagctgcagctgcaatccctgcattcaatctagcgcagcatagcgttagtgagacaactgacctaattatcattacaaaagaagggcactagaattatagataaccaatatcatagagacctgacatctgaattttgagtgctatctaaaaagagattgagataacgtggatatgctaaactcagaacaagaccacaacaacctgaatagggtacaaatccagagaatgtggatgtgctgaaccctgagcaggaccaccgtttttgctgttccagctttccaagacataacatccaaatactaatcatttaattgagttctcactcgaaccacgtccaaggaatggttggactgtgtcattgcctgtaaaatctgctatttgtatgcttttaagccttttcttgatgccagcctttcttatagtatcaaagttcttcacattcttagtcttggtttctcaagtttgctgcactgtgcaattttttgtggctaccaagagaatattctcagctagcatgttcttatgcctactacttcttaaacattgtttcatcagtgtgtcatgtctaaaagcatttgcccctcttatagtgtacttctgggactatatgtatagaactatagaccacaatatacatgggggtggtttatttataagatgctctgtttaatggtggttgttacaatcatctacgttatgtttcttgctttggttaagtgataggatcgatatggttcgaaacatttcagtcttttttccttttactaatttgtattgtggctatttggagaaaaatgcaatttttttgttcaaatcaactgccacgaacgtgtgttctaatgaacccatgctatagaatctcgatcttttttcctataacatataggagtcctacatttataatatggatatacgtctattgcctaacaaaacgtgctcaatattttgtatatcttttgatcagtatatgttttcataatgttatttgaatgtaactcaagctagcttggaagatggtgctacgattttcaagagctgctagccaacgccaatgcatctcgtttaagatcgtgcatgtgacctttcctctcctctcctgatgttaggccttcacaacttgtattatgtgcgggcagaaaaaatccactcttttatatagcaaccacctgctgttaagacctttttgactctatatcctaaggctgcaaactgtgttctctaagtatatgtgtaaccagcatcttttattggcccaaaaatgtatttgattccatgcctcacttatggttgtttacttttatttatagttatttctgtaccttaagtctagctggaggtgcttttatatacttgtgctaactgaaagttagcattgtaccttaagtctaactggaattgttatttctatacttgcactaactaaatgttcccacacgaatgctatagcgcccgatagggcgctccttttcctagtgctataaaaagcaagttctatacctcatgaagttggatggtaattaccaactagtgtcatatcttacacaactcc

SEQ ID NO: 31761 - DNA, 2433 bp, Zea Mays
ctctgctccgttttccaattagtgaaccagataggagtcttcttcctccccgaccacaccgctcctctccttccaagccctcgtcaccaccagcctgctctcattcctgtgccacctggatctcaactgcttgcgctcaacatgctccccacacactctcgctgcggcgtgtgcccgcccaacccgtgcatcgctctctgtcgcttccgcctcatcataggtggcagcaacttttgatagacaaccttgttggatatgatactatacctacaaacagcttggtgatttctcctggtcatggttatttatacaactttgagatgaaggagctaaatggtcttagttatggccatgaaacaccagaaggtcctacaaaatttggaggttggtatagctaactttgttttctcaatatgttggttcaactcttgagtgttttctacatgacatcactgtaatttctaaattacaatgaactttgtgattggaaaatacgagcagaaggcatgttaaccccgctggaccccaaccctctattcacgccaaacctcagcctaaccttcattgcttcaagtgttagagcctccacctcagctttgtcttatgtgatctctttcgataattcgtcacagacttcttccacgagcacacgtgccttcctccttctcacaatcttacaaataacgttggcagcagactttatctcagatagatcattgagcaatttggaattcattatctccgcactctattaccgtttcctctcctgattcagttcttcctttgagccaataaaaatagtggcagcataagcattcttctaattaccctcccttgaacactattggctgataagtatggactgggccaaggaaaacgtcattagctgcagctgcaatccctgcattcaatctagcgcagcatagcgttagtgagacaactgacctaattatcattacaaaagaagggcactagaattatagataaccaatatcatagagacctgacatctgaattttgagtgctatctaaaaagagattgagataacgtggatatgctaaactcagaacaagaccacaacaacctgaatagggtacaaatccagagaatgtggatgtgctgaaccctgagcaggaccaccgtttttgctgttccagctttccaagacataacatccaaatactaatcatttaattgagttctcactcgaaccacgtccaaggaatggttggactgtgtcattgcctgtaaaatctgctatttgtatgcttttaagccttttcttgatgccagcctttcttatagtatcaaagttcttcacattcttagtcttggtttctcaagtttgctgcactgtgcaattttttgtggctaccaagagaatattctcagctagcatgttcttatgcctactacttcttaaacattgtttcatcagtgtgtcatgtctaaaagcatttgcccctcttatagtgtacttctgggactatatgtatagaactatagaccacaatatacatgggggtggtttatttataagatgctctgtttaatggtggttgttacaatcatctacgttatgtttcttgctttggttaagtgataggatcgatatggttcgaaacatttcagtcttttttccttttactaatttgtattgtggctatttggagaaaaatgcaatttttttgttcaaatcaactgccacgaacgtgtgttctaatgaacccatgctatagaatctcgatcttttttcctataacatataggagtcctacatttataatatggatatacgtctattgcctaacaaaacgtgctcaatattttgtatatcttttgatcagtatatgttttcataatgttatttgaatgtaactcaagctagcttggaagatggtgctacgattttcaagagctgctagccaacgccaatgcatctcgtttaagatcgtgcatgtgacctttcctctcctctcctgatgttaggccttcacaacttgtattatgtgcgggcagaaaaaatccactcttttatatagcaaccacctgctgttaagacctttttgactctatatcctaaggctgcaaactgtgttctctaagtatatgtgtaaccagcatcttttattggcccaaaaatgtatttgattccatgcctcacttatggttgtttacttttatttatagttatttctgtaccttaagtctagctggaggtgcttttatatacttgtgctaactgaaagttagcattgtaccttaagtctaactggaattgttatttctatacttgcactaactaaatgttcccacacgaatgctatagcgcccgatagggcgctccttttcctagtgctataaaaagcaagttctatacctcatgaagttggatggtaattaccaactagtgtcatatcttacacaactcc

SEQ ID NO: 31762 - DNA, 1993 bp, Zea Mays
aacctgcaaccctccctccctccctcctcgagctctgctcagcacacaaggacacccaaaacgcgcaggtgagagaggcgagggaatccctccccctcccgttccaattcctttcctccgctcgcggctcgcctcctcgaccgacccccccaaagcggcgctctccttttcggccattgcgccacccgcccacaagcgattcggattctcccccccacatcgtcctttccaggttgcaggcttaaatggagaacgatgttgagaaaaataacatggtgaaagagttctatatcccaacctatattttcgtgccagagtctccagtggagcatgcatctcagatacctacttgtccggtgattgtttttgtcaacacaaaaagtggaggtcaactgggacgtgagttgattgtcacataccgtatttgatctgcttgatgaagctccagacaatgtcttgcacagactatacagcaacctggaaaggctcaagcacggtggtgacactcttgcttctgaagtctataggagactaaggctaatagttgctggaggtgatggaacggcaggttggttgcttggagttgtatctgatcttaagttaggacatccacctcctgtagctacagttccgctggggactggaaataacttgccatattcttttggatggggaaagaaaaatcctggaacagattatgattcggtcatatcatttcttcagttggtaagagaatcaagagagatgaacattgacagctggcacattgtcatgagaatggagagcccaaaagattctccttgtgatccaattgcacctcctgacttgcctcattctttgcatgcatttcgacgtatgccaaagacagatccacaagatatggagtattcttatacatatcgtgggggattttggaattacttcagtatgggaatggatgcccaagtgtcttatgcatttcattctcagaggaaactgcatccagagaagttcaagaatcagttgtccaatcagaaaacatacttgaagctggcatgcacacaaggatggttttgtgcctctttgtttcatccaatgtcacggaacattgcttgccttgcgaaagtgaagataatgaaaaaatctggaaaatgggaaaccatggaaattccacaaagtattcggtccattgtttgtctcaatttgcccagcttctctggtggactaaacccttggggaacaccaagtaagaggaagcaaagaaaacgagacttggtgatgcctccacttgtggatgatggccttctagaggttgtgggtttcaaagatgcttggcatggccttgtcttgctatctccaaaaggccatggaactcgccttgctcaggctcaccgtgtccgattcgagttcctcagaggcgcaactgatcatgcttacatgagaatggatggggaaccctggaagcagcctcttcccacggatgatggcaaagtcgtggtagagatctcccatgctgggcaggtgaagatgctcgcgaccaaagactgcatagccaaaggggtccatgaccatgagtcgtgcccagctatttcaacggttcatccagagtccatctacaacgacatgaacgatgacttcgaggaggaacggaggaactttggtgccgccttgtcgtttcgatacttgagtgatgtgaacaaacaataagaactcatgtttttattgagccttgggacaggttgcttgcatagggcgtagcaaagtagtttgatgcactaacttatgtaagattgtaagttgcccatgtaagataacttttgctggcaatacaacggattctgggttgactgtttgtatcatcagtattttaagaagtgtttcttcagccactcattccttacaatgggtttagcaagggcagtcggtcgtagaaatcatacagtcatgatacaattagttacttgtgaacttggatttgaaacaatattttgtaattaagcaaactctattatta

SEQ ID NO: 31763 - DNA, 1852 bp, Zea Mays
aacctgcaaccctccctccctccctcctcgagctctgctcagcacacaaggacacccaaaacgcgcaggttgcaggcttaaatggagaacgatgttgagaaaaataacatggtgaaagagttctatatcccaacctatattttcgtgccagagtctccagtggagcatgcatctcagatacctacttgtccggtgattgtttttgtcaacacaaaaagtggaggtcaactgggacgtgagttgattgtcacataccgtaagcttctcaaccatgcccaggtatttgatctgcttgatgaagctccagacaatgtcttgcacagactatacagcaacctggaaaggctcaagcacggtggtgacactcttgcttctgaagtctataggagactaaggctaatagttgctggaggtgatggaacggcaggttggttgcttggagttgtatctgatcttaagttaggacatccacctcctgtagctacagttccgctggggactggaaataacttgccatattcttttggatggggaaagaaaaatcctggaacagattatgattcggtcatatcatttcttcagttggtaagagaatcaagagagatgaacattgacagctggcacattgtcatgagaatggagagcccaaaagattctccttgtgatccaattgcacctcctgacttgcctcattctttgcatgcatttcgacgtatgccaaagacagatccacaagatatggagtattcttatacatatcgtgggggattttggaattacttcagtatgggaatggatgcccaagtgtcttatgcatttcattctcagaggaaactgcatccagagaagttcaagaatcagttgtccaatcagaaaacatacttgaagctggcatgcacacaaggatggttttgtgcctctttgtttcatccaatgtcacggaacattgcttgccttgcgaaagtgaagataatgaaaaaatctggaaaatgggaaaccatggaaattccacaaagtattcggtccattgtttgtctcaatttgcccagcttctctggtggactaaacccttggggaacaccaagtaagaggaagcaaagaaaacgagacttggtgatgcctccacttgtggatgatggccttctagaggttgtgggtttcaaagatgcttggcatggccttgtcttgctatctccaaaaggccatggaactcgccttgctcaggctcaccgtgtccgattcgagttcctcagaggcgcaactgatcatgcttacatgagaatggatggggaaccctggaagcagcctcttcccacggatgatggcaaagtcgtggtagagatctcccatgctgggcaggtgaagatgctcgcgaccaaagactgcatagccaaaggggtccatgaccatgagtcgtgcccagctatttcaacggttcatccagagtccatctacaacgacatgaacgatgacttcgaggaggaacggaggaactttggtgccgccttgtcgtttcgatacttgagtgatgtgaacaaacaataagaactcatgtttttattgagccttgggacaggttgcttgcatagggcgtagcaaagtagtttgatgcactaacttatgtaagattgtaagttgcccatgtaagataacttttgctggcaatacaacggattctgggttgactgtttgtatcatcagtattttaagaagtgtttcttcagccactcattccttacaatgggtttagcaagggcagtcggtcgtagaaatcatacagtcatgatacaattagttacttgtgaacttggatttgaaacaatattttgtaattaagcaaactctattatta

SEQ ID NO: 31764 - DNA, 1842 bp, Zea Mays
aacctgcaaccctccctccctccctcctcgagctctgctcagcacacaaggacacccaaaacgcgcaggttgcaggcttaaatggagaacgatgttgagaaaaataacatggtgaaagagttctatatcccaacctatattttcgtgccagagtctccagtggagcatgcatctcagatacctacttgtccggtgattgtttttgtcaacacaaaaagtggaggtcaactgggacgtgagttgattgtcacataccgtatttgatctgcttgatgaagctccagacaatgtcttgcacagactatacagcaacctggaaaggctcaagcacggtggtgacactcttgcttctgaagtctataggagactaaggctaatagttgctggaggtgatggaacggcaggttggttgcttggagttgtatctgatcttaagttaggacatccacctcctgtagctacagttccgctggggactggaaataacttgccatattcttttggatggggaaagaaaaatcctggaacagattatgattcggtcatatcatttcttcagttggtaagagaatcaagagagatgaacattgacagctggcacattgtcatgagaatggagagcccaaaagattctccttgtgatccaattgcacctcctgacttgcctcattctttgcatgcatttcgacgtatgccaaagacagatccacaagatatggagtattcttatacatatcgtgggggattttggaattacttcagtatgggaatggatgcccaagtgtcttatgcatttcattctcagaggaaactgcatccagagaagttcaagaatcagttgtccaatcaggtgaaataagctgaaaacatacttgaagctggcatgcacacaaggatggttttgtgcctctttgtttcatccaatgtcacggaacattgcttgccttgcgaaagtgaagataatgaaaaaatctggaaaatgggaaaccatggaaattccacaaagtattcggtccattgtttgtctcaatttgcccagcttctctggtggactaaacccttggggaacaccaagtaagaggaagcaaagaaaacgagacttggtgatgcctccacttgtggatgatggccttctagaggttgtgggtttcaaagatgcttggcatggccttgtcttgctatctccaaaaggccatggaactcgccttgctcaggctcaccgtgtccgattcgagttcctcagaggcgcaactgatcatgcttacatgagaatggatggggaaccctggaagcagcctcttcccacggatgatggcaaagtcgtggtagagatctcccatgctgggcaggtgaagatgctcgcgaccaaagactgcatagccaaaggggtccatgaccatgagtcgtgcccagctatttcaacggttcatccagagtccatctacaacgacatgaacgatgacttcgaggaggaacggaggaactttggtgccgccttgtcgtttcgatacttgagtgatgtgaacaaacaataagaactcatgtttttattgagccttgggacaggttgcttgcatagggcgtagcaaagtagtttgatgcactaacttatgtaagattgtaagttgcccatgtaagataacttttgctggcaatacaacggattctgggttgactgtttgtatcatcagtattttaagaagtgtttcttcagccactcattccttacaatgggtttagcaagggcagtcggtcgtagaaatcatacagtcatgatacaattagttacttgtgaacttggatttgaaacaatattttgtaattaagcaaactctattatta

SEQ ID NO: 31765 - DNA, 2023 bp, Zea Mays
aacctgcaaccctccctccctccctcctcgagctctgctcagcacacaaggacacccaaaacgcgcaggtgagagaggcgagggaatccctccccctcccgttccaattcctttcctccgctcgcggctcgcctcctcgaccgacccccccaaagcggcgctctccttttcggccattgcgccacccgcccacaagcgattcggattctcccccccacatcgtcctttccaggttgcaggcttaaatggagaacgatgttgagaaaaataacatggtgaaagagttctatatcccaacctatattttcgtgccagagtctccagtggagcatgcatctcagatacctacttgtccggtgattgtttttgtcaacacaaaaagtggaggtcaactgggacgtgagttgattgtcacataccgtaagcttctcaaccatgcccaggtatttgatctgcttgatgaagctccagacaatgtcttgcacagactatacagcaacctggaaaggctcaagcacggtggtgacactcttgcttctgaagtctataggagactaaggctaatagttgctggaggtgatggaacggcaggttggttgcttggagttgtatctgatcttaagttaggacatccacctcctgtagctacagttccgctggggactggaaataacttgccatattcttttggatggggaaagaaaaatcctggaacagattatgattcggtcatatcatttcttcagttggtaagagaatcaagagagatgaacattgacagaattcagctggcacattgtcatgagaatggagagcccaaaagattctccttgtgatccaattgcacctcctgacttgcctcattctttgcatgcatttcgacgtatgccaaagacagatccacaagatatggagtattcttatacatatcgtgggggattttggaattacttcagtatgggaatggatgcccaagtgtcttatgcatttcattctcagaggaaactgcatccagagaagttcaagaatcagttgtccaatcagaaaacatacttgaagctggcatgcacacaaggatggttttgtgcctctttgtttcatccaatgtcacggaacattgcttgccttgcgaaagtgaagataatgaaaaaatctggaaaatgggaaaccatggaaattccacaaagtattcggtccattgtttgtctcaatttgcccagcttctctggtggactaaacccttggggaacaccaagtaagaggaagcaaagaaaacgagacttggtgatgcctccacttgtggatgatggccttctagaggttgtgggtttcaaagatgcttggcatggccttgtcttgctatctccaaaaggccatggaactcgccttgctcaggctcaccgtgtccgattcgagttcctcagaggcgcaactgatcatgcttacatgagaatggatggggaaccctggaagcagcctcttcccacggatgatggcaaagtcgtggtagagatctcccatgctgggcaggtgaagatgctcgcgaccaaagactgcatagccaaaggggtccatgaccatgagtcgtgcccagctatttcaacggttcatccagagtccatctacaacgacatgaacgatgacttcgaggaggaacggaggaactttggtgccgccttgtcgtttcgatacttgagtgatgtgaacaaacaataagaactcatgtttttattgagccttgggacaggttgcttgcatagggcgtagcaaagtagtttgatgcactaacttatgtaagattgtaagttgcccatgtaagataacttttgctggcaatacaacggattctgggttgactgtttgtatcatcagtattttaagaagtgtttcttcagccactcattccttacaatgggtttagcaagggcagtcggtcgtagaaatcatacagtcatgatacaattagttacttgtgaacttggatttgaaacaatattttgtaattaagcaaactctattatta

SEQ ID NO: 31766 - DNA, 1760 bp, Zea Mays
gttctagctgtgtggcgtgcattttcactagctctagcgctccgagcgtcacgatctcgtcacggttgcaggcttaaatggagaacgatgttgagaaaaataacatggtgaaagagttctatatcccaacctatattttcgtgccagagtctccagtggagcatgcatctcagatacctacttgtccggtgattgtttttgtcaacacaaaaagtggaggtcaactgggacactatacagcaacctggaaaggctcaagcacggtggtgacactcttgcttctgaagtctataggagactaaggctaatagttgctggaggtgatggaacggcaggttggttgcttggagttgtatctgatcttaagttaggacatccacctcctgtagctacagttccgctggggactggaaataacttgccatattcttttggatggggaaagaaaaatcctggaacagattatgattcggtcatatcatttcttcagttggtaagagaatcaagagagatgaacattgacagctggcacattgtcatgagaatggagagcccaaaagattctccttgtgatccaattgcacctcctgacttgcctcattctttgcatgcatttcgacgtatgccaaagacagatccacaagatatggagtattcttatacatatcgtgggggattttggaattacttcagtatgggaatggatgcccaagtgtcttatgcatttcattctcagaggaaactgcatccagagaagttcaagaatcagttgtccaatcagaaaacatacttgaagctggcatgcacacaaggatggttttgtgcctctttgtttcatccaatgtcacggaacattgcttgccttgcgaaagtgaagataatgaaaaaatctggaaaatgggaaaccatggaaattccacaaagtattcggtccattgtttgtctcaatttgcccagcttctctggtggactaaacccttggggaacaccaagtaagaggaagcaaagaaaacgagacttggtgatgcctccacttgtggatgatggccttctagaggttgtgggtttcaaagatgcttggcatggccttgtcttgctatctccaaaaggccatggaactcgccttgctcaggctcaccgtgtccgattcgagttcctcagaggcgcaactgatcatgcttacatgagaatggatggggaaccctggaagcagcctcttcccacggatgatggcaaagtcgtggtagagatctcccatgctgggcaggtgaagatgctcgcgaccaaagactgcatagccaaaggggtccatgaccatgagtcgtgcccagctatttcaacggttcatccagagtccatctacaacgacatgaacgatgacttcgaggaggaacggaggaactttggtgccgccttgtcgtttcgatacttgagtgatgtgaacaaacaataagaactcatgtttttattgagccttgggacaggttgcttgcatagggcgtagcaaagtagtttgatgcactaacttatgtaagattgtaagttgcccatgtaagataacttttgctggcaatacaacggattctgggttgactgtttgtatcatcagtattttaagaagtgtttcttcagccactcattccttacaatgggtttagcaagggcagtcggtcgtagaaatcatacagtcatgatacaattagttacttgtgaacttggatttgaaacaatattttgtaattaagcaaactctattatta

SEQ ID NO: 31767 - DNA, 984 bp, Zea Mays
cactaacttgcctgtggatttgccttctgttgtgaaaagtaatatttgtcacaagttacaattcagaaatctggaacattgcttgccttgcgaaagtgaagataatgaaaaaatctggaaaatgggaaaccatggaaattccacaaagtattcggtccattgtttgtctcaatttgcccagcttctctggtggactaaacccttggggaacaccaagtaagaggaagcaaagaaaacgagacttggtgatgcctccacttgtggatgatggccttctagaggttgtgggtttcaaagatgcttggcatggccttgtcttgctatctccaaaaggccatggaactcgccttgctcaggctcaccgtgtccgattcgagttcctcagaggcgcaactgatcatgcttacatgagaatggatggggaaccctggaagcagcctcttcccacggatgatggcaaagtcgtggtagagatctcccatgctgggcaggtgaagatgctcgcgaccaaagactgcatagccaaaggggtccatgaccatgagtcgtgcccagctatttcaacggttcatccagagtccatctacaacgacatgaacgatgacttcgaggaggaacggaggaactttggtgccgccttgtcgtttcgatacttgagtgatgtgaacaaacaataagaactcatgtttttattgagccttgggacaggttgcttgcatagggcgtagcaaagtagtttgatgcactaacttatgtaagattgtaagttgcccatgtaagataacttttgctggcaatacaacggattctgggttgactgtttgtatcatcagtattttaagaagtgtttcttcagccactcattccttacaatgggtttagcaagggcagtcggtcgtagaaatcatacagtcatgatacaattagttacttgtgaacttggatttgaaacaatattttgtaattaagcaaactctattatta

SEQ ID NO: 31768 - DNA, 517 bp, Zea Mays
ccatttgatcatttggtgagtactgattttgctcacagtgaatcagtcaatctctatttgctcaaccatattggtgagtactgaactactgattgtgcaaccatattgctcacagtgaatttcaatttggtttgtgaactcaagtactcaacttatgtatgaacttattttatatttgaacttctatgtgaagtctgaaaagacgtttcaacgttcgtttaaacgtttaaatgttaaaaagttggttcataacgttttaaggttttaccgttttaataaccatgatgagcaccaatcttgttttcttgtgcttcactccagatttgtctcttggtctcattggtcgactcttctaaatgagctacacaaaacaagagtaagctaaaacaggaaactttacatcccccttggcaaaagttgttggccctcgatctccctggacagaggataccgatgattgaagaaaatgttgacatctggcgatactcccttgatgaccaagccatgcaacaactcc

SEQ ID NO: 31769 - DNA, 1480 bp, Zea Mays
gtgaatcagtcaatctctatttgctcaaccatattggtgagtactgaactactgattgtgcaaccatattgctcacagtgaatttcaatttggtttgtgaactcaagtactcaacttatgtatgaacttattttatatttgaacttctatgtgaagtctgaaaagacgtttcaacgttcgtttaaacgtttaaatgttaaaaagttggttcataacgttttaaggttttaccgttttaataaccatgatgagcaccaatcttgttttcttgtgcttcactccagatttgtctcttggtctcattggtcgactcttctaaatgaggttcctgaacaatattattgttgttattaagatttctacaccctaagcctattcacatacaaaatgttttggcaatatatacagctacacaaaacaagagtaagctaaaacaggaaactttacatcccccttggcaaaagttgttggccctcgatctccctggacaggtaagcaacccgctcaccaacactcactctcggctagaggtagaagacagggtgcagacagagagctcacacacgcacacagactgaaactctaaatgtgtggcacaactgaactgccttctctattgcgtagtctctagtatatatacaagtctagtaccaactgtagaatgaaaccctaaccctatactagggtgggcctgtatattaatagtagactgagttgggcctggcccattacagacagaggggtgaaatggtaaataccccataaaccctaatacatttctaacacccccccgcagtcgcaactctatcctgtacagatgttgagactggagcgaaagtctaaaaatacacttgacggtaatcccttggtgaagatgtcggcgaactgcagcgtggtggggacgctgagaacccgaacgtcaccggcggcgacacgctcgcggacgaagtgcaggtcaatctccacgtgcttcgtgcgctgatgctgcacgggattggtggagaggtagactgcgctgacgttgtcgcagtagacgagggtggcgcgctggaggggactgtggagctcgtggaggagctgtcgcagccaggaggcctctgccacgccgttggccacggcgcggtactcggcctcagcactggagcgagagacgacgggctgccgcttggcggcccaggagacgaggttggtgcccaggaacacggcgtaaccggaagtggatcggcgcgtgtctggacaaccagcccagtcggcgtcggtgtagaccacgaggtccgacgtcggggatggtcgaagtaggaggccgtagtcgagggagccgcggaggtagcgcaggatccgcttgagagcggtgagatgaggctcccgtggggtgtgcatatgcaggcacacctactggacggcgtaggcgatgtcaggcctggagaaggtgaggtactggagcgcgccggtcaggctccggtaggatgtcgcatcggcg

SEQ ID NO: 31770 - DNA, 2267 bp, Zea Mays
ctaccgcgagtccgcgaccgtgtgcctctgacgcgggacgctcccgcaccgcagcccggagcagcctgcggcttgcggccttgcgcctaccttcctgcaggctgcagtagattgacgaatagagcgcgtgcgcaggagtataaaagctagctccggtccccgggggccgcggcctcgggctgccgctggttccgaacgcgtggtgcgacccgggattccctcgcgcttctctgtgtccccttcctccggcctgaggggaggaccccgcagatcccatcgaaattcacggccggcctaacccaagccggtcctccccgactcccggcgacgaccaatttctccttgttctcgcccctccaacccttcatgatgcttagataatatacagtgctgggttttagcactgttttgagtttttaaattgagctaaggcttcagtgttagtcttgaaagatgaacggttcaagtggttcccaagggcatcatgtcagtggagagaagaagcaagtgtgtcatgttagccggcccattcttaacaatggaccaaagcaccgtccattgacccccatgaggcgatgccgtggtgtagcatgtgtagtgattatactgtcaacagcattcctgttggtagtttacttggctcctattactacttttgctgtgcggctgttcagtgtgcattacagccgaaaggcgacttcctttctatttggaatgtggttatctttatggccgttcttgtttgagaagataaacaaaaccaaggttgtcttctccggtgaaaatgtgcctccaaaacgacgtgtattgttatttgctaaccacaggaccgaggttgactggatgtacttgtgggatcttgcactgaggaaaggccatttaggatatatcaagtacatacttaagagcagcttgatgaagttgcctatttttagctgggcatttcacatttttgagtttatcccggtagaacggaaatgggagattgatgaagcaattattcagaacaagctatcaaaatttaagaacccgagagatcctatctggttggcggtttttcctgaaggcacggattatacgtaaggcataattgtctttgaaattcattgtttgtatattcgtataatccacattcatgactgtgtactcaatcacataagtttgatttctcaaatttttattgttactgattaccgacctaaacattaaatgtggtactttatgaaattgatcctatgtattactttagtaattgtttgtcgctctatttaatgtgcatgattcttcctcttttcctatattttgttgctgattgctgattcaatcttagtgagaagaaatgcatcatgagtcaagagtatgcttcagaacatggcttgcctatgctagaacatgtcctccttccaaagacaaagggcttcatttgttgtttgcaagagctgaggagttccttagatgcagtttatgatgtcacaatagcatacaagcatcgactcccagattttctggacaatgtgtatggcgttgatccttctgaagtccacatccacgtcagaatggttcagctccatcacatccccacaacagaagacaagataacagaatggatggtagagaggtttaggcagaaggaccagctcctggcagatttcttcatgaaggggcactttcctgatgaaggaactgaaggagatctgtcgacgccgaagtgcctggcaaacttcttaacagtagtatgcttgacggccatctgtttgtacctaactcttttctcatttgtgtggttcaaggtctatgttgtagcaagctgcgcttacctctcatttgttacctattactccatactaccaccccaactgataggttcaccagagggtgatgtcaaggccaaaaaggttgtgtagatgttgatgtaacttgccatgaaaactgtacatccgcaaacgatttttactgctggagtttctgccttgtgacatttaaggttccctttctgcagtaggaggtatgaatgtatgatagtgcgtatgtaggaattttctgtgattcatcagtgtgtgagggccctatctgaaggcagtaaactgattttagatatatgttcttaacatttttataaacaaaactagaccacatttgttacaaatattgaagatttatttatttattttatttgatctttgttctgatgcaaacaatcaaacattagctatatccaacttgaatatattaatacaaacaaccaaacaaaaacaaccaaacaaacg

SEQ ID NO: 31771 - DNA, 1225 bp, Zea Mays
ggagcagcctgcggcttgcggccttgcgcctaccttcctgcaggctgcagtagattgacgaatagagcgcgtgcgcaggagtataaaagctagctccggtccccgggggccgcggcctcgggctgccgctggttccgaacgcgtggtgcgacccgggattccctcgcgcttctctgtgtccccttcctccggcctgaggggaggaccccgcagatcccatcgaaattcacggccggcctaacccaagccggtcctccccgactcccggcgacgaccaatttctccttgtgagaagaaatgcatcatgagtcaagagtatgcttcagaacatggcttgcctatgctagaacatgtcctccttccaaagacaaagggcttcatttgttgtttgcaagagctgaggagttccttagatgcagtttatgatgtcacaatagcatacaagcatcgactcccagattttctggacaatgtgtatggcgttgatccttctgaagtccacatccacgtcagaatggttcagctccatcacatccccacaacagaagacaagataacagaatggatggtagagaggtttaggcagaaggaccagctcctggcagatttcttcatgaaggggcactttcctgatgaaggaactgaaggagatctgtcgacgccgaagtgcctggcaaacttcttaacagtagtatgcttgacggccatctgtttgtacctaactcttttctcatttgtgtggttcaaggtctatgttgtagcaagctgcgcttacctctcatttgttacctattactccatactaccaccccaactgataggttcaccagagggtgatgtcaaggccaaaaaggttgtgtagatgttgatgtaacttgccatgaaaactgtacatccgcaaacgatttttactgctggagtttctgccttgtgacatttaaggttccctttctgcagtaggaggtatgaatgtatgatagtgcgtatgtaggaattttctgtgattcatcagtgtgtgagggccctatctgaaggcagtaaactgattttagatatatgttcttaacatttttataaacaaaactagaccacatttgttacaaatattgaagatttatttatttattttatttgatctttgttctgatgcaaacaatcaaacattagctatatccaacttgaatatattaatacaaacaaccaaacaaaaacaaccaaacaaacg

SEQ ID NO: 31772 - DNA, 1439 bp, Zea Mays
tttcttttgtaccgtgaatacccttgcaccagtgtgcattgccgtgcattaccaaattccgtccgataaactaataaacaggtggccactgtatcaacaggtactcacatgtcagccaataagtactgtacctgtatggctggttgccactgtttcaagtcagccagcagcaacctattcctgctcgaccgtacagtcctcgtagactagctggccactttctccgcttcccgctgaacctactcgaccgccagatccccacgccacgctcccatcaccaattcaccaccatcgtccatagcctcctcccgcttgaagtaccccgtgctggagtccaagaacccgccctcgaggcccaggtggagacatgggatgttgcttcagcaagaagcgcaagacccgtccggtggccggagcctctgccttcccgcaccggtgcgagcccgaggaccgcgacccgccgtcgccagaggagacggtcaaggaggtgctctcggagacaccgaacactaagccgagggccgagtcgaagctcgtcggcaatggcgtcgtccccgccgcggacgagcgggaattggagaaggccaagaagcaggacagcgtcgacgccgcggtgagcgacctcggcagctgcgtgtcgctctcgctcgccaccgacgagcggtccgaggcggtgtcggagtcctcggtcgccaccagctcggtgaccggtccggagcggtcgcccgggaggaagccggccaggaggcgcccggtctccgtcgatctggggccagcgcggcgcgcccacgccgccgccgcggcctcctacggcgtccgctcccgcagcgcgcgagcgtcggcgtccccgccgccgcggcacgtgccacgggaccgctccgtccggcgttcgccgtcgccggcggccaatcggccgtcctctgagcgccgcagagccgccagcccagctgcgcccgtgcagcggaagccgcctgtcccggcaagtccggccggccgcgtctcgccgcggcgggcacaggaagcagcaactcctccgcgttccgccaccccgccgtcgccgccggaagacgacgccgtcaccgcggcaagtgagcccagcaccccggacggcagcgcgggtggcgatgttgaaggtggccacggcggcggcggcgacgacgggaaagagtcgttggagaacccgctagtgtcattggaatgtttcatcttcctgtagcgctgcgctggtgcagtgatgtgatctctcgcgccattccccttcgaaagccttgggctagctaatcgggtttagtctgtttagatgctagcgcagcagttagttgtagccttgtagggggcatggtgattcagcgaccttccgttaactttgacttttcagagccgtgtctgacgatgtgctttggcttttggcgtcctatattgcagagatgtttctgtaa

SEQ ID NO: 31773 - DNA, 586 bp, Zea Mays
gtccgttgcccaagagagggatctacatcctgtacgacgacgtcaagtcgtgccaatgcgaggacgtgcacgtgctgtgggcgatcctcgttgagtcccacggcctgccgacgccgacgccgacgccgcctctgctgagcctgaagcgatgaggggcggcgggtgctccgccgctgcaccccctgaataagcgaacggtccatggatatacctcgacatggctatgtcgctgagaggtgaattcaagtagtagcgattctgaattctgatgtacatagggatcaaccgatgtgtgttgtgtcgccggtgtgctgctctgctgccggcctggattggtgcctctgttggaggctgccgagacgagagtggtcgtgcagctgcggaggaatgcagctgccgcgcgtgtcgctttgttgacgagtgtggtgatgagcttcttggagttggagcgcacccctcgttcgtttgacttctacagtttacgtacgtgtaagactgcatctggatgcggtccttcagcccatctctattggagtttggaagggaatagcaggaacagaaattgaatcctcaccgattttctgaa

SEQ ID NO: 31774 - DNA, 582 bp, Zea Mays
ccagccggccagccctcgcagcagtcttccctgaccgtccacccatcacctcactggctcactcatcactccctcagcacctcggccctctgcagtctgcgtctgccccctcttccaggtcccagcgctgtctagatccagatgggagctccaccgctgcccttctccctgccccacgccgctctcctctgatcccgcactccccgaagtccccactgccggcgcgatccccgcattccctaccgcctgctagccccaccacccgctgaagccgtccatacaggccattgcgctgcccggaatcccggcgtgaacagccgttgctgcagtgcggcctggagctccgcctgttccccgcttccgcccgccaccgcctttcataaaaacagcccctcctcctgcgcctggagtgcggagccgtcaccgctgtctctctccacgggacacgccgccgccgggagggaagaacccgactcccgggcttgaagttgccgcacccccgccgtccgacgtacacaggtatgtgaaattctgaagtcgacatatataagtttgaaagcaaccgtgagcataatatctttt

SEQ ID NO: 31775 - DNA, 3016 bp, Zea Mays
ccagccggccagccctcgcagcagtcttccctgaccgtccacccatcacctcactggctcactcatcactccctcagcacctcggccctctgcagtctgcgtctgccccctcttccaggtcccagcgctgtctagatccagatgggagctccaccgctgcccttctccctgccccacgccgctctcctctgatcccgcactccccgaagtccccactgccggcgcgatccccgcattccctaccgcctgctagccccaccacccgctgaagccgtccatacaggccattgcgctgcccggaatcccggcgtgaacagccgttgctgcagtgcggcctggagctccgcctgttccccgcttccgcccgccaccgcctttcataaaaacagcccctcctcctgcgcctggagtgcggagccgtcaccgctgtctctctccacgggacacgccgccgccgggagggaagaacccgactcccgggcttgaagttgccgcacccccgccgtccgacgtacacaggttggggttgtgtctgaggagaaactccttgacctattggagatagccatgtcatcaaacactgctgaaacagtcaaaaggtcgagagagctgatggattctggtgttgatccaatggcattaatgtcacaattagctgggctcataatggacatcattgctgggacctatagattggcagaccctacatgcggtggagatggaattggtggtcgaaatataactgatgctgaattggaaagattacaacaagcgttgaggattctttctgatgctgaaaaacagataagactttcaagcgagcgttcgacatggttcactgctgctttactccagcttggttccggtcacaattcagaaataactcaatcaagaagcagcagtaagcaaagcgctaaggcaaccagcgaaaccatgatggaagcaatgagagaatcttctgcaagcaggagtacagctcatcatttatccacttttcctgattcaaagaaaatagtggatctgaaaacaaccagtgggcactccagtcctcatgcttcactgtcctccaggatgagacacaatgaaaacatgatttatgccgagcatatgtctgttgatagagcattattggattctgctcaaacaagtatttcttctgagcaaaagggtatgcatagtggaatctcagataaccttacccgaatttggatgaagtgcatagagaattgccactccaagacattgcggcaacttctctatgatcatgggaaattaacatctgtcaaagaatgtgaaggtaccattgttgcttttatagcatttgaggacaatgatataaagtttcgagcccaaagatttattagcagcatcagaaattcaatggaaactgtactgaaatgcaatgtggaagtcaggatttgtttgatgcaagaatttcttgctgggggactaaagcatgagacatacccagatgagacagctgaatctgatgtcttgagttgttcaacgaacagtgaacgtcgaaagggtgttctgaatctatcaggtgctggtggagtgcagccaaacaatgttcccatgatcatctctgaggaaacttcaggaatgcatagaacaagagggcaggatgtttctattgaacagttgaaggtatcagcttttgatgaacaaaggttagagagtgcatggctccaggctgctgaaaaacccatgcctggtatgttaaatcaaggtagacctgagagaaatcaaattcttccacaaaatggtggtcagcatcatggtaggtcctcaatggccaccgttgttccgtcaaggcatgttgacaaggatctatctaatgaactgaaagccttaaagatcagtgacagtcatggaccccataatggtcaagatgtacagatggagagtggttatgccatttcaccaagccttttgcatagaaataaccatttggcaaattgtgacaatgagagcgttgtttctgagtccggagcacccggttgccatgggctgttcccatgctggaaaactgaaaaaacgaaaaggagaaagggaaaagggcagacacggttgaggtcatcttaagttggcaattgacgacgataaaaggagcattgtggccctggattgtagaggaacatttgaagagatgcacgtgcctcacgaaactgccttacttcatttcttctagaggatttatgaagaccaattcgttattccatgcatttaatgctgccgctgagggttcagcattctctacgcgtggactcagcagagggtgataaaaagttgcagagatgttggacatgcggattttaacaagccattctgatccatctatgcttcttgtacagacatttggatgctgaggcgtatacgtgaagcggtcagcaaaattaggaaacattgaacaaaggaagaccttgcgtcgataagctgtggttttatcaagtttgtacaaaaactgcaatcaactgtggtgttgacgttgctgtaggccctatttgtttccttgataaggtgataatggatcacaatccaaatatttattgacaataagttaaagactttaaataagtttagtttaaaaataaatggaaatagaatctgattctagatccttaaattttatagtataaaatttataactcattaccacctttatttttaggattatataatctagcttgtgaattatttaagtacctattgacctgcttatggattatcatagtttagatatctagaatacataattcacctaataatctgtgttgtttatttacctttcaatttatttaaactagattatataatctagaggttaaacagggccttaataagccgtgtttatctcaccataaaacacataatatatatgttggggaccttcggcgtccgaaggtcctcaaaaacatgatttaatagtgtttctggagtataatgtgcaaacaggtatcttcggactcgaatcggtatcacagagggagaagctcaaagcatacgaaggttg

SEQ ID NO: 31776 - DNA, 5171 bp, Zea Mays
ccagccggccagccctcgcagcagtcttccctgaccgtccacccatcacctcactggctcactcatcactccctcagcacctcggccctctgcagtctgcgtctgccccctcttccaggtcccagcgctgtctagatccagatgggagctccaccgctgcccttctccctgccccacgccgctctcctctgatcccgcactccccgaagtccccactgccggcgcgatccccgcattccctaccgcctgctagccccaccacccgctgaagccgtccatacaggccattgcgctgcccggaatcccggcgtgaacagccgttgctgcagtgcggcctggagctccgcctgttccccgcttccgcccgccaccgcctttcataaaaacagcccctcctcctgcgcctggagtgcggagccgtcaccgctgtctctctccacgggacacgccgccgccgggagggaagaacccgactcccgggcttgaagttgccgcacccccgccgtccgacgtacacaggtttaatcaaggtaatctttgacattctgcagtgggatgtactacattggtctgcttggacagcagttctctttttaatttgtaaatatctctctcgttcttcagttatggccactatagttgaagggtgtgttggtcccagtgagcttcacctgaagaaggaacttattgccttgagaaaggcacgtttcttgcgtgatcccgaaacatgctcatcctggaggtccccgttaagctctaaatcattcttgtcaacttctggtgttataaatcataatgaggtaggcagtagtttgtcagaaaagcgcacagagccagctgcagcaccagtcaaaagtgaaaagaaaagaaaaaacgtttatctctacaactggagacatcattctaacaaatctagtgaaagtggagtgaagttagatgtggacgatagacaagcctcagtagactgtagtctggaaagcccgtgtatttctaacggtatggactctaggagtgacacatgtcttgaagttcctgtcagcatatacagtgttcaaggttctaattcatgcactcctgttaaaagaactgttagaagggtaaggaggagttcattctcaaagaaaggagctatgagaaattctactgtttcaaagttgctagatctccatgtgaattctgctgagcagtctgaggatactgagaactacaactcagagactcatgagcaccttcagaaagtagggtatttttctcactctacatcaccactgtttgctgcatcagggtgttttagctcaacaaatccttctaagctgttgagagtgccaagaagagaaggatcttccttctcttgtactccggtctccactagctcctattacaggtacaaagggaggaatcctagtactgtaggttcatgggatggaacaactgctgcttcacttgatgacgatgggctgaaccaaccagaactgttgacaaatcagaggtgtggtattccttgttattggtcaaagaggagtaaacacaagggatctgaaaggagttgttctccttcactttctgatacacttagaagaaaaggcaccagtctattgtgtgggagtcaaactatgcatgggagaaagaaatcatcaggctccaataaatatggatatcttaaaaaatcttcccaaggtgtaccactgttgggtgatagtagtcattttgcttattcgtcatttgattcagctagtgatgaagtttcaaccatctttggagaattagatctggaagctttgagccgtttggatggcagaaggtggtcaagctgtaaaagccaggatgggattgcactgtctgtgagtggagctgatcatgtagtttcagatcacagaagcttgagccaaaaatatcgaccaaggtcatttctagaaattgttggtcaaaactttgttgtacagtcacttagtaatgctatcgcaagggaaagaatagctccagcatatctgttccatgggccccgcgggacagggaaaacatcttctgcaagaatactttcagcagctttaagttgtactgctactggagagaccaagccctgtggagtttgtactgagtgcagtgactttttcactggaaatggaactaatctaattgaggttgatgctaccaacagaaaaggtataaacagagtacgccatttgattgaaaatataccagcatctgcaacttcttcacggtacaaagtatttgtcgtggatgaatgccatatggtatcttctaaagtctggtcggcatttatgaaatttcttgatgaaccattacctcgcgttgtcttcatatttataacaatagaccctgaaaatcttccccgttctgtcgtatcacgttgtcaaaagtacatgttctccaagatcaaagacattgacatagtatgccggctgaggaagattgctatgaaggaaaaccttgacgttgaattggctgctctagatttaatagcactaaattcagatggatcattgagagatgcggagacaatgttagatcagttgtgtttactagggaagaagataacaccatcacttgtaaatgatctggttggggttgtgtctgaggagaaactccttgacctattggagatagccatgtcatcaaacactgctgaaacagtcaaaaggtcgagagagctgatggattctggtgttgatccaatggcattaatgtcacaattagctgggctcataatggacatcattgctgggacctatagattggcagaccctacatgcggtggagatggaattggtggtcgaaatataactgatgctgaattggaaagattacaacaagcgttgaggattctttctgatgctgaaaaacagataagactttcaagcgagcgttcgacatggttcactgctgctttactccagcttggttccggtcacaattcagaaataactcaatcaagaagcagcagtaagcaaagcgctaaggcaaccagcgaaaccatgatggaagcaatgagagaatcttctgcaagcaggagtacagctcatcatttatccacttttcctgattcaaagaaaatagtggatctgaaaacaaccagtgggcactccagtcctcatgcttcactgtcctccaggatgagacacaatgaaaacatgatttatgccgagcatatgtctgttgatagagcattattggattctgctcaaacaagtatttcttctgagcaaaagggtatgcatagtggaatctcagataaccttacccgaatttggatgaagtgcatagagaattgccactccaagacattgcggcaacttctctatgatcatgggaaattaacatctgtcaaagaatgtgaaggtaccattgttgcttttatagcatttgaggacaatgatataaagtttcgagcccaaagatttattagcagcatcagaaattcaatggaaactgtactgaaatgcaatgtggaagtcaggatttgtttgatgcaagaatttcttgctgggggactaaagcatgagacatacccagatgagacagctgaatctgatgtcttgagttgttcaacgaacagtgaacgtcgaaagggtgttctgaatctatcaggtgctggtggagtgcagccaaacaatgttcccatgatcatctctgaggaaacttcaggaatgcatagaacaagagggcaggatgtttctattgaacagttgaaggtatcagcttttgatgaacaaaggttagagagtgcatggctccaggctgctgaaaaacccatgcctggtatgttaaatcaaggtagacctgagagaaatcaaattcttccacaaaatggtggtcagcatcatggtaggtcctcaatggccaccgttgttccgtcaaggcatgttgacaaggatctatctaatgaactgaaagccttaaagatcagtgacagtcatggaccccataatggtcaagatgtacagatggagagtggttatgccatttcaccaagccttttgcatagaaataaccatttggcaaattgtgacaatgagagcgttgtttctgagtccggagcacccggttgccatgggctgttcccatgctggaaaactgaaaaaacgaaaaggagaaagggaaaagggcagacacggttgaggtcatcttaagttggcaattgacgacgataaaaggagcattgtggccctggattgtagaggaacatttgaagagatgcacgtgcctcacgaaactgccttacttcatttcttctagaggatttatgaagaccaattcgttattccatgcatttaatgctgccgctgagggttcagcattctctacgcgtggactcagcagagggtgataaaaagttgcagagatgttggacatgcggattttaacaagccattctgatccatctatgcttcttgtacagacatttggatgctgaggcgtatacgtgaagcgaacaaaggaagaccttgcgtcgataagctgtggttttatcaagtttgtacaaaaactggttagctcctgcatttgtgtagacttctttgtcatttcgtgtcggttgtttaaaaccctctattctactactatgctaacactggatattctctatctaatctatactccaacagcaatcaactgtggtgttgacgttgctgtaggccctatttgtttccttgataaggtgataatggatcacaatccaaatatttattgacaataagttaaagactttaaataagtttagtttaaaaataaatggaaatagaatctgattctagatccttaaattttatagtataaaatttataactcattaccacctttatttttaggattatataatctagcttgtgaattatttaagtacctattgacctgcttatggattatcatagtttagatatctagaatacataattcacctaataatctgtgttgtttatttacctttcaatttatttaaactagattatataatctagaggttaaacagggccttaataagccgtgtttatctcaccataaaacacataatatatatgttggggaccttcggcgtccgaaggtcctcaaaaacatgatttaatagtgtttctggagtataatgtgcaaacaggtatcttcggactcgaatcggtatcacagagggagaagctcaaagcatacgaaggttg

SEQ ID NO: 31777 - DNA, 5082 bp, Zea Mays
ccagccggccagccctcgcagcagtcttccctgaccgtccacccatcacctcactggctcactcatcactccctcagcacctcggccctctgcagtctgcgtctgccccctcttccaggtcccagcgctgtctagatccagatgggagctccaccgctgcccttctccctgccccacgccgctctcctctgatcccgcactccccgaagtccccactgccggcgcgatccccgcattccctaccgcctgctagccccaccacccgctgaagccgtccatacaggccattgcgctgcccggaatcccggcgtgaacagccgttgctgcagtgcggcctggagctccgcctgttccccgcttccgcccgccaccgcctttcataaaaacagcccctcctcctgcgcctggagtgcggagccgtcaccgctgtctctctccacgggacacgccgccgccgggagggaagaacccgactcccgggcttgaagttgccgcacccccgccgtccgacgtacacagtgggatgtactacattggtctgcttggacagcagttctctttttaatttgtaaatatctctctcgttcttcagttatggccactatagttgaagggtgtgttggtcccagtgagcttcacctgaagaaggaacttattgccttgagaaaggcacgtttcttgcgtgatcccgaaacatgctcatcctggaggtccccgttaagctctaaatcattcttgtcaacttctggtgttataaatcataatgaggtaggcagtagtttgtcagaaaagcgcacagagccagctgcagcaccagtcaaaagtgaaaagaaaagaaaaaacgtttatctctacaactggagacatcattctaacaaatctagtgaaagtggagtgaagttagatgtggacgatagacaagcctcagtagactgtagtctggaaagcccgtgtatttctaacggtatggactctaggagtgacacatgtcttgaagttcctgtcagcatatacagtgttcaaggttctaattcatgcactcctgttaaaagaactgttagaagggtaaggaggagttcattctcaaagaaaggagctatgagaaattctactgtttcaaagttgctagatctccatgtgaattctgctgagcagtctgaggatactgagaactacaactcagagactcatgagcaccttcagaaagtagggtatttttctcactctacatcaccactgtttgctgcatcagggtgttttagctcaacaaatccttctaagctgttgagagtgccaagaagagaaggatcttccttctcttgtactccggtctccactagctcctattacaggtacaaagggaggaatcctagtactgtaggttcatgggatggaacaactgctgcttcacttgatgacgatgggctgaaccaaccagaactgttgacaaatcagaggtgtggtattccttgttattggtcaaagaggagtaaacacaagggatctgaaaggagttgttctccttcactttctgatacacttagaagaaaaggcaccagtctattgtgtgggagtcaaactatgcatgggagaaagaaatcatcaggctccaataaatatggatatcttaaaaaatcttcccaaggtgtaccactgttgggtgatagtagtcattttgcttattcgtcatttgattcagctagtgatgaagtttcaaccatctttggagaattagatctggaagctttgagccgtttggatggcagaaggtggtcaagctgtaaaagccaggatgggattgcactgtctgtgagtggagctgatcatgtagtttcagatcacagaagcttgagccaaaaatatcgaccaaggtcatttctagaaattgttggtcaaaactttgttgtacagtcacttagtaatgctatcgcaagggaaagaatagctccagcatatctgttccatgggccccgcgggacagggaaaacatcttctgcaagaatactttcagcagctttaagttgtactgctactggagagaccaagccctgtggagtttgtactgagtgcagtgactttttcactggaaatggaactaatctaattgaggttgatgctaccaacagaaaaggtataaacagagtacgccatttgattgaaaatataccagcatctgcaacttcttcacggtacaaagtatttgtcgtggatgaatgccatatggtatcttctaaagtctggtcggcatttatgaaatttcttgatgaaccattacctcgcgttgtcttcatatttataacaatagaccctgaaaatcttccccgttctgtcgtatcacgttgtcaaaagtacatgttctccaagatcaaagacattgacatagtatgccggctgaggaagattgctatgaaggaaaaccttgacgttgaattggctgctctagatttaatagcactaaattcagatggatcattgagagatgcggagacaatgttagatcagttgtgtttactagggaagaagataacaccatcacttgtaaatgatctggttggggttgtgtctgaggagaaactccttgacctattggagatagccatgtcatcaaacactgctgaaacagtcaaaaggtcgagagagctgatggattctggtgttgatccaatggcattaatgtcacaattagctgggctcataatggacatcattgctgggacctatagattggcagaccctacatgcggtggagatggaattggtggtcgaaatataactgatgctgaattggaaagattacaacaagcgttgaggattctttctgatgctgaaaaacagataagactttcaagcgagcgttcgacatggttcactgctgctttactccagcttggttccggtcacaattcagaaataactcaatcaagaagcagcagtaagcaaagcgctaaggcaaccagcgaaaccatgatggaagcaatgagagaatcttctgcaagcaggagtacagctcatcatttatccacttttcctgattcaaagaaaatagtggatctgaaaacaaccagtgggcactccagtcctcatgcttcactgtcctccaggatgagacacaatgaaaacatgatttatgccgagcatatgtctgttgatagagcattattggattctgctcaaacaagtatttcttctgagcaaaagggtatgcatagtggaatctcagataaccttacccgaatttggatgaagtgcatagagaattgccactccaagacattgcggcaacttctctatgatcatgggaaattaacatctgtcaaagaatgtgaaggtaccattgttgcttttatagcatttgaggacaatgatataaagtttcgagcccaaagatttattagcagcatcagaaattcaatggaaactgtactgaaatgcaatgtggaagtcaggatttgtttgatgcaagaatttcttgctgggggactaaagcatgagacatacccagatgagacagctgaatctgatgtcttgagttgttcaacgaacagtgaacgtcgaaagggtgttctgaatctatcaggtgctggtggagtgcagccaaacaatgttcccatgatcatctctgaggaaacttcaggaatgcatagaacaagagggcaggatgtttctattgaacagttgaaggtatcagcttttgatgaacaaaggttagagagtgcatggctccaggctgctgaaaaacccatgcctggtatgttaaatcaaggtagacctgagagaaatcaaattcttccacaaaatggtggtcagcatcatggtaggtcctcaatggccaccgttgttccgtcaaggcatgttgacaaggatctatctaatgaactgaaagccttaaagatcagtgacagtcatggaccccataatggtcaagatgtacagatggagagtggttatgccatttcaccaagccttttgcatagaaataaccatttggcaaattgtgacaatgagagcgttgtttctgagtccggagcacccggttgccatgggctgttcccatgctggaaaactgaaaaaacgaaaaggagaaagggaaaagggcagacacggttgaggtcatcttaagttggcaattgacgacgataaaaggagcattgtggccctggattgtagaggaacatttgaagagatgcacgtgcctcacgaaactgccttacttcatttcttctagaggatttatgaagaccaattcgttattccatgcatttaatgctgccgctgagggttcagcattctctacgcgtggactcagcagaggacatttggatgctgaggcgtatacgtgaagcggtcagcaaaattaggaaacattggttagcgagttaatgaggcgcaattatttttcagcatttttagtactgtgtttgacagcatttgaatttactttgcatttgttattgtaccaattcctttttttttgttagaacaaaggaagaccttgcgtcgataagctgtggttttatcaagtttgtacaaaaactgcaatcaactgtggtgttgacgttgctgtaggccctatttgtttccttgataaggtgataatggatcacaatccaaatatttattgacaataagttaaagactttaaataagtttagtttaaaaataaatggaaatagaatctgattctagatccttaaattttatagtataaaatttataactcattaccacctttatttttaggattatataatctagcttgtgaattatttaagtacctattgacctgcttatggattatcatagtttagatatctagaatacataattcacctaataatctgtgttgtttatttacctttcaatttatttaaactagattatataatctagaggttaaacagggccttaataagccgtgtttatctcaccataaaacacataatatatatgttggggaccttcggcgtccgaaggtcctcaaaaacatgatttaatagtgtttctggagtataatgtgcaaacaggtatcttcggactcgaatcggtatcacagagggagaagctcaaagcatacgaaggttg

SEQ ID NO: 31778 - DNA, 1420 bp, Zea Mays
gaagccaaagatttttttttgaaaggtcaaatctttgtttcccctcttccgcctccgctcccatccgcatcgccgcctccgtccctgtacccgtcacgtccgccgcgcgagagccactcgaagccgccgcggtcatccgcccacgcaaagcctccacctcctccccttcctagagctcgtcgtgggaggctacctcaagctcgccgtgctgtgcgttgcgcggcagcggctgctgtcgctgtcggtgtcgctgtgctacgctcaccccgccgattcctccgccacccgcgcacgccgaacaatttttggtggcctcggaccttaagctttttccgctagggtcggctccaaggtcgaccgtgtatgccctagccgaacgggaacagacatgaaagaggcgatggctgtggctgcgctagatgagatatggtggcgggagccagaggaggaagcgccggtggagtggacgtggagctggggcgcgggcacggacgggcagctggggaacggcggattcgacgaccaccaccttccgcagccgctgcttctcccgactcgatgccgcagccgtgtctctttcgtcgctggtggcggcgcccacgctatcgccctcacaaacaattcagtgtatggatttggctcagcaagacgaggacaagttggtaaatgtgcttctaggatccaaaaatcatataatgttcctagactgattgatggttttccaaattgtaagatagtaaatatatatgccaatggcgatcacagtgctgcattggacgaatctggtcatctgtatgtctggggaagagcattaattggacaacatgatgatgatcaaccttcggaaattttgccctccttgagtgtttctcaagtggcactaggatggcaccatgctttagttttatctgctggagaattgtacacacttggtgtttaccgccaccagaaatgtgatctccctgggttaggaaatgtattggggcagcaatcggacacaagggcaacaagcagttctcatgattgttcatcctctttgtcagtgttggagacggttccattccttgatggagaacaggtggcgcaaatagcaagtggaactgagcactctgctttggtaacagataaaggaacagtcttcacctggggctggggagagcatggacagcttggtttgggtgacacttcggatcatgtagctcctcagagagtaaacgtaggtgacaatgggcagggcatgtccggttcatttgccgtctactgtgggagtggatttaccgttgctgtgaaatcgccctagtggctgtctagtttgtaatgcatgcaccaaattctccttcccacataacagtgaagaaataaacgacaacattttgttgtgatgccgtgaaggtagtggttggattattattttgcaaat

SEQ ID NO: 31779 - DNA, 2506 bp, Zea Mays
caatcaccaatttataaaaaacaaatacaaaagcttaatagtcttacaaatgtcttcaaatccataaataagaaaattgtctcaaagaagcttacatagtagatagatagttcaataagattagaatgctatttcttcttatctggcctacactttctaatggccataaaagtctattatatcatcttccttcacatcaaggaaaatatctcgctcaatgaaagtgaatagacaatcatccaaaagagtatcactcatcctatttcttgacgttcttgacaaatttcattgctgaaaatgctctttcgatacttgttgttgccaccggtaaaatcaataccaacttgcaaagcgactataccaaaccataaactttgtccctctctatttcaatgagcttacatgagagatcaacaagattgcctttaaagctatcatcttttcttaagtcatcaatatagttatcaagttctgtttcaaatcttagcatgccatttcttgaaagatcattagggtaaaactccacaagtctaagtaccttgtggacatcaaaataagtaaataagtttgcattgaaatcctaagccatatgagaatcaaaagaaacaaataaattgaaacaatctacataccttagtgggatcaaaagaagcaaatgaattggtcggactcaaggccgccatacaagaaatcaactccagattaaccacatcaaaccgagcatcaagatcttggctaatttgatcaatgatgtcaatatatacttttcttctaaagtgatcatcatttgtttggtttgtaacaaaacattttgatcttccataaggcacataattatccttcgttgcaagaacttggacgccatatttattgcaaaaagtggccctcgaaggaatgcattatttagttcatcacattcaattgttttaatccccttccactgtctagttcatcacattcaattgtttttttcgcattttgaagattaacattttgaatcatgtcatgaggtttacaagaaacctcaacaatatttagcaagagagatacttgatcaaaaaatcacacacaattattatttccctagacaataacaagtagttggagttgatgtgcaaaacaatggacataacaagttgaaggtgactctttcatgatcaatgtttttgagccctttaatctcttctttcatgttgctatccccatcatatccttgaccatggatttgtcttatagtcaaatgatgtctaacaattaaatcttgaattgattacttaaatgttaaagaattagtatcatgtacatgcacaccactaagaaaatgttcacaaggccttcccagtttatcaacataacacaagcaaacaactaatggttttttgtgtgatagttcacttcactcatcagctagaattgcataattgtcatcaccaagttctttaataattttatttttagtttctatggcacaacattgaataatttgcttctgtatatctaggcaaatcgatgtgcaattacctgaagcattattcaaaacaacatgcttatccacatcttgactgtttgatgcaagctattttcaaaagttcaagaaagttttctctattgctatagcgttcacttttatcattatcacggaatgacaaaccttgatgcaaaagaaacttcaaacatctaactgaataagtccatctaatcttacaattcagtgtatggatttggctcagcaagacgaggacaagttggtaaatgtgcttctaggatccaaaaatcatataatgttcctagactgattgatggttttccaaattgtaagatagtaaatatatatgccaatggcgatcacagtgctgcattggacgaatctggtcatctgtatgtctggggaagagcattaattggacaacatgatgatgatcaaccttcggaaattttgccctccttgagtgtttctcaagtggcactaggatggcaccatgctttagttttatctgctggagaattgtacacacttggtgtttaccgccaccagaaatgtgatctccctgggttaggaaatgtattggggcagcaatcggacacaagggcaacaagcagttctcatgattgttcatcctctttgtcagtgttggagacggttccattccttgatggagaacaggtggcgcaaatagcaagtggaactgagcactctgctttggtaacagataaaggaacagtcttcacctggggctggggagagcatggacagcttggtttgggtgacacttcggatcatgtagctcctcagagagtaaacgtaggtgacaatgggcagggcatgtccggttcatttgccgtctactgtgggagtggatttaccgttgctgtgaaatcgccctagtggctgtctagtttgtaatgcatgcaccaaattctccttcccacataacagtgaagaaataaacgacaacattttgttgtgatgccgtgaaggtagtggttggattattattttgcaaat

SEQ ID NO: 31780 - DNA, 3682 bp, Zea Mays
gccacgttcacgcacccctccagcctccaggcttcatctgttcgccagttcgctcccccctccctcacaaagtctcaagacgtctgatggcccctgagtagtgtaaatgtccaagaaacaaacattctctttcgagtcatattctttccgcggaaagcaaaggggtgacagtgaggggatggcgaggcgcaaggatggctggggcgacggcgacaagatcaagattggtgtctgcgtcatggaaaaaaaggtgtcgtgttctcccatggaacagattcttgagaggctgcgtgcgttcggcgagttcgagattataatttttggtgacaaagtgattcttgaagatcccattgaaagttggcctatatgtgattgtctaatcgccttttactcgtctgggtatccactagaaaaggcagagaaatatgctgctttacgaaggccctttttggtgaacgagttggcccctcaataccttcttcatgaccgcagcaaagtatatcagcaacttaagttgtatggggttcctgttccaacctatgctgttgtcagaagagaatatcctaatcaagaattaagctattttcttgaggaagacgattttattgagatccatgggaagcggttttgcaagcctttcgtggagaaacccattgatggtgatgaccataacataatgatatactatcccagctcagctggtggaggaatgaaagaactgtttcgtaaggttggtaatcgatctagtgagttttatccttatgtgaggaaggtgaggcgagatggatcttacatttacgaggagttcatgcctacaggagggacagatgtcaaggtttatacagttgggcctgtatatgcacatgctgaagcacggaagtctccagttgtggatggggttgtcacaaggaattctgatggaaaagaggtgcgctatccggttctattaaccccttctgagaaacaaatcgcaaggagcatttgccaagccttcagacaagcggtgtgcggttttgatcttctaaggtgcgacatgggagaggcaacatcctatgtatgtgatgtcaatggctggagtttcgtgaaaagttcatacaagtactatgatgatgctgcatgcattctgaggaaaatatttcttgatgagaaagctccacatattccatcaaccattcctactaatctcccatggaaaatcagtgagccagctcaagcatctgatactgcgagatgtcgtgagagggtaactgttggattatctaggccatcagaagagctgcgctgtgtcatagctgttatacgccatggggatcgcacaccgaagcagaaggtgaagctaaaagtaactgaagaaaagcttttgaaattgatgttgaaatacaatggtggaaaggcccatgcagaggctaagcttaaaagtgctttgcagctgcaagatctattagatgcaacaagaattctggttccacgtgctagatctggtcgtgaaagtgatagcgacattgaagttgagcacgcagagaagctacgccaagttagagccgtccttgaagagggtggacatttttctggtatctataggaaggtacagctaaaaccatcaaactgggttcgcgttcctaaagataacagagaaggggaggagtatccagttgaagccctaatggttcttaagtatggtggtgttctaactcatgcaggaaggaagcaggcagaagaattgggaagatatttcagaaataatatgtatccaagtgaagggccaggattgcttcgcctccacagtacatataggcatgatctgaagatatacagttcagatgaaggccgcgttcagatgtctgctgcggcttttgctaaaggtcttcttgatttagagggggagttgacaccaatcctggtttcacttgttagtaaggactcgtctatgctagatggacttcaggatggaactattgacataaatgaagcaaaggctcagttgcatgatattattacatcttcagaagttgcacattataatgaacctatggaattcccatggatggttgatggagctagagtgcctaaaaatgctgctcagcttctcacagatttggctgagttgacaaaagaaataaccgcgcaagtaaagatgctttctgatgatgaagatgagaaagctgccataggtagtgattcaccaaatcctccttacgatatagccaaggcactggggaaagcagaaattgatacggatcgtcttttggctggattaccttgtggtagtgaaagctttcttttgatgtttgcccgttggaagaaactagagagggatctctacaatgaaaggaaaaagcgctttgacactacacaaattcctgacatatatgactcttgcaagtatgaccttcttcataactcacatctcaaccttactggtctgagtgatctcttcgaagtttctcagttgctagctgatagtgtcattccaaatgaatatggaataaatccaaagcagaaactcaaaattggctcaaagatagcacgccgtttattggggaagattctaattgacctgcataacacaagacgagaggttgctgctgctgctgctgaatctgacatatataatgatataatgacagtgtcatctgcaaaacggaaggagaggagttactatgaggaggttaagcatgaatgtgttgaaagatctatctctaacaagaagggcattgatctagatgactcccacgaggaaacaaaatactgcttggatccaaaatatgctaatgtggttgaacctgagcgacgtgttcgaacaaggctctattttacatcgatgaatctctgaatggagaagagagtcttgtttgcagaagttctctagatctgctatttaaaacacgtgaactcgactacatgagttacattgtcttgcgtatgtttgaaaatacagaggtacctttggaagacccaaagagattccgtatagagatgacatttagtcgcggtgcagatataagttccttggagggtggaggcaaagaatctttgctgcctgatgaccacacaatgccgattatggagccagaaagattgcaggaagttggatcgtatatcaccttagacaaattcgataaaatggctcgcccatttgcaatgccagctgaagattttcctccagctgctcctcaacctttgcctgttcgcttctgcaaggacatcgaattacgaggaaaactgcagcataagtcagacatgatgagtggtgttttgaaaaggaagacaaaaaggcttcaggaatagcatgcatctgcgcagcttgggcttcagtctgactgagtcgtcgtattgtgggtgctgcaggtgggttttttcaggatttacaggaacgctgaatacaagaccatgtgtctttacactctatgtacattctttttcttaataaaatgacgtgcgcgcggtggtaactctaaggagcataagtggaaacaatcaccatgctttgaatcattttaatttcatctaacctcttttctctctttttctaagcttttgaagtgttgggtgacagaatgcctacacgactatggttatccagttaaaggcatgtttggttcgctacctaatttgtcacactataagtggaaacaatcaccatgctttgaatcattttaatttcatctaaccccttttctct

SEQ ID NO: 31781 - DNA, 3731 bp, Zea Mays
gccacgttcacgcacccctccagcctccaggcttcatctgttcgccagttcgctcccccctccctcacaaagtctcaagacgtctgatggcccctgagtagtgtaaatgtccaagaaacaaacattctctttcgagtcatattctttccgcggaaagcaaaggggtgacagtgaggggatggcgaggcgcaaggatggctggggcgacggcgacaagatcaagattggtgtctgcgtcatggaaaaaaaggtgtcgtgttctcccatggaacagattcttgagaggctgcgtgcgttcggcgagttcgagattataatttttggtgacaaagtgattcttgaagatcccattgaaagttggcctatatgtgattgtctaatcgccttttactcgtctgggtatccactagaaaaggcagagaaatatgctgctttacgaaggccctttttggtgaacgagttggcccctcaataccttcttcatgaccgcagcaaagtatatcagcaacttaagttgtatggggttcctgttccaacctatgctgttgtcagaagagaatatcctaatcaagaattaagctattttcttgaggaagacgattttattgagatccatgggaagcggttttgcaagcctttcgtggagaaacccattgatggtgatgaccataacataatgatatactatcccagctcagctggtggaggaatgaaagaactgtttcgtaaggttggtaatcgatctagtgagttttatccttatgtgaggaaggtgaggcgagatggatcttacatttacgaggagttcatgcctacaggagggacagatgtcaaggtttatacagttgggcctgtatatgcacatgctgaagcacggaagtctccagttgtggatggggttgtcacaaggaattctgatggaaaagaggtgcgctatccggttctattaaccccttctgagaaacaaatcgcaaggagcatttgccaagccttcagacaagcggtgtgcggttttgatcttctaaggtgcgacatgggagaggcaacatcctatgtatgtgatgtcaatggctggagtttcgtgaaaagttcatacaagtactatgatgatgctgcatgcattctgaggaaaatatttcttgatgagaaagctccacatattccatcaaccattcctactaatctcccatggaaaatcagtgagccagctcaagcatctgatactgcgagatgtcgtgagagggtaactgttggattatctaggccatcagaagagctgcgctgtgtcatagctgttatacgccatggggatcgcacaccgaagcagaaggtgaagctaaaagtaactgaagaaaagcttttgaaattgatgttgaaatacaatggtggaaaggcccatgcagaggctaagcttaaaagtgctttgcagctgcaagatctattagatgcaacaagaattctggttccacgtgctagatctggtcgtgaaagtgatagcgacattgaagttgagcacgcagagaagctacgccaagttagagccgtccttgaagagggtggacatttttctggtatctataggaaggtacagctaaaaccatcaaactgggttcgcgttcctaaagataacagagaaggggaggagtatccagttgaagccctaatggttcttaagtatggtggtgttctaactcatgcaggaaggaagcaggcagaagaattgggaagatatttcagaaataatatgtatccaagtgaagggccaggattgcttcgcctccacagtacatataggcatgatctgaagatatacagttcagatgaaggccgcgttcagatgtctgctgcggcttttgctaaaggtcttcttgatttagagggggagttgacaccaatcctggtttcacttgttagtaaggactcgtctatgctagatggacttcaggatggaactattgacataaatgaagcaaaggctcagttgcatgatattattacatcttcagaagttgcacattataatgaacctatggaattcccatggatggttgatggagctagagtgcctaaaaatgctgctcagcttctcacagatttggctgagttgacaaaagaaataaccgcgcaagtaaagatgctttctgatgatgaagatgagaaagctgccataggtagtgattcaccaaatcctccttacgatatagccaaggcactggggaaagcagaaattgatacggatcgtcttttggctggattaccttgtggtagtgaaagctttcttttgatgtttgcccgttggaagaaactagagagggatctctacaatgaaaggaaaaagcgctttgacactacacaaattcctgacatatatgactcttgcaagtatgaccttcttcataactcacatctcaaccttactggtctgagtgatctcttcgaagtttctcagttgctagctgatagtgtcattccaaatgaatatggaataaatccaaagcagaaactcaaaattggctcaaagatagcacgccgtttattggggaagattctaattgacctgcataacacaagacgagaggttgctgctgctgctgctgaatctgacatatataatgatataatgacagtgtcatctgcaaaacggaaggagaggagttactatgaggaggttaagcatgaatgtgttgaaagatctatctctaacaagaagggcattgatctagatgactcccacgaggaaacaaaatactgcttggatccaaaatatgctaatgtggttgaacctgagcgacgtgttcgaacaaggctctattttacatcggaatcacacatacactctctaatgaatgtacttcgctattgcaatttagatgaatctctgaatggagaagagagtcttgtttgcagaagttctctagatctgctatttaaaacacgtgaactcgactacatgagttacattgtcttgcgtatgtttgaaaatacagaggtacctttggaagacccaaagagattccgtatagagatgacatttagtcgcggtgcagatataagttccttggagggtggaggcaaagaatctttgctgcctgatgaccacacaatgccgattatggagccagaaagattgcaggaagttggatcgtatatcaccttagacaaattcgataaaatggctcgcccatttgcaatgccagctgaagattttcctccagctgctcctcaacctttgcctgttcgcttctgcaaggacatcgaattacgaggaaaactgcagcataagtcagacatgatgagtggtgttttgaaaaggaagacaaaaaggcttcaggaatagcatgcatctgcgcagcttgggcttcagtctgactgagtcgtcgtattgtgggtgctgcaggtgggttttttcaggatttacaggaacgctgaatacaagaccatgtgtctttacactctatgtacattctttttcttaataaaatgacgtgcgcgcggtggtaactctaaggagcataagtggaaacaatcaccatgctttgaatcattttaatttcatctaacctcttttctctctttttctaagcttttgaagtgttgggtgacagaatgcctacacgactatggttatccagttaaaggcatgtttggttcgctacctaatttgtcacactataagtggaaacaatcaccatgctttgaatcattttaatttcatctaaccccttttctct

SEQ ID NO: 31782 - DNA, 3518 bp, Zea Mays
gccacgttcacgcacccctccagcctccaggcttcatctgttcgccagttcgctcccccctccctcacaaagtctcaagacgtctgatggcccctgagtagtgtaaatgtccaagaaacaaacattctctttcgagtcatattctttccgcggaaagcaaaggggtgacagtgaggggatggcgaggcgcaaggatggctggggcgacggcgacaagatcaagattggtgtctgcgtcatggaaaaaaaggtgtcgtgttctcccatggaacagattcttgagaggctgcgtgcgttcggcgagttcgagattataatttttggtgacaaagtgattcttgaagatcccattgaaagttggcctatatgtgattgtctaatcgccttttactcgtctgggtatccactagaaaaggcagagaaatatgctgctttacgaaggccctttttggtgaacgagttggcccctcaataccttcttcatgaccgcagcaaagtatatcagcaacttaagttgtatggggttcctgttccaacctatgctgttgtcagaagagaatatcctaatcaagaattaagctattttcttgaggaagacgattttattgagatccatgggaagcggttttgcaagcctttcgtggagaaacccattgatggtgatgaccataacataatgatatactatcccagctcagctggtggaggaatgaaagaactgtttcgtaaggttggtaatcgatctagtgagttttatccttatgtgaggaaggtgaggcgagatggatcttacatttacgaggagttcatgcctacaggagggacagatgtcaaggtttatacagttgggcctgtatatgcacatgctgaagcacggaagtctccagttgtggatggggttgtcacaaggaattctgatggaaaagaggtgcgctatccggttctattaaccccttctgagaaacaaatcgcaaggagcatttgccaagccttcagacaagcggtgtgcggttttgatcttctaaggtgcgacatgggagaggcaacatcctatgtatgtgatgtcaatggctggagtttcgtgaaaagttcatacaagtactatgatgatgctgcatgcattctgaggaaaatatttcttgatgagaaagctccacatattccatcaaccattcctactaatctcccatggaaaatcagtgagccagctcaagcatctgatactgcgagatgtcgtgagagggtaactgttggattatctaggccatcagaagagctgcgctgtgtcatagctgttatacgccatggggatcgcacaccgaagcagaaggtgaagctaaaagtaactgaagaaaagcttttgaaattgatgttgaaatacaatggtggaaaggcccatgcagaggctaagcttaaaagtgctttgcagctgcaagatctattagatgcaacaagaattctggttccacgtgctagatctggtcgtgaaagtgatagcgacattgaagttgagcacgcagagaagctacgccaagttagagccgtccttgaagagggtggacatttttctggtatctataggaaggtacagctaaaaccatcaaactgggttcgcgttcctaaagataacagagaaggggaggagtatccagttgaagccctaatggttcttaagtatggtggtgttctaactcatgcaggaaggaagcaggcagaagaattgggaagatatttcagaaataatatgtatccaagtgaagggccaggattgcttcgcctccacagtacatataggcatgatctgaagatatacagttcagatgaaggccgcgttcagatgtctgctgcggcttttgctaaaggtcttcttgatttagagggggagttgacaccaatcctggtttcacttgttagtaaggactcgtctatgctagatggacttcaggatggaactattgacataaatgaagcaaaggctcagttgcatgatattattacatcttcagaagttgcacattataatgaacctatggaattcccatggatggttgatggagctagagtgcctaaaaatgctgctcagcttctcacagatttggctgagttgacaaaagaaataaccgcgcaagtaaagatgctttctgatgatgaagatgagaaagctgccataggtagtgattcaccaaatcctccttacgatatagccaaggcactggggaaagcagaaattgatacggatcgtcttttggctggattaccttgtggtagtgaaagctttcttttgatgtttgcccgttggaagaaactagagagggatctctacaatgaaaggaaaaagcgctttgacactacacaaattcctgacatatatgactcttgcaagtatgaccttcttcataactcacatctcaaccttactggtctgagtgatctcttcgaagtttctcagttgctagctgatagtgtcattccaaatgaatatggaataaatccaaagcagaaactcaaaattggctcaaagtgtcatctgcaaaacggaaggagaggagttactatgaggaggttaagcatgaatgtgttgaaagatctatctctaacaagaagggcattgatctagatgactcccacgaggaaacaaaatactgcttggatccaaaatgaatctctgaatggagaagagagtcttgtttgcagaagttctctagatctgctatttaaaacacgtgaactcgactacatgagttacattgtcttgcgtatgtttgaaaatacagaggtacctttggaagacccaaagagattccgtatagagatgacatttagtcgcggtgcagatataagttccttggagggtggaggcaaagaatctttgctgcctgatgaccacacaatgccgattatggagccagaaagattgcaggaagttggatcgtatatcaccttagacaaattcgataaaatggctcgcccatttgcaatgccagctgaagattttcctccagctgctcctcaacctttgcctgttcgcttctgcaaggacatcgaattacgaggaaaactgcagcataagtcagacatgatgagtggtgttttgaaaaggaagacaaaaaggcttcaggaatagcatgcatctgcgcagcttgggcttcagtctgactgagtcgtcgtattgtgggtgctgcaggtgggttttttcaggatttacaggaacgctgaatacaagaccatgtgtctttacactctatgtacattctttttcttaataaaatgacgtgcgcgcggtggtaactctaaggagcataagtggaaacaatcaccatgctttgaatcattttaatttcatctaacctcttttctctctttttctaagcttttgaagtgttgggtgacagaatgcctacacgactatggttatccagttaaaggcatgtttggttcgctacctaatttgtcacactataagtggaaacaatcaccatgctttgaatcattttaatttcatctaaccccttttctct

SEQ ID NO: 31783 - DNA, 1295 bp, Zea Mays
atggcgaggcgcaaggatggctggggcgacggcgacaagatcaagattggtgtctgcgtcatggaaaaaaaggtgtcgtgttctcccatggaacagattcttgagaggctgcgtgcgttcggcgagttcgagattataatttttggtgacaaagtgattcttgaagatcccattgaaagttggcctatatgtgattgtctaatcgccttttactcgtctgggtatccactagaaaaggcagagaaatatgctgctttacgaaggccctttttggtgaacgagttggcccctcaataccttcttcatgaccgcagcaaagtatatcagcaacttaagttgtatggggttcctgttccaacctatgctgttgtcagaagagaatatcctaatcaagaattaagctattttcttgaggaagacgattttattgagatccatgggaagcggttttgcaagcctttcgtggagaaacccattgatggtgatgaccataacataatgatatactatcccagctcagctggtggaggaatgaaagaactgtttcgtaaggtttatacagttgggcctgtatatgcacatgctgaagcacggaagtctccagttgtggatggggttgtcacaaggaattctgatggaaaagaggtgcgctatccggttctattaaccccttctgagaaacaaatcgcaaggagcatttgccaagccttcagacaagcggtgtgcggttttgatcttctaaggtgcgacatgggagaggcaacatcctatgtatgtgatgtcaatggctggagtttcgtgaaaagttcatacaagtactatgatgatgctgcatgcattctgaggaaaatatttcttgatgagaaagctccacatattccatcaaccattcctactaatctcccatggaaaatcagtgagccagctcaagcatctgatactgcgagatgtcgtgagagggtaactgttggattatctaggccatcagaagagctgcgctgtgtcatagctgttatacgccatggggatcgcacaccgaagcagaaggtgaagctaaaagtaactgaagaaaagcttttgaaattgatgttgaaatacaatggtggaaaggcccatgcagaggctaagcttaaaagtgctttgcagctgcaagatctattagatgcaacaagaattctggttccacgtgctagatctggtcgtgaaagtgatagcgacattgaagttgagcacgcagagaagctacgccaagttagagccgtccttgaagaggtcttcgtacaaatctgtccaag

SEQ ID NO: 31784 - DNA, 3215 bp, Zea Mays
cataactcctgagattcaagcatagaacctgccctttttggtgaacgagttggcccctcaataccttcttcatgaccgcagcaaagtatatcagcaacttaagttgtatggggttcctgttccaacctatgctgttgtcagaagagaatatcctaatcaagaattaagctattttcttgaggaagacgattttattgagatccatgggaagcggttttgcaagcctttcgtggagaaacccattgatggtgatgaccataacataatgatatactatcccagctcagctggtggaggaatgaaagaactgtttcgtaaggtttatacagttgggcctgtatatgcacatgctgaagcacggaagtctccagttgtggatggggttgtcacaaggaattctgatggaaaagaggtgcgctatccggttctattaaccccttctgagaaacaaatcgcaaggagcatttgccaagccttcagacaagcggtgtgcggttttgatcttctaaggtgcgacatgggagaggcaacatcctatgtatgtgatgtcaatggctggagtttcgtgaaaagttcatacaagtactatgatgatgctgcatgcattctgaggaaaatatttcttgatgagaaagctccacatattccatcaaccattcctactaatctcccatggaaaatcagtgagccagctcaagcatctgatactgcgagatgtcgtgagagggtaactgttggattatctaggccatcagaagagctgcgctgtgtcatagctgttatacgccatggggatcgcacaccgaagcagaaggtgaagctaaaagtaactgaagaaaagcttttgaaattgatgttgaaatacaatggtggaaaggcccatgcagaggctaagcttaaaagtgctttgcagctgcaagatctattagatgcaacaagaattctggttccacgtgctagatctggtcgtgaaagtgatagcgacattgaagttgagcacgcagagaagctacgccaagttagagccgtccttgaagagggtggacatttttctggtatctataggaaggtacagctaaaaccatcaaactgggttcgcgttcctaaagataacagagaaggggaggagtatccagttgaagccctaatggttcttaagtatggtggtgttctaactcatgcaggaaggaagcaggcagaagaattgggaagatatttcagaaataatatgtatccaagtgaagggccaggattgcttcgcctccacagtacatataggcatgatctgaagatatacagttcagatgaaggccgcgttcagatgtctgctgcggcttttgctaaaggtcttcttgatttagagggggagttgacaccaatcctggtttcacttgttagtaaggactcgtctatgctagatggacttcaggatggaactattgacataaatgaagcaaaggctcagttgcatgatattattacatcttcagaagttgcacattataatgaacctatggaattcccatggatggttgatggagctagagtgcctaaaaatgctgctcagcttctcacagatttggctgagttgacaaaagaaataaccgcgcaagtaaagatgctttctgatgatgaagatgagaaagctgccataggtagtgattcaccaaatcctccttacgatatagccaaggcactggggaaagcagaaattgatacggatcgtcttttggctggattaccttgtggtagtgaaagctttcttttgatgtttgcccgttggaagaaactagagagggatctctacaatgaaaggaaaaagcgctttgacactacacaaattcctgacatatatgactcttgcaagtatgaccttcttcataactcacatctcaaccttactggtctgagtgatctcttcgaagtttctcagttgctagctgatagtgtcattccaaatgaatatggaataaatccaaagcagaaactcaaaattggctcaaagatagcacgccgtttattggggaagattctaattgacctgcataacacaagacgagaggttgctgctgctgctgctgaatctgacatatataatgatataatgacagtgtcatctgcaaaacggaaggagaggagttactatgaggaggttaagcatgaatgtgttgaaagatctatctctaacaagaagggcattgatctagatgactcccacgaggaaacaaaatactgcttggatccaaaatatgctaatgtggttgaacctgagcgacgtgttcgaacaaggctctattttacatcggaatcacacatacactctctaatgaatgtacttcgctattgcaatttagatgaatctctgaatggagaagagagtcttgtttgcagaagttctctagatctgctatttaaaacacgtgaactcgactacatgagttacattgtcttgcgtatgtttgaaaatacagaggtacctttggaagacccaaagagattccgtatagagatgacatttagtcgcggtgcagatataagttccttggagggtggaggcaaagaatctttgctgcctgatgaccacacaatgccgattatggagccagaaagattgcaggaagttggatcgtatatcaccttagacaaattcgataaaatggctcgcccatttgcaatgccagctgaagattttcctccagctgctcctcaacctttgcctgttcgcttctgcaaggacatcgaattacgaggaaaactgcagcataagtcagacatgatgagtggtgttttgaaaaggaagacaaaaaggcttcaggaatagcatgcatctgcgcagcttgggcttcagtctgactgagtcgtcgtattgtgggtgctgcaggtgggttttttcaggatttacaggaacgctgaatacaagaccatgtgtctttacactctatgtacattctttttcttaataaaatgacgtgcgcgcggtggtaactctaaggagcataagtggaaacaatcaccatgctttgaatcattttaatttcatctaacctcttttctctctttttctaagcttttgaagtgttgggtgacagaatgcctacacgactatggttatccagttaaaggcatgtttggttcgctacctaatttgtcacactataagtggaaacaatcaccatgctttgaatcattttaatttcatctaaccccttttctct

SEQ ID NO: 31785 - DNA, 2651 bp, Zea Mays
aagaaccatgatgatttacaaaactacgtctcatgctgcggtgcaggtgtgcggttttgatcttctaaggtgcgacatgggagaggcaacatcctatgtatgtgatgtcaatggctggagtttcgtgaaaagttcatacaagtactatgatgatgctgcatgcattctgaggaaaatatttcttgatgagaaagctccacatattccatcaaccattcctactaatctcccatggaaaatcagtgagccagctcaagcatctgatactgcgagatgtcgtgagagggtaactgttggattatctaggccatcagaagagctgcgctgtgtcatagctgttatacgccatggggatcgcacaccgaagcagaaggtgaagctaaaagtaactgaagaaaagcttttgaaattgatgttgaaatacaatggtggaaaggcccatgcagaggctaagcttaaaagtgctttgcagctgcaagatctattagatgcaacaagaattctggttccacgtgctagatctggtcgtgaaagtgatagcgacattgaagttgagcacgcagagaagctacgccaagttagagccgtccttgaagagggtggacatttttctggtatctataggaaggtacagctaaaaccatcaaactgggttcgcgttcctaaagataacagagaaggggaggagtatccagttgaagccctaatggttcttaagtatggtggtgttctaactcatgcaggaaggaagcaggcagaagaattgggaagatatttcagaaataatatgtatccaagtgaagggccaggattgcttcgcctccacagtacatataggcatgatctgaagatatacagttcagatgaaggccgcgttcagatgtctgctgcggcttttgctaaaggtcttcttgatttagagggggagttgacaccaatcctggtttcacttgttagtaaggactcgtctatgctagatggacttcaggatggaactattgacataaatgaagcaaaggctcagttgcatgatattattacatcttcagaagttgcacattataatgaacctatggaattcccatggatggttgatggagctagagtgcctaaaaatgctgctcagcttctcacagatttggctgagttgacaaaagaaataaccgcgcaagtaaagatgctttctgatgatgaagatgagaaagctgccataggtagtgattcaccaaatcctccttacgatatagccaaggcactggggaaagcagaaattgatacggatcgtcttttggctggattaccttgtggtagtgaaagctttcttttgatgtttgcccgttggaagaaactagagagggatctctacaatgaaaggaaaaagcgctttgacactacacaaattcctgacgtatgaccttcttcataactcacatctcaaccttactggtctgagtgatctcttcgaagtttctcagttgctagctgatagtgtcattccaaatgaatatggaataaatccaaagcagaaactcaaaattggctcaaagtgtcatctgcaaaacggaaggagaggagttactatgaggaggttaagcatgaatgtgttgaaagatctatctctaacaagaagggcattgatctagatgactcccacgaggaaacaaaatactgcttggatccaaaatatgctaatgtggttgaacctgagcgacgtgttcgaacaaggctctattttacatcggaatcacacatacactctctaatgaatgtacttcgctattgcaatttagatgaatctctgaatggagaagagagtcttgtttgcagaagttctctagatctgctatttaaaacacgtgaactcgactacatgagttacattgtcttgcgtatgtttgaaaatacagaggtacctttggaagacccaaagagattccgtatagagatgacatttagtcgcggtgcagatataagttccttggagggtggaggcaaagaatctttgctgcctgatgaccacacaatgccgattatggagccagaaagattgcaggaagttggatcgtatatcaccttagacaaattcgataaaatggctcgcccatttgcaatgccagctgaagattttcctccagctgctcctcaacctttgcctgttcgcttctgcaaggacatcgaattacgaggaaaactgcagcataagtcagacatgatgagtggtgttttgaaaaggaagacaaaaaggcttcaggaatagcatgcatctgcgcagcttgggcttcagtctgactgagtcgtcgtattgtgggtgctgcaggtgggttttttcaggatttacaggaacgctgaatacaagaccatgtgtctttacactctatgtacattctttttcttaataaaatgacgtgcgcgcggtggtaactctaaggagcataagtggaaacaatcaccatgctttgaatcattttaatttcatctaacctcttttctctctttttctaagcttttgaagtgttgggtgacagaatgcctacacgactatggttatccagttaaaggcatgtttggttcgctacctaatttgtcacactataagtggaaacaatcaccatgctttgaatcattttaatttcatctaaccccttttctct

SEQ ID NO: 31786 - DNA, 2579 bp, Zea Mays
ggaaattctggccctggtggtgtgcggttttgatcttctaaggtgcgacatgggagaggcaacatcctatgtatgtgatgtcaatggctggagtttcgtgaaaagttcatacaagtactatgatgatgctgcatgcattctgaggaaaatatttcttgatgagaaagctccacatattccatcaaccattcctactaatctcccatggaaaatcagtgagccagctcaagcatctgatactgcgagatgtcgtgagagggtaactgttggattatctaggccatcagaagagctgcgctgtgtcatagctgttatacgccatggggatcgcacaccgaagcagaaggtgaagctaaaagtaactgaagaaaagcttttgaaattgatgttgaaatacaatggtggaaaggcccatgcagaggctaagcttaaaagtgctttgcagctgcaagatctattagatgcaacaagaattctggttccacgtgctagatctggtcgtgaaagtgatagcgacattgaagttgagcacgcagagaagctacgccaagttagagccgtccttgaagagggtggacatttttctggtatctataggaaggtacagctaaaaccatcaaactgggttcgcgttcctaaagataacagagaaggggaggagtatccagttgaagccctaatggttcttaagtatggtggtgttctaactcatgcaggaaggaagcaggcagaagaattgggaagatatttcagaaataatatgtatccaagtgaagggccaggattgcttcgcctccacagtacatataggcatgatctgaagatatacagttcagatgaaggccgcgttcagatgtctgctgcggcttttgctaaaggtcttcttgatttagagggggagttgacaccaatcctggtttcacttgttagtaaggactcgtctatgctagatggacttcaggatggaactattgacataaatgaagcaaaggctcagttgcatgatattattacatcttcagaagttgcacattataatgaacctatggaattcccatggatggttgatggagctagagtgcctaaaaatgctgctcagcttctcacagatttggctgagttgacaaaagaaataaccgcgcaagtaaagatgctttctgatgatgaagatgagaaagctgccataggtagtgattcaccaaatcctccttacgatatagccaaggcactggggaaagcagaaattgatacggatcgtcttttggctggattaccttgtggtagtgaaagctttcttttgatgtttgcccgttggaagaaactagagagggatctctacaatgaaaggaaaaagcgctttgacactacacaaattcctgacatatatgactcttgcaagtatgaccttcttcataactcacatctcaaccttactggtctgagtgatctcttcgaagtttctcagttgctagctgatagtgtcattccaaatgaatatggaataaatccaaagcagaaactcaaaattggctcaaagatagcacgccgtttattggggaagattctaattgacctgcataacacaagacgagaggttgctgctgctgctgctgaatctgacatatataatgatataatgacagtgtcatctgcaaaacggaaggagaggagttactatgaggaggttaagcatgaatgtgttgaaagatctatctctaacaagaagggcattgatctagatgactcccacgaggaaacaaaatactgcttggatccaaaatatgctaatgtggttgaacctgagcgacgtgttcgaacaaggctctattttacatcggtacctttggaagacccaaagagattccgtatagagatgacatttagtcgcggtgcagatataagttccttggagggtggaggcaaagaatctttgctgcctgatgaccacacaatgccgattatggagccagaaagattgcaggaagttggatcgtatatcaccttagacaaattcgataaaatggctcgcccatttgcaatgccagctgaagattttcctccagctgctcctcaacctttgcctgttcgcttctgcaaggacatcgaattacgaggaaaactgcagcataagtcagacatgatgagtggtgttttgaaaaggaagacaaaaaggcttcaggaatagcatgcatctgcgcagcttgggcttcagtctgactgagtcgtcgtattgtgggtgctgcaggtgggttttttcaggatttacaggaacgctgaatacaagaccatgtgtctttacactctatgtacattctttttcttaataaaatgacgtgcgcgcggtggtaactctaaggagcataagtggaaacaatcaccatgctttgaatcattttaatttcatctaacctcttttctctctttttctaagcttttgaagtgttgggtgacagaatgcctacacgactatggttatccagttaaaggcatgtttggttcgctacctaatttgtcacactataagtggaaacaatcaccatgctttgaatcattttaatttcatctaaccccttttctct

SEQ ID NO: 31787 - DNA, 1784 bp, Zea Mays
ctcgatttttcttgaaaggctagcaatagcaacattgtctttctatctggttagggttgtggtttcacttgttagtaaggactcgtctatgctagatggacttcaggatggaactattgacataaatgaagcaaaggctcagttgcatgatattattacatcttcagaagttgcacattataatgaacctatggaattcccatggatggttgatggagctagagtgcctaaaaatgctgctcagcttctcacagatttggctgagttgacaaaagaaataaccgcgcaagtaaagatgctttctgatgatgaagatgagaaagctgccataggtagtgattcaccaaatcctccttacgatatagccaaggcactggggaaagcagaaattgatacggatcgtcttttggctggattaccttgtggtagtgaaagctttcttttgatgtttgcccgttggaagaaactagagagggatctctacaatgaaaggaaaaagcgctttgacactacacaaattcctgacatatatgactcttgcaagtatgaccttcttcataactcacatctcaaccttactggtctgagtgatctcttcgaagtttctcagttgctagctgatagtgtcattccaaatgaatatggaataaatccaaagcagaaactcaaaattggctcaaagatagcacgccgtttattggggaagattctaattgacctgcataacacaagacgagaggttgctgctgctgctgctgaatctgacatatataatgatataatgacagtgtcatctgcaaaacggaaggagaggagttactatgaggaggttaagcatgaatgtgttgaaagatctatctctaacaagaagggcattgatctagatgactcccacgaggaaacaaaatactgcttggatccaaagtaagttactaagcaattccattttttagttgtaaaacatatcaagtaattttattgcagatatgctaatgtggttgaacctgagcgacgtgttcgaacaaggctctattttacatcggtacctttggaagacccaaagagattccgtatagagatgacatttagtcgcggtgcagatataagttccttggagggtggaggcaaagaatctttgctgcctgatgaccacacaatgccgattatggagccagaaagattgcaggaagttggatcgtatatcaccttagacaaattcgataaaatggctcgcccatttgcaatgccagctgaagattttcctccagctgctcctcaacctttgcctgttcgcttctgcaaggacatcgaattacgaggaaaactgcagcataagtcagacatgatgagtggtgttttgaaaaggaagacaaaaaggcttcaggaatagcatgcatctgcgcagcttgggcttcagtctgactgagtcgtcgtattgtgggtgctgcaggtgggttttttcaggatttacaggaacgctgaatacaagaccatgtgtctttacactctatgtacattctttttcttaataaaatgacgtgcgcgcggtggtaactctaaggagcataagtggaaacaatcaccatgctttgaatcattttaatttcatctaacctcttttctctctttttctaagcttttgaagtgttgggtgacagaatgcctacacgactatggttatccagttaaaggcatgtttggttcgctacctaatttgtcacactataagtggaaacaatcaccatgctttgaatcattttaatttcatctaaccccttttctct

SEQ ID NO: 31788 - DNA, 3178 bp, Zea Mays
aacggctcctgatgcaaatgtcacctccccgattcgtcgatttctccctcccttcatccaatcgggatttctgcttcccgcgctctcctcgcctcctccttcctagaaaacccacaaaaatcatctcgccattcctctccttcgtagaaaactcacaaaaatccctccaggttccagggggcgaggggagagagagagagagagagagagagagagttgagtgcgagagaggcgagggggcggcggcggcggcggcgacaatggggatccaggggctgctgccgcagttgaagtcaatcatggcgcccattagcgcggtggagctgcggggccagacggtggctgttgacacctattcctggctccacaagggcgctctatcctgcggcgaccgcctctgcaagggcatccccaccaccaggcatattgaatattgcatgcatcgggttaacatgttgcggcattttggtgtcagaccaattcttgtatttgatggaggccttctgccaataaagagctatcaagaggggaagcgagcaaggtcaagaaaggaaaaccttgagcgtgccagggaacatgaggctgctgggaactcacgtgctgcttttgagtgctatcagaaggctgttgacattacacctagaattgcttctgaactgattgaggtactgaagaaagaaaatgttaattatattgttgcaccttatgaagcagatgcgcaaatgacattcttatctgttaataaacttgttgatgctgtgatcactgaggattcagatttgataccatttggttgttctagaattattttcaaaatggacaaatttgggcaaggtgttgaatttcagattacacgcctagagcaaaacagagagcttgactttaatggattcacaagacagatgttacttgagatgtgtattttaagtggctgtgactatctcccctcattgccaggaatgggcgttaaacgagctcatgcactcatccaaaagctgaagtgtcacgaaaaggtgatcaagcacctgaggtatggtgctgtttctgttccacctcaatatgaagaggacttcaagaaagcaatctgggcatttaagttccaaagggtctacgatcctgctacagaagatattattcatttgtcaagtgtgcctcaaagcctcattgaagatttggaatttttaggcccatggttaccacagaatattgccaaaggcattgctctagggaacattgatccactcacgaaggaaccattcgagatcaatccagagtgcagtgcaccttctgttcataaggtttgtccaaccagagagcctattgcaccttcaaatgggaggaagaaactagatttgcctgtgcagaaaaatatattgaccaactatttctgcttagcatcccttgaggcaaaacggaaattcagggcgcctaaagtaacacataagcaacaaatattgaatgaagctttgcctagccctcaagctcaaggctctgctacctctgattcagttgaagatactaggttgccaacagatcgcattcaagcttctcaatgtagttctgagcatttaagctctgaacctcctcaaaatgacccaatcagtgttggctctcagtgtagttctgagcgtttcagctgtgagtaccccctcgatgattcagccaacatttcacaatgtagttcacttgatggtggtagtgatcctccttacaaggatactggcaataaagacagaaaggttgaggctggctacgacaacaaaaatagaatacctacaagtccttgcataatgggaaatttaccctggacatcagagccatttttagttccccataacgtgggaccatctataccagttcaacattatactgaaagcactgtggcctctaataataatggcattaccgtaagttcatacttcaaaacagcaaacaagagaatttgcacagatcaaggagaccagttagatgatgactatgatgttagtactggtaatctttgtggagatcaactgaggaaatctggcatgttgaagagaagaaagctttctggcatccaaaagtttgaagatgaaactttacagccgattcattctgacgatagtccaccattcgttgatgaagaaacttctgcaggtcaagatacagatgatcctgacgatacaaatataagaactgaaggaagatttggatgcaatgtttcccatgtgaatacatacagtggaattgcagaaaaatcaatggataagtttgctgcattgatatcatctttcagataccccggcccccgtgccagtggccttcgtgctcctttaaaggatgtgaaaaacacactttctgtgagatctattcttaaagctccagaaaaagacacattcagacgcacagcaaagaaaacaggtctaggccccccttcaaaaagcagatatacaagtgatgataagggaagtgctgccagcccccctgatattagcgcatttgcttataggcctatgaaaactgttgcttctgaccaaggcaaaaccacagtcggacgtttgaatgggagcagattcagagagaccgcaccgaaagcaactggagggacttctaggagccagttcaaatagaaccagtgccgttggctctctaaatgctgtggtgaaaggaaaacaacccctgatcagagcatttccgtttctgagcatcgttgaagatagttggcattgggcccccggaggacctcgaggggctgcagaggttcctttgcttcagagcccctctgtacctattcatcaacgtggaccctggaggaccgttactgcctgctagtagcagctcgttattttgagctcatcttttgtgctgctcgtcagctcgtgttcaaaccaagcctactgctcatttgctttccctgcagcagcagcagcccctactgttgcatcgaagaaagcaatctcattagcgactgcgttgaactgtagttaagatacttcttgtccatatccttgaggcatgattcgaacggcgtcattgtctcattgacttgtctttatcattcctgaaagataaaagtgaacattgaaatcaaagaaaaaaaaacagtttgtacggtaaagtttgagtttaaaattcattttcaaggtaggcaactggacacactctgagctatccaaaggagggataaaacataaaatat

SEQ ID NO: 31789 - DNA, 3572 bp, Zea Mays
tttctccctcccttcatccaatcgggatttctgcttcccgcgctctcctcgcctcctccttcctagaaaacccacaaaaatcatctcgccattcctctccttcgtagaaaactcacaaaaatccctccaggttccagggggcgaggggagagagagagagagagagagagagagagttgagtgcgagagaggcgagggggcggcggcggcggcggcgacaatggggatccaggggctgctgccgcagttgaagtcaatcatggcgcccattagcgcggtggagctgcggggccagacggtggctgttgacacctattcctggctccacaagggcgctctatcctgcggcgaccgcctctgcaagggcatccccaccaccaggcatattgaatattgcatgcatcgggttaacatgttgcggcattttggtgtcagaccaattcttgtatttgatggaggccttctgccaataaagagctatcaagaggggaagcgagcaaggtcaagaaaggaaaaccttgagcgtgccagggaacatgaggctgctgggaactcacgtgctgcttttgagtgctatcagaaggctgttgacattacacctagaattgcttctgaactgattgaggtactgaagaaagaaaatgttaattatattgttgcaccttatgaagcagatgcgcaaatgacattcttatctgttaataaacttgttgatgctgtgatcactgaggattcagatttgataccatttggttgttctagaattattttcaaaatggacaaatttgggcaaggtgttgaatttcagattacacgcctagagcaaaacagagagcttgactttaatggattcacaagacagatgttacttgagatgtgtattttaagtggctgtgactatctcccctcattgccaggaatgggcgttaaacgagctcatgcactcatccaaaagctgaagtgtcacgaaaaggtgatcaagcacctgaggtatggtgctgtttctgttccacctcaatatgaagaggacttcaagaaagcaatctgggcatttaagttccaaagggtctacgatcctgctacagaagatattattcatttgtcaagtgtgcctcaaagcctcattgaagatttggaatttttaggcccatatcctttgctgagcttatgtttagatgttaaagctctttcatatgaggttatccactgttctagatgatgtgaagctgtttcctgaatttattaggctgctttatccactattctagacgctgtgaagccgtttcctgaatttagtaggccactctgcctaatgaccattgctgtcgagtttagaaataagctaaaggcattgcgttgctagattttcttaataatccaaaaaggttcaaactcagaataaactcgtgaattagagcttttccttaattattttttacatggttaccacagaatattgccaaaggcattgctctagggaacattgatccactcacgaaggaaccattcgagatcaatccagagtgcagtgcaccttctgttcataaggtttgtccaaccagagagcctattgcaccttcaaatgggaggaagaaactagatttgcctgtgcagaaaaatatattgaccaactatttctgcttagcatcccttgaggcaaaacggaaattcagggcgcctaaagtaacacataagcaacaaatattgaatgaagctttgcctagccctcaagctcaaggctctgctacctctgattcagttgaagatactaggttgccaacagatcgcattcaagcttctcaatgtagttctgagcatttaagctctgaacctcctcaaaatgacccaatcagtgttggctctcagtgtagttctgagcgtttcagctgtgagtaccccctcgatgattcagccaacatttcacaatgtagttcacttgatggtggtagtgatcctccttacaaggatactggcaataaagacagaaaggttgaggctggctacgacaacaaaaatagaatacctacaagtccttgcataatgggaaatttaccctggacatcagagccatttttagttccccataacgtgggaccatctataccagttcaacattatactgaaagcactgtggcctctaataataatggcattaccgtaagttcatacttcaaaacagcaaacaagagaatttgcacagatcaaggagaccagttagatgatgactatgatgttagtactggtaatctttgtggagatcaactgaggaaatctggcatgttgaagagaagaaagctttctggcatccaaaagtttgaagatgaaactttacagccgattcattctgacgatagtccaccattcgttgatgaagaaacttctgcaggtcaagatacagatgatcctgacgatacaaatataagaactgaaggaagatttggatgcaatgtttcccatgtgaatacatacagtggaattgcagaaaaatcaatggataagtttgctgcattgatatcatctttcagataccccggcccccgtgccagtggccttcgtgctcctttaaaggatgtgaaaaacacactttctgtgagatctattcttaaagctccagaaaaagacacattcagacgcacagcaaagaaaacaggtctaggccccccttcaaaaagcagatatacaagtgatgataagggaagtgctgccagcccccctgatattagcgcatttgcttataggcctatgaaaactgttgcttctgaccaaggcaaaaccacaggtaaaactacagacactattgatggccctcctgatctgggcttgcttgcatacacatctactgtctgctgtcccgagcggagcaaacatgcaggcaaccctcctgatctaagcacatttgcatataaacctgtgaaagctgcagtcggacgtttgaatgggagcagattcagagagaccgcaccgaaagcaactggagggacttctaggagccagttcaaatagaaccagtgccgttggctctctaaatgctgtggtgaaaggaaaacaacccctgatcagagcatttccgtttctgagcatcgttgaagatagttggcattgggcccccggaggacctcgaggggctgcagaggttcctttgcttcagagcccctctgtacctattcatcaacgtggaccctggaggaccgttactgcctgctagtagcagctcgttattttgagctcatcttttgtgctgctcgtcagctcgtgttcaaaccaagcctactgctcatttgctttccctgcagcagcagcagcccctactgttgcatcgaagaaagcaatctcattagcgactgcgttgaactgtagttaagatacttcttgtccatatccttgaggcatgattcgaacggcgtcattgtctcattgacttgtctttatcattcctgaaagataaaagtgaacattgaaatcaaagaaaaaaaaacagtttgtacggtaaagtttgagtttaaaattcattttcaaggtaggcaactggacacactctgagctatccaaaggagggataaaacataaaatat

SEQ ID NO: 31790 - DNA, 3123 bp, Zea Mays
ctccctcccttcatccaatcgggatttctgcttcccgcgctctcctcgcctcctccttcctagaaaacccacaaaaatcatctcgccattcctctccttcgtagaaaactcacaaaaatccctccaggttccagggggcgaggggagagagagagagagagagagagagagagttgagtgcgagagaggcgagggggcggcggcggcggcggcgacaatggggatccaggggctgctgccgcagttgaagtcaatcatggcgcccattagcgcggtggagctgcggggccagacggtggctgttgacacctattcctggctccacaagggcgctctatcctgcggcgaccgcctctgcaagggcatccccaccaccaggcatattgaatattgcatgcatcgggttaacatgttgcggcattttggtgtcagaccaattcttgtatttgatggaggccttctgccaataaagagctatcaagaggggaagcgagcaaggtcaagaaaggaaaaccttgagcgtgccagggaacatgaggctgctgggaactcacgtgctgcttttgagtgctatcagaaggctgttgacattacacctagaattgcttctgaactgattgaggtactgaagaaagaaaatgttaattatattgttgcaccttatgaagcagatgcgcaaatgacattcttatctgttaataaacttgttgatgctgtgatcactgaggattcagatttgataccatttggttgttctagaattattttcaaaatggacaaatttgggcaaggtgttgaatttcagattacacgcctagagcaaaacagagagcttgactttaatggattcacaagacagatgttacttgagatgtgtattttaagtggctgtgactatctcccctcattgccaggaatgggcgttaaacgagctcatgcactcatccaaaagctgaagtgtcacgaaaaggtgatcaagcacctgaggtatggtgctgtttctgttccacctcaatatgaagaggacttcaagaaagcaatctgggcatttaagttccaaagggtctacgatcctgctacagaagatattattcatttgtcaagtgtgcctcaaagcctcattgaagatttggaatttttaggcccatggttaccacagaatattgccaaaggcattgctctagggaacattgatccactcacgaaggaaccattcgagatcaatccagagtgcagtgcaccttctgttcataaggtttgtccaaccagagagcctattgcaccttcaaatgggaggaagaaactagatttgcctgtgcagaaaaatatattgaccaactatttctgcttagcatcccttgaggcaaaacggaaattcagggcgcctaaagtaacacataagcaacaaatattgaatgaagctttgcctagccctcaagctcaaggctctgctacctctgattcagttgaagatactaggttgccaacagatcgcattcaagcttctcaatgtagttctgagcatttaagctctgaacctcctcaaaatgacccaatcagtgttggctctcagtgtagttctgagcgtttcagctgtgagtaccccctcgatgattcagccaacatttcacaatgtagttcacttgatggtggtagtgatcctccttacaaggatactggcaataaagacagaaaggttgaggctggctacgacaacaaaaatagaatacctacaagtccttgcataatgggaaatttaccctggacatcagagccatttttagttccccataacgtgggaccatctataccagttcaacattatactgaaagcactgtggcctctaataataatggcattaccgtaagttcatacttcaaaacagcaaacaagagaatttgcacagatcaaggagaccagttagatgatgactatgatgttagtactggtaatctttgtggagatcaactgaggaaatctggcatgttgaagagaagaaagctttctggcatccaaaagtttgaagatccgattcattctgacgatagtccaccattcgttgatgaagaaacttctgcaggtcaagatacagatgatcctgacgatacaaatataagaactgaaggaagatttggatgcaatgtttcccatgtgaatacatacagtggaattgcagaaaaatcaatggataagtttgctgcattgatatcatctttcagataccccggcccccgtgccagtggccttcgtgctcctttaaaggatgtgaaaaacacactttctgtgagatctattcttaaagctccagaaaaagacacattcagacgcacagcaaagaaaacaggtctaggccccccttcaaaaagcagatatacaagtgatgataagggaagtgctgccagcccccctgatattagcgcatttgcttataggcctatgaaaactgttgcttctgaccaaggcaaaaccacagtcggacgtttgaatgggagcagattcagagagaccgcaccgaaagcaactggagggacttctaggagccagttcaaatagaaccagtgccgttggctctctaaatgctgtggtgaaaggaaaacaacccctgatcagagcatttccgtttctgagcatcgttgaagatagttggcattgggcccccggaggacctcgaggggctgcagaggttcctttgcttcagagcccctctgtacctattcatcaacgtggaccctggaggaccgttactgcctgctagtagcagctcgttattttgagctcatcttttgtgctgctcgtcagctcgtgttcaaaccaagcctactgctcatttgctttccctgcagcagcagcagcccctactgttgcatcgaagaaagcaatctcattagcgactgcgttgaactgtagttaagatacttcttgtccatatccttgaggcatgattcgaacggcgtcattgtctcattgacttgtctttatcattcctgaaagataaaagtgaacattgaaatcaaagaaaaaaaaacagtttgtacggtaaagtttgagtttaaaattcattttcaaggtaggcaactggacacactctgagctatccaaaggagggataaaacataaaatat

SEQ ID NO: 31791 - DNA, 3125 bp, Zea Mays
ctcccttcatccaatcgggatttctgcttcccgcgctctcctcgcctcctccttcctagaaaacccacaaaaatcatctcgccattcctctccttcgtagaaaactcacaaaaatccctccaggttccagggggcgaggggagagagagagagagagagagagagagagttgagtgcgagagaggcgagggggcggcggcggcggcggcgacaatggggatccaggggctgctgccgcagttgaagtcaatcatggcgcccattagcgcggtggagctgcggggccagacggtggctgttgacacctattcctggctccacaagggcgctctatcctgcggcgaccgcctctgcaagggcatccccaccaccaggcatattgaatattgcatgcatcgggttaacatgttgcggcattttggtgtcagaccaattcttgtatttgatggaggccttctgccaataaagagctatcaagaggggaagcgagcaaggtcaagaaaggaaaaccttgagcgtgccagggaacatgaggctgctgggaactcacgtgctgcttttgagtgctatcagaaggctgttgacattacacctagaattgcttctgaactgattgaggtactgaagaaagaaaatgttaattatattgttgcaccttatgaagcagatgcgcaaatgacattcttatctgttaataaacttgttgatgctgtgatcactgaggattcagatttgataccatttggttgttctagaattattttcaaaatggacaaatttgggcaaggtgttgaatttcagattacacgcctagagcaaaacagagagcttgactttaatggattcacaagacagatgttacttgagatgtgtattttaagtggctgtgactatctcccctcattgccaggaatgggcgttaaacgagctcatgcactcatccaaaagctgaagtgtcacgaaaaggtgatcaagcacctgaggtatggtgctgtttctgttccacctcaatatgaagaggacttcaagaaagcaatctgggcatttaagttccaaagggtctacgatcctgctacagaagatattattcatttgtcaagtgtgcctcaaagcctcattgaagatttggaatttttaggcccatggttaccacagaatattgccaaaggcattgctctagggaacattgatccactcacgaaggaaccattcgagatcaatccagagtgcagtgcaccttctgttcataaggtttgtccaaccagagagcctattgcaccttcaaatgggaggaagaaactagatttgcctgtgcagaaaaatatattgaccaactatttctgcttagcatcccttgaggcaaaacggaaattcagggcgcctaaagtaacacataagcaacaaatattgaatgaagctttgcctagccctcaagctcaaggctctgctacctctgattcagttgaagatactaggttgccaacagatcgcattcaagcttctcaatgtagttctgagcatttaagctctgaacctcctcaaaatgacccaatcagtgttggctctcagtgtagttctgagcgtttcagctgtgagtaccccctcgatgattcagccaacatttcacaatgtagttcacttgatggtggtagtgatcctccttacaaggatactggcaataaagacagaaaggttgaggctggctacgacaacaaaaatagaatacctacaagtccttgcataatgggaaatttaccctggacatcagagccatttttagttccccataacgtgggaccatctataccagttcaacattatactgaaagcactgtggcctctaataataatggcattaccgtaagttcatacttcaaaacagcaaacaagagaatttgcacagatcaaggagaccagttagatgatgactatgatgttagtactggtaatctttgtggagatcaactgaggaaatctggcatgttgaagagaagaaagctttctggcatccaaaagtttgaagatgaaactttacagccgattcattctgacgatagtccaccattcgttgatgaaggtcaagatacagatgatcctgacgatacaaatataagaactgaaggaagatttggatgcaatgtttcccatgtgaatacatacagtggaattgcagaaaaatcaatggataagtttgctgcattgatatcatctttcagataccccggcccccgtgccagtggccttcgtgctcctttaaaggatgtgaaaaacacactttctgtgagatctattcttaaagctccagaaaaagacacattcagacgcacagcaaagaaaacaggtctaggccccccttcaaaaagcagatatacaagtgatgataagggaagtgctgccagcccccctgatattagcgcatttgcttataggcctatgaaaactgttgcttctgaccaaggcaaaaccacagctgcagtcggacgtttgaatgggagcagattcagagagaccgcaccgaaagcaactggagggacttctaggagccagttcaaatagaaccagtgccgttggctctctaaatgctgtggtgaaaggaaaacaacccctgatcagagcatttccgtttctgagcatcgttgaagatagttggcattgggcccccggaggacctcgaggggctgcagaggttcctttgcttcagagcccctctgtacctattcatcaacgtggaccctggaggaccgttactgcctgctagtagcagctcgttattttgagctcatcttttgtgctgctcgtcagctcgtgttcaaaccaagcctactgctcatttgctttccctgcagcagcagcagcccctactgttgcatcgaagaaagcaatctcattagcgactgcgttgaactgtagttaagatacttcttgtccatatccttgaggcatgattcgaacggcgtcattgtctcattgacttgtctttatcattcctgaaagataaaagtgaacattgaaatcaaagaaaaaaaaacagtttgtacggtaaagtttgagtttaaaattcattttcaaggtaggcaactggacacactctgagctatccaaaggagggataaaacataaaatat

SEQ ID NO: 31792 - DNA, 2931 bp, Zea Mays
gtgctttgcttaaagttcttcaagattttgcctgtttatgaggcatattgaatattgcatgcatcgggttaacatgttgcggcattttggtgtcagaccaattcttgtatttgatggaggccttctgccaataaagagctatcaagaggggaagcgagcaaggtcaagaaaggaaaaccttgagcgtgccagggaacatgaggctgctgggaactcacgtgctgcttttgagtgctatcagaaggctgttgacattacacctagaattgcttctgaactgattgaggtactgaagaaagaaaatgttaattatattgttgcaccttatgaagcagatgcgcaaatgacattcttatctgttaataaacttgttgatgctgtgatcactgaggattcagatttgataccatttggttgttctagaattattttcaaaatggacaaatttgggcaaggtgttgaatttcagattacacgcctagagcaaaacagagagcttgactttaatggattcacaagacagatgttacttgagatgtgtattttaagtggctgtgactatctcccctcattgccaggaatgggcgttaaacgagctcatgcactcatccaaaagctgaagtgtcacgaaaaggtgatcaagcacctgaggtatggtgctgtttctgttccacctcaatatgaagaggacttcaagaaagcaatctgggcatttaagttccaaagggtctacgatcctgctacagaagatattattcatttgtcaagtgtgcctcaaagcctcattgaagatttggaatttttaggcccatggttaccacagaatattgccaaaggcattgctctagggaacattgatccactcacgaaggaaccattcgagatcaatccagagtgcagtgcaccttctgttcataaggtttgtccaaccagagagcctattgcaccttcaaatgggaggaagaaactagatttgcctgtgcagaaaaatatattgaccaactatttctgcttagcatcccttgaggcaaaacggaaattcagggcgcctaaagtaacacataagcaacaaatattgaatgaagctttgcctagccctcaagctcaaggctctgctacctctgattcagttgaagatactaggttgccaacagatcgcattcaagcttctcaatgtagttctgagcatttaagctctgaacctcctcaaaatgacccaatcagtgttggctctcagtgtagttctgagcgtttcagctgtgagtaccccctcgatgattcagccaacatttcacaatgtagttcacttgatggtggtagtgatcctccttacaaggatactggcaataaagacagaaaggttgaggctggctacgacaacaaaaatagaatacctacaagtccttgcataatgggaaatttaccctggacatcagagccatttttagttccccataacgtgggaccatctataccagttcaacattatactgaaagcactgtggcctctaataataatggcattaccgtaagttcatacttcaaaacagcaaacaagagaatttgcacagatcaaggagaccagttagatgatgactatgatgttagtactggtaatctttgtggagatcaactgaggaaatctggcatgttgaagagaagaaagctttctggcatccaaaagtttgaagatgaaactttacagccgattcattctgacgatagtccaccattcgttgatgaaggtcaagatacagatgatcctgacgatacaaatataagaactgaaggaagatttggatgcaatgtttcccatgtgaatacatacagtggaattgcagaaaaatcaatggataagtttgctgcattgatatcatctttcagataccccggcccccgtgccagtggccttcgtgctcctttaaaggatgtgaaaaacacactttctgtgagatctattcttaaagctccagaaaaagacacattcagacgcacagcaaagaaaacaggtctaggccccccttcaaaaagcagatatacaagtgatgataagggaagtgctgccagcccccctgatattagcgcatttgcttataggcctatgaaaactgttgcttctgaccaaggcaaaaccacaggtaaaactacagacactattgatggccctcctgatctgggcttgcttgcatacacatctactgtctgctgtcccgagcggagcaaacatgcaggcaaccctcctgatctaagcacatttgcatataaacctgtgaaagctgcagtcggacgtttgaatgggagcagattcagagagaccgcaccgaaagcaactggagggacttctaggagccagttcaaatagaaccagtgccgttggctctctaaatgctgtggtgaaaggaaaacaacccctgatcagagcatttccgtttctgagcatcgttgaagatagttggcattgggcccccggaggacctcgaggggctgcagaggttcctttgcttcagagcccctctgtacctattcatcaacgtggaccctggaggaccgttactgcctgctagtagcagctcgttattttgagctcatcttttgtgctgctcgtcagctcgtgttcaaaccaagcctactgctcatttgctttccctgcagcagcagcagcccctactgttgcatcgaagaaagcaatctcattagcgactgcgttgaactgtagttaagatacttcttgtccatatccttgaggcatgattcgaacggcgtcattgtctcattgacttgtctttatcattcctgaaagataaaagtgaacattgaaatcaaagaaaaaaaaacagtttgtacggtaaagtttgagtttaaaattcattttcaaggtaggcaactggacacactctgagctatccaaaggagggataaaacataaaatat

SEQ ID NO: 31793 - DNA, 2125 bp, Zea Mays
gccgtctccaatccctatagatttgtctaaaaactaaccccctgctccgttttatatcagtctctctcgccgtcccccgtctatgcattcgtgttcaaaccaagaaccaatcggacctccgtaccaaattatttcttggcacctcagatcagcatattccatctccaatcccccgccgcgttcccccgcacgctttgacccataaagtcgatccatctccgagcaccaagttgaacacgcgatcccattcccattctcttgctcaatacaacctccggctccagcaagccgcagcgccaagcctagaagcggagcgcggaacacacgaggccaggaagaggaggtgctgccgtccccgcgccgccgctgtgggagtgcggggaatggggcggcacggcgtggaccagatcggcgctgtggcagcgttcgtctgggtcaccctccttcccttgctgcttgtgtgcgtcgtgtggccgggcgcccaggccggccatacaagcgagtaccggcgccaactcggctccgccatcgacatgccactcgacgccgatgtcttccgccctcccccgggctacaatgcgcccgagcaggttcacatcacacaaggcaatcatgatggcacagccatgataatctcatgggtgacaacaagtgagcctggctcgagtactgtgatctacgggacttcagaggataacctcaactatactgcaaatgggaagcatactcagtatactttctacaactacacctcaggatacattcatcattgcacaataaaaaagttggagtttgacacaaagtattactatgctgttgggattggacaaacggtgaggaagttttggtttttgacccctccaaaaagcggcccagatgttccatatacactcggtctcataggtgatcttggtcagagctttgattccaatgttacgctcacccattatgagtccaatgcaaaagcacaagcagttctttttgttggggacttgtcatatgcagataactacccatatcatgataatgtgagatgggatacttgggcaagatttgtagaaaggagcgttgcgtaccagccttggatctggactgctggaaatcatgagatagatttcgctcctgaacttggtgaaacaaagccattcaagccattcagccataggtatcccacaccctacaaggcttctggtagcacggcaccttattggtattccatcaaaagggcctctgcctacattattgtcttggcatcgtactcagcatacggaaaatacactcctcagtacaagtggcttgaagctgaatttcccaaggtcaacaggagcgaaacgccatggttggttgtcctcatgcatgctccatggtacaatagctataactatcactacatggaaggtgaaaccatgagggtgatgtatgagccatggttcgtgaagtacaaagttgacgttgtgtttgcaggacatgtccacgcctacgaacgcacagatatcgaatgtcgcatacaatgttgtgaatggcctgtgcactccaatccctgatcaatcggccccagtttacatcaccatcggtgatggagggaaccaggaaggattggctaccaacatgtcgcagccgcagccgagctactcggccttcagggaggcgagcttcgggcacgccatcctggacatcaagaaccggacacacgcgtactacacgtggcaccgcaaccaggacgggagcgcggtggccgccgactccatgtggtttaccaatcggtactgggaaccgacggacgattcggccgacgatttccaatgaggacgagagctgcagctgggttggttattcgttgcggttcctcacgaccaataagcatcgccctgaatacacgaagccacccaagctccgatgcaggcctctgcacttcttaggctgagtccagggcacagcctctctctcgcccctgctgctccagtgcacaggctgtagcagactacaacttcaggctatagtcacgtcagcttttctatttcagaattaagtaatttacgcggatttatttcaacgctcagaaaacacacaacataatattttttattgaattaaaaaatacaaagtacataataattaaaataaa

SEQ ID NO: 31794 - DNA, 2051 bp, Zea Mays
agatttgtctaaaaactaaccccctgctccgttttatatcagtctctctcgccgtcccccgtctatgcattcgtgttcaaaccaagaaccaatcggacctccgtaccaaattatttcttggcacctcagatcagcatattccatctccaatcccccgccgcgttcccccgcacgctttgacccataaagtcgatccatctccgagcaccaagttgaacacgcgatcccattcccattctcttgctcaatacaacctccggctccagcaagccgcagcgccaagcctagaagcggagcgcggaacacacgaggccaggaagaggaggtgctgccgtccccgcgccgccgctgtgggagtgcggggaatggggcggcacggcgtggaccagatcggcgctgtggcagcgttcgtctgggtcaccctccttcccttgctgcttgtgtgcgtcgtgtggccgggcgcccaggccggccatacaagcgagtaccggcgccaactcggctccgccatcgacatgccactcgacgccgatgtcttccgccctcccccgggctacaatgcgcccgagcaggttcacatcacacaaggcaatcatgatggcacagccatgataatctcatgggtgacaacaagtgagcctggctcgagtactgtgatctacgggacttcagaggataacctcaactatactgcaaatgggaagcatactcatttgacacaaagtattactatgctgttgggattggacaaacggtgaggaagttttggtttttgacccctccaaaaagcggcccagatgttccatatacactcggtctcataggtgatcttggtcagagctttgattccaatgttacgctcacccattatgagtccaatgcaaaagcacaagcagttctttttgttggggacttgtcatatgcagataactacccatatcatgataatgtgagatgggatacttgggcaagatttgtagaaaggagcgttgcgtaccagccttggatctggactgctggaaatcatgagatagatttcgctcctgaacttggtgaaacaaagccattcaagccattcagccataggtatcccacaccctacaaggcttctggtagcacggcaccttattggtattccatcaaaagggcctctgcctacattattgtcttggcatcgtactcagcatacggaaaatacactcctcagtacaagtggcttgaagctgaatttcccaaggtcaacaggagcgaaacgccatggttggttgtcctcatgcatgctccatggtacaatagctataactatcactacatggaaggtgaaaccatgagggtgatgtatgagccatggttcgtgaagtacaaagttgacgttgtgtttgcaggacatgtccacgcctacgaacgcacacacaggatatcgaatgtcgcatacaatgttgtgaatggcctgtgcactccaatccctgatcaatcggccccagtttacatcaccatcggtgatggagggaaccaggaaggattggctaccaacatgtcgcagccgcagccgagctactcggccttcagggaggcgagcttcgggcacgccatcctggacatcaagaaccggacacacgcgtactacacgtggcaccgcaaccaggacgggagcgcggtggccgccgactccatgtggtttaccaatcggtactgggaaccgacggacgattcggccgacgatttccaatgaggacgagagctgcagctgggttggttattcgttgcggttcctcacgaccaataagcatcgccctgaatacacgaagccacccaagctccgatgcaggcctctgcacttcttaggctgagtccagggcacagcctctctctcgcccctgctgctccagtgcacaggctgtagcagactacaacttcaggctatagtcacgtcagcttttctatttcagaattaagtaatttacgcggatttatttcaacgctcagaaaacacacaacataatattttttattgaattaaaaaatacaaagtacataataattaaaataaa

SEQ ID NO: 31795 - DNA, 1660 bp, Zea Mays
gccagcagacccctgtacgacgcccgaagtggccgattccctgagatcccaagcacccgcccggcctcgtccctgatctccccggggcgcgcgcgggcgacacgccacgcggccggcgagacggaggagatggctgccgccgactcggccacggcctcttcctcctcccccccggagtgtcccgctgccccttccattccgacggaccctgacttcctcagctgcgtcctgcagccaccgacctcctcctcgtcccgcctccttctccgccgcaagcccccctccgcccttcagcaccgaatggagtggcggtgcaatgacaacggctatgtcgcctaccgcaactttctcctccggcgcatcgacggcggcagcgcccagagcacgcccagcaacagtggaaggtgggctccctctccggtacatgctatactctccgaggcagacagctggaattatatgcgggacttgagaagtaacagcggagtgttaaaccaggccataagtattggctcaaagcagagcgatactgagcggcatgtcagatttgccgagcctgcatactcatttgttggagtgcactgcatctttgacaactgcaaagcctcagttactatactgaaatttggccgtgcaaattctgatctgcttgcatatggtgcggcagatggcagcttgatggtctgccaggtttctgagccaccatctgttcttcaaaaaatgatagggcattctaaaaatatcacagattttgatttttcatctaataaccagtacatagcttcatgctctctggataaaactgtgcgagtatgggaaatctctaaaggcacatgcatcagggtcgtgtatggagtttcttcccagctatgtatctgttttcatcctgtgaacaataatttgcttttagttggtaatgcaaacaaggaaatcaatgcaataaattttagcactgggagagtaatcagcaaacttaactttgatgacgcggttacagctttggatattgatcacaccgggcagtttattttcgctggtgatgcacagggtcattatctagaactcacaagaacaaaagtagtaagagcaaatctcctattacaaccatccagtatcggaccttctctctgatggcacgctgtccagtacttctttcttgtgctcaagatggaaacctttcttttttcagcatcacgacagatgctaagggatacttgactcttatatgctccctaaaattggcctcacgggtgcagactatccgtgcttcgttctgtccacttctttcccttgagaaaggagagttcatagtaactggaagcgaggacgcaaatgtttacttctatgatttggcacgcccaaagaattcgtgtgtgaacaaactacagggacatggttctccagtaatcggagttgcctggaatcacggggagaattttctggcctcatctgattcagatggcacagttatcgtatggaagcgatcgaaaacgagttagagcgattccatgccatgaaggatgtttttatagagcaaaaggaactctggtacgtactgattctctactgctaatctgctatgacaaatagtcacaacgtgtacacgaagaatgcaaatgcagacggcccgattacctccacgatgcgcacgccgtagtcg

SEQ ID NO: 31796 - DNA, 1950 bp, Zea Mays
gccagcagacccctgtacgacgcccgaagtggccgattccctgagatcccaagcacccgcccggcctcgtccctgatctccccggggcgcgcgcgggcgacacgccacgcggccggcgagacggaggagatggctgccgccgactcggccacggcctcttcctcctcccccccggagtgtcccgctgccccttccattccgacggaccctgacttcctcagctgcgtcctgcagccaccgacctcctcctcgtcccgcctccttctccgccgcaagcccccctccgcccttcagcaccgaatggcgttcctggggcaggagtggcggtgcaatgacaacggctatgtcgcctaccgcaactttctcctccggcgcatcgacggcggcagcgcccagagcacgcccagcaacagtggaaggtgggctccctctccggtacatgctatactctccgaggcagacagctggaattatatgcgggacttgagaagtaacagcggagtgttaaaccaggccataagtattggctcaaagcagagcgatactgagcggcatgtcagatttgccgagcctgcatactcatttgttggagtgcactgcatctttgacaactgcaaagcctcagttactatactgaaatttggccgtgcaaattctgatctgcttgcatatggtgcggcagatggcagcttgatggtctgccaggtttctgagccaccatctgttcttcaaaaaatgatagggcattctaaaaatatcacagtacatagcttcatgctctctggataaaactgtgcgagtatgggaaatctctaaaggcacatgcatcagggtcgtgtatggagtttcttcccagctatgtatctgttttcatcctgtgaacaataatttgcttttagttggtaatgcaaacaaggaaatcaatgcaataaattttagcactgggagagtaatcagcaaacttaactttgatgacgcggttacagctttggatattgatcacaccgggcagtttattttcgctggtgatgcacagggttacatatatactgttagtgtgaactcacatacagggtcattatctagaactcacaagaacaaaagtagtaagagcaaatctcctattacaaccatccagtatcggaccttctctctgatggcacgctgtccagtacttctttcttgtgctcaagatggaaacctttcttttttcagcatcacgacagatgctaagggatacttgactcttatatgctccctaaaattggcctcacgggtgcagactatccgtgcttcgttctgtccacttctttcccttgagaaaggagagttcatagtaactggaagcgaggacgcaaatgtttacttctatgatttggcacgcccaaagaattcgtgtgtgaacaaactacagggacatggttctccagtaatcggagttgcctggaatcacggggagaattttctggcctcatctgattcagatggcacagttatcgtatggaagcgatcgaaaacgagttagagcgattccatgccatgaaggatgtttttatagagcaaaaggtagatgttgtttgatgattccaacaaaggctttttttttgttgtacattggacctccatgggcattgtttgtaacataactacacaaggcatgggcaaagatcaaccggccttgattgtatttacggtagtataggtctccgtgtatgtagagtgtaaagcatttgtggcgatatatcctgtgtcattcgttttaggattgtatctttgtttcattcatgatttttgccctccaaatatgctgaacttggacatgattaacaggaactctggtacgtactgattctctactgctaatctgctatgacaaatagtcacaacgtgtacacgaagaatgcaaatgcagacggcccgattacctccacgatgcgcacgccgtagtcg

SEQ ID NO: 31797 - DNA, 2289 bp, Zea Mays
gccagcagacccctgtacgacgcccgaagtggccgattccctgagatcccaagcacccgcccggcctcgtccctgatctccccggggcgcgcgcgggcgacacgccacgcggccggcgagacggaggagatggctgccgccgactcggccacggcctcttcctcctcccccccggagtgtcccgctgccccttccattccgacggaccctgacttcctcagctgcgtcctgcagccaccgacctcctcctcgtcccgcctccttctccgccgcaagcccccctccgcccttcagcaccgaatggtatgtaggcgtaccccccgcttcttagatccccctcgttcatattgcatttagctttggggaatggatgaatccgactcattggtgttcgtgggaggcgttcctggggcaggagtggcggtgcaatgacaacggctatgtcgcctaccgcaactttctcctccggcgcatcgacggcggcagcgcccagagcacgcccagcaacagtggaaggtgggctccctctccggtacatgctatactctccgaggcagacagctggaattatatgcgggacttgagaagtaacagcggagtgttaaaccaggccataagtattggctcaaagcagagcgatactgagcggcatgtcagatttgccgagcctgcatactcatttgttggagtgcactgcatctttgacaactgcaaagcctcagttactatactgaaatttggccgtgcaaattctgatctgcttgcatatggtgcggcagatggcagcttgatggtctgccaggtttctgagccaccatctgttcttcaaaaaatgatagggcattctaaaaatatcacagattttgatttttcatctaataaccagtacatagcttcatgctctctggataaaactgtgcgagtatgggaaatctctaaaggcacatgcatcagggtcgtgtatggagtttcttcccagctatgtatctgttttcatcctgtgaacaataatttgcttttagttggtaatgcaaacaaggaaatcaatgtaaacttcttcgccctttgttcctttattccaaaaaattatatactgttattctgtctaatctgttgcttgtgcctcttatctaatatccttgagtcaataacagaggaaaacaaattatctgtcttttgctatttcttttgttattgatgatgtacgccactgtaattggttaacaaaaatcatgtaaaattgtgaccagcactttttccttgaccccatttgtttttctcactttgtgatccatttatctctgtaaactaggcaataaattttagcactgggagagtaatcagcaaacttaactttgatgacgcggttacagctttggatattgatcacaccgggcagtttattttcgctggtgatgcacagggtcattatctagaactcacaagaacaaaagtagtaagagcaaatctcctattacaaccatccagtatcggaccttctctctgatggcacgctgtccagtacttctttcttgtgctcaagatggaaacctttcttttttcagatgctaagggatacttgactcttatatgctccctaaaattggcctcacgggtgcagactatccgtgcttcgttctgtccacttctttcccttgagaaaggagagttcatagtaactggaagcgaggacgcaaatgtttacttctatgatttggcacgcccaaagaattcgtgtgtgaacaaactacagggacatggttctccagtaatcggagttgcctggaatcacggggagaattttctggcctcatctgattcagatggcacagttatcgtatggaagcgatcgaaaacgagttagagcgattccatgccatgaaggatgtttttatagagcaaaaggtagatgttgtttgatgattccaacaaaggctttttttttgttgtacattggacctccatgggcattgtttgtaacataactacacaaggcatgggcaaagatcaaccggccttgattgtatttacggtagtataggtctccgtgtatgtagagtgtaaagcatttgtggcgatatatcctgtgtcattcgttttaggattgtatctttgtttcattcatgatttttgccctccaaatatgctgaacttggacatgattaacaggaactctggtacgtactgattctctactgctaatctgctatgacaaatagtcacaacgtgtacacgaagaatgcaaatgcagacggcccgattacctccacgatgcgcacgccgtagtcg

SEQ ID NO: 31798 - DNA, 2053 bp, Zea Mays
gccagcagacccctgtacgacgcccgaagtggccgattccctgagatcccaagcacccgcccggcctcgtccctgatctccccggggcgcgcgcgggcgacacgccacgcggccggcgagacggaggagatggctgccgccgactcggccacggcctcttcctcctcccccccggagtgtcccgctgccccttccattccgacggaccctgacttcctcagctgcgtcctgcagccaccgacctcctcctcgtcccgcctccttctccgccgcaagcccccctccgcccttcagcaccgaatggtatgtaggcgtaccccccgcttcttagatccccctcgttcatattgcatttagctttggggaatggatgaatccgactcattggtgttcgtgggaggcgttcctggggcaggagtggcggtgcaatgacaacggctatgtcgcctaccgcaactttctcctccggcgcatcgacggcggcagcgcccagagcacgcccagcaacagtggaaggtgggctccctctccggtacatgctatactctccgaggcagacagctggaattatatgcgggacttgagaagtaacagcggagtgttaaaccaggccataagtattggctcaaagcagagcgatactgagcggcatgtcagatttgccgagcctgcatactcatttgttggagtgcactgcatctttgacaactgcaaagcctcagttactatactgaaatttggccgtgcaaattctgatctgcttgcatatggtgcggcagatggcagcttgatggtctgccaggtttctgagccaccatctgttcttcaaaaaatgatagggcattctaaaaatatcacagattttgatttttcatctaataaccagtacatagcttcatgctctctggataaaactgtgcgagtatgggaaatctctaaaggcacatgcatcagggtcgtgtatggagtttcttcccagctatgtatctgttttcatcctgtgaacaataatttgcttttagttggtaatgcaaacaaggaaatcaatgcaataaattttagcactgggagagtaatcagcaaacttaactttgatgacgcggttacagctttggatattgatcacaccgggcagtttattttcgctggtgatgcacagtgtgaactcacatacagggtcattatctagaactcacaagaacaaaagtagtaagagcaaatctcctattacaaccatccagtatcggaccttctctctgatggcacgctgtccagtacttctttcttgtgctcaagatggaaacctttcttttttcagcatcacgacagatgctaagggatacttgactcttatatgctccctaaaattggcctcacgggtgcagactatccgtgcttcgttctgtccacttctttcccttgagaaaggagagttcatagtaactggaagcgaggacgcaaatgtttacttctatgatttggcacgcccaaagaattcgtgtgtgaacaaactacagggacatggttctccagtaatcggagttgcctggaatcacggggagaattttctggcctcatctgattcagatggcacagttatcgtatggaagcgatcgaaaacgagttagagcgattccatgccatgaaggatgtttttatagagcaaaaggtagatgttgtttgatgattccaacaaaggctttttttttgttgtacattggacctccatgggcattgtttgtaacataactacacaaggcatgggcaaagatcaaccggccttgattgtatttacggtagtataggtctccgtgtatgtagagtgtaaagcatttgtggcgatatatcctgtgtcattcgttttaggattgtatctttgtttcattcatgatttttgccctccaaatatgctgaacttggacatgattaacaggaactctggtacgtactgattctctactgctaatctgctatgacaaatagtcacaacgtgtacacgaagaatgcaaatgcagacggcccgattacctccacgatgcgcacgccgtagtcg

SEQ ID NO: 31799 - DNA, 1783 bp, Zea Mays
gccagcagacccctgtacgacgcccgaagtggccgattccctgagatcccaagcacccgcccggcctcgtccctgatctccccggggcgcgcgcgggcgacacgccacgcggccggcgagacggaggagatggctgccgccgactcggccacggcctcttcctcctcccccccggagtgtcccgctgccccttccattccgacggaccctgacttcctcagctgcgtcctgcagccaccgacctcctcctcgtcccgcctccttctccgccgcaagcccccctccgcccttcagcaccgaatggagtggcggtgcaatgacaacggctatgtcgcctaccgcaactttctcctccggcgcatcgacggcggcagcgcccagagcacgcccagcaacagtggaaggtgggctccctctccggtacatgctatactctccgaggcagacagctggaattatatgcgggacttgagaagtaacagcggagtgttaaaccaggccataagtattggctcaaagcagagcgatactgagcggcatgtcagatttgccgagcctgcatactcatttgttggagtgcactgcatctttgacaactgcaaagcctcagttactatactgaaatttggccgtgcaaattctgatctgcttgcatatggtgcggcagatggcagcttgatggtctgccaggtttctgagccaccatctgttcttcaaaaaatgatagggcattctaaaaatatcacagtacatagcttcatgctctctggataaaactgtgcgagtatgggaaatctctaaaggcacatgcatcagggtcgtgtatggagtttcttcccagctatgtatctgttttcatcctgtgaacaataatttgcttttagttggtaatgcaaacaaggaaatcaatgtaaacttcttcgccctttgttcctttattccaaaaaattatatactgttattctgtctaatctgttgcttgtgcctcttatctaatatccttgagtcaataacagaggaaaacaaattatctgtcttttgctatttcttttgttattgatgatgtacgccactgtaattggttaacaaaaatcatgtaaaattgtgaccagcactttttccttgaccccatttgtttttctcactttgtgatccatttatctctgtaaactaggcaataaattttagcactgggagagtaatcagcaaacttaactttgatgacgcggttacagctttggatattgatcacaccgggcagtttattttcgctggtgatgcacagggttacatatatactgttagtgtgaactcacatacagggtcattatctagaactcacaagaacaaaagtagtaagagcaaatctcctattacaaccatccagtatcggaccttctctctgatggcacgctgtccagtacttctttcttgtgctcaagatggaaacctttcttttttcagcatcacgacagatgctaagggatacttgactcttatatgctccctaaaattggcctcacgggtgcagactatccgtgcttcgttctgtccacttctttcccttgagaaaggagagttcatagtaactggaagcgaggacgcaaatgtttacttctatgatttggcacgcccaaagaattcgtgtgtgaacaaactacaggaactctggtacgtactgattctctactgctaatctgctatgacaaatagtcacaacgtgtacacgaagaatgcaaatgcagacggcccgattacctccacgatgcgcacgccgtagtcg

SEQ ID NO: 31800 - DNA, 1935 bp, Zea Mays
gccagcagacccctgtacgacgcccgaagtggccgattccctgagatcccaagcacccgcccggcctcgtccctgatctccccggggcgcgcgcgggcgacacgccacgcggccggcgagacggaggagatggctgccgccgactcggccacggcctcttcctcctcccccccggagtgtcccgctgccccttccattccgacggaccctgacttcctcagctgcgtcctgcagccaccgacctcctcctcgtcccgcctccttctccgccgcaagcccccctccgcccttcagcaccgaatggagtggcggtgcaatgacaacggctatgtcgcctaccgcaactttctcctccggcgcatcgacggcggcagcgcccagagcacgcccagcaacagtggaaggtgggctccctctccggtacatgctatactctccgaggcagacagctggaattatatgcgggacttgagaagtaacagcggagtgttaaaccaggccataagtattggctcaaagcagagcgatactgagcggcatgtcagatttgccgagcctgcatactcatttgttggagtgcactgcatctttgacaactgcaaagcctcagttactatactgaaatttggccgtgcaaattctgatctgcttgcatatggtgcggcagatggcagcttgatggtctgccaggtttctgagccaccatctgttcttcaaaaaatgatagggcattctaaaaatatcacagtacatagcttcatgctctctggataaaactgtgcgagtatgggaaatctctaaaggcacatgcatcagggtcgtgtatggagtttcttcccagctatgtatctgttttcatcctgtgaacaataatttgcttttagttggtaatgcaaacaaggaaatcaatgcaataaattttagcactgggagagtaatcagcaaacttaactttgatgacgcggttacagctttggatattgatcacaccgggcagtttattttcgctggtgatgcacagggttacatatatactgttagtgtgaactcacatacagggtcattatctagaactcacaagaacaaaagtagtaagagcaaatctcctattacaaccatccagtatcggaccttctctctgatggcacgctgtccagtacttctttcttgtgctcaagatggaaacctttcttttttcagcatcacgacagatgctaagggatacttgactcttatatgctccctaaaattggcctcacgggtgcagactatccgtgcttcgttctgtccacttctttcccttgagaaaggagagttcatagtaactggaagcgaggacgcaaatgtttacttctatgatttggcacgcccaaagaattcgtgtgtgaacaaactacagggacatggttctccagtaatcggagttgcctggaatcacggggagaattttctggcctcatctgattcagatggcacagttatcgtatggaagcgatcgaaaacgagttagagcgattccatgccatgaaggatgtttttatagagcaaaaggtagatgttgtttgatgattccaacaaaggctttttttttgttgtacattggacctccatgggcattgtttgtaacataactacacaaggcatgggcaaagatcaaccggccttgattgtatttacggtagtataggtctccgtgtatgtagagtgtaaagcatttgtggcgatatatcctgtgtcattcgttttaggattgtatctttgtttcattcatgatttttgccctccaaatatgctgaacttggacatgattaacaggaactctggtacgtactgattctctactgctaatctgctatgacaaatagtcacaacgtgtacacgaagaatgcaaatgcagacggcccgattacctccacgatgcgcacgccgtagtcg

SEQ ID NO: 31801 - DNA, 2211 bp, Zea Mays
cacatcgtcacccccaccgtttcctgtgcctctctctcctatcttcctcggtctcctcccgtaatcctttgcctgataccccgctctaccaggccgccaccacctccctccaggctccagcagcctataaatacgcccgcgtcgcccaccaccgcacaccacttgaatactccatctcaacttcccttcctctcccgtgctgcgctgagctatatagctgctcctcgacctccaagaagcacgcgggcggagcccggagcgagtgattagtgaaaggcatagcataaggccgcccggccgggaagtggtggcaatgacgcggtgcctcatgttcacgctgctgttcctcgtctcctccctcatctccaccgtggggctccccgtcgagccgcccgcggagctcctgcagctgggcggcggggacgtcggcggcgggcgcctgagcgtcgacgcgtccgacatcgcggaggcgtcgcgcgacttcgggggcgtcgcccgcgccgagcccatggcggtgttccatccgcgcgcggccggcgacgtggcgggcctggtcggcgccgcgttccggtcggcgcgcggcttccgcgtctcggcgcggggccacggccactccatcagcggccaggcgcaggcggccggcggcgtggtcgtggacatgagccgcggccgcggccccggcgccgccgtggcgcgggcattgcccgtgcactcggcggcgctgggcgggcactacgtggacgtctggggcggcgagctgtgggtggacgtgctcaactggacgctgtcccacggcgggctggcgccgcggtcgtggacggactacctgtacctgtccgtgggcggcaccctctccaacgccggcatcagcgggcaggcgttccaccacgggccacagatcagcaatgtctacgagctcgacgtcgtcacagggaagggagaggtggtgacctgctcggagacggagaacccggacctgttcttcggcgtcctgggcgggctgggccagttcggcatcatcacgcgggcgcgcatcgccctggagcgtgctcccaagagggttcggtggatccgggcgctctactccaacttcagcgagttcacggcggaccaggagcgcctcatctccctcggcagcggcggcggacgccggttcgactacgtggagggcttcgtcgtcgccgccgagggcctcatcaacaactggaggtcctccttcttctcgccgcagaaccccgtgaagctcacctcgctcaagcaccattccagcgtcctctactgcctcgaggtcaccaagaactacgacgacgaaaccgcagggtcggtcgaccaggtaggacgtggatacgctgctgggcgagctgaacttcctccctggcacggtgttcactacggacctgccgtacgtggacttcctggaccgcgtgcacaaggcggagctgaagctgcgcgccaaggggatgtgggaggtgccgcacccgtggctcaacctcttcgtgccggcgtcccgcatcgccgacttcgaccgcggcgtcttccgtggcgtgctggggggccgcaccgccggcgccggcggccccgtcctcatctaccccatgaacaagcacaagtgggacccgaggagctcggcggtgaccccggacgaggaggtgttctacctggtggcgttcctgcggtcggcgctgccgggcgcgccggagagcctggaggcgctggcgcggcagaaccagcggatcctcgacttctgcgcgggcgcgggcatcggcgccaagcagtacctgccgggccacaaggcgcggcacgagtgggcggagcacttcggcgccgcgaggtgggaccggttcgcgaggctcaaggccgagttcgacccgcgggccatcctggcggcggggcagggcatcttcaggccgcccggctcgccggcgctcgcggccgactcgtaacgtaatccagctgcttatactaattattaggcgcgtttagtgtaaggtagaggtactagctacagcagtaaccatacaggattgtttagttagctccggttggttcatgtacaaatgtggggttgttaatcgcgtgctctgccatggctgctgtgatcggttctgtacaggggatgaggggagccaaatatgaacgtggcaaaatcgatacttcttataaagaaaaaatatctatggtaaatactggtgcctgcctctgtttcccgtc

SEQ ID NO: 31802 - DNA, 1252 bp, Zea Mays
gataatcgccactgtagtatccgtgggtctatctataagcagggcccccagccgcccgggccagccatggccagtccgacacatacgtacgcgtcatccggtcaggttcggtggatccgggcgctctactccaacttcagcgagttcacggcggaccaggagcgcctcatctccctcggcagcggcggcggacgccggttcgactacgtggagggcttcgtcgtcgccgccgagggcctcatcaacaactggaggtcctccttcttctcgccgcagaaccccgtgaagctcacctcgctcaagcaccattccagcgtcctctactgcctcgaggtcaccaagaactacgacgacgaaaccgcagggtcggtcgaccaggacgtggatacgctgctgggcgagctgaacttcctccctggcacggtgttcactacggacctgccgtacgtggacttcctggaccgcgtgcacaaggcggagctgaagctgcgcgccaaggggatgtgggaggtgccgcacccgtggctcaacctcttcgtgccggcgtcccgcatcgccgacttcgaccgcggcgtcttccgtggcgtgctggggggccgcaccgccggcgccggcggccccgtcctcatctaccccatgaacaagcacaagtgggacccgaggagctcggcggtgaccccggacgaggaggtgttctacctggtggcgttcctgcggtcggcgctgccgggcgcgccggagagcctggaggcgctggcgcggcagaaccagcggatcctcgacttctgcgcgggcgcgggcatcggcgccaagcagtacctgccgggccacaaggcgcggcacgagtgggcggagcacttcggcgccgcgaggtgggaccggttcgcgaggctcaaggccgagttcgacccgcgggccatcctggcggcggggcagggcatcttcaggccgcccggctcgccggcgctcgcggccgactcgtaacgtaatccagctgcttatactaattattaggcgcgtttagtgtaaggtagaggtactagctacagcagtaaccatacaggattgtttagttagctccggttggttcatgtacaaatgtggggttgttaatcgcgtgctctgccatggctgctgtgatcggttctgtacaggggatgaggggagccaaatatgaacgtggcaaaatcgatacttcttataaagaaaaaatatctatggtaaatactggtgcctgcctctgtttcccgtc

SEQ ID NO: 31803 - DNA, 1435 bp, Zea Mays
cgggttcgcgcattcggcggcagcaagctggccgcgccaagaagaaacacatcacaccctaagttcctaatccaaatactatactctctctctctctctctctctctctctctctctctctctctctctctcctgtctgctcgctttcttctcgcgcggtgcgggagaaccggagaaccgccgcctcagctccgtctcgccgtggacgcagctgtgacttaaggcaattattggaatatcgaggatttgctgatggctggcactatcataatggatgattctgctgcaagcaccagtggtttgggggatcacaatgtctctgctgattccctttctgagtggcgctcctgcgaacatgttgataatgggatcccttcaacatcccctcccttttgggacaccgatagtgaagacgatgatcctgggcctagaccttcagatttatttgggcggtatacttggaaaatcgaaaacttttcaaaggagaagaagagagaaatgaaaagtgaaccgtttgaagctggtggctacaagtggtatattctagtttaccctcaaggatgcgatgtctccaatcacttgtcattgtttctttgcgttgctaatcatgaggaacttctcccaggatggggccattttgcccagtttactatagctgtgggcaatcttgatccaaagaaagttaaatattcagacacgctgcacaaattttggaagaaggaacatgattggggatggaaaaagtttatggagctatcaaagattcaagatggttttcttgttgatgatgttcttgaaatcatagctcaagttcaagttatcagagagaaagcagacagaccatttcgctgccttgatcgcccttatcgtcgagaacttctccgtgtctacatgacaaacatagagcaaatttaccgacgttttgttgaagaacgcagaaggaaacttatcaggcttattgaagacaaaatgaggtggtccagtttccgtgctttctggcttgcgattgacccaacaaccaaacatcgcatgtccagagagaagagtgacatcatattgaaaatggtggtgaagaatttttttgtcgagaaagacgtgacctcaacattagttatggatgctctatatacaggtttgaaggctcttgaggcctgtagcaatggcaagaaaggaatggtaacttcaattgacttggaggagctatcagcttctatggtccatgtcgatatggacatgtttgttttggctggtgacttcataactttgattgagagggcagctttagagcccttgtcttgtcaatctctgtcaccaaaaggtgacaaatgttcccaaacccgtgctaaggatggtggtactggagaaattaacaaagttcctattgagcttcaagaaaggcgtcttacggagcttggtcagaagatactgaaatatt

SEQ ID NO: 31804 - DNA, 1513 bp, Zea Mays
tcacaccctaagttcctaatccaaatactatactctctctctctctctctctctctctctctctctctctctctctctctcctgtctgctcgctttcttctcgcgcggtgcgggagaaccggagaaccgccgcctcagctccgtctcgccgtggacgcagctgtgacttaaggcaattattggaatatcgaggatttgctgatggctggcactatcataatggatgattctgctgcaagcaccagtggtttgggggatcacaatgtctctgctgattccctttctgagtggcgctcctgcgaacatgttgataatgggatcccttcaacatcccctcccttttgggacaccgatagtgaagacgatgatcctgggcctagaccttcagatttatttgggcggtatacttggaaaatcgaaaacttttcaaaggagaagaagagagaaatgaaaagtgaaccgtttgaagctggtggctacaagtggtatattctagtttaccctcaaggatgcgatgtctccaatcacttgtcattgtttctttgcgttgctaatcatgaggaacttctcccaggatggggccattttgcccagtttactatagctgtgggcaatcttgatccaaagaaagttaaatattcagacacgctgcacaaattttggaagaaggaacatgattggggatggaaaaagtttatggagctatcaaagattcaagatggttttcttgttgatgatgttcttgaaatcatagctcaagttcaagttatcagagagaaagcagacagaccatttcgctgccttgatcgcccttatcgtcgagaacttctccgtgtctacatgacaaacatagagcaaatttaccgacgttttgttgaagaacgcagaaggaaacttatcaggcttattgaagacaaaatgaggtggtccagtttccgtgctttctggcttgcgattgacccaacaaccaaacatcgcatgtccagagagaagagtgacatcatattgaaaatggtggtgaagaatttttttgtcgagaaagacgtgacctcaacattagttatggatgctctatatacaggtttgaaggctcttgaggcctgtagcaatggcaagaaaggaatggtaacttcaattgacttggaggagctatcagcttctatggtccatgtcgatatggacatgtttgttttggctggtgacttcataactttgattgagagggcagctttagagcccttgtcttgtcaatctctgtcaccaaaaggtgacaaatgttcccaaacccgtgctaagtatttaacctatttactttgtctccctgattcccttgattatgttgctcatatttggaactggtttacttggtacatagaacacccgttgcaaatgtgaccacactagccactatgtccctgtgatgtttagtaagttcagaacctaaagtgactggtgtcaattgaaagcatcatatattataatttcgtccttgtattattaattttgatttctc

SEQ ID NO: 31805 - DNA, 1483 bp, Zea Mays
aaatactatactctctctctctctctctctctctctctctctctctctctctctctctcctgtctgctcgctttcttctcgcgcggtgcgggagaaccggagaaccgccgcctcagctccgtctcgccgtggacgcagctgtgacttaaggcaattattggaatatcgaggatttgctgatggctggcactatcataatggatgattctgctgcaagcaccagtggtttgggggatcacaatgtctctgctgattccctttctgagtggcgctcctgcgaacatgttgataatgggatcccttcaacatcccctcccttttgggacaccgatagtgaagacgatgatcctggccaaaaccttgatgtggctgctcattatgctatgggatttggtttgattttacaagtgctattagcattatgccttgtgctcgtgctcatgtacagttgcctcaaattgtaaccccatggggcctagaccttcagatttatttgggcggtatacttggaaaatcgaaaacttttcaaaggagaagaagagagaaatgaaaagtgaaccgtttgaagctggtggctacaagtggtatattctagtttaccctcaaggatgcgatgtctccaatcacttgtcattgtttctttgcgttgctaatcatgaggaacttctcccaggatggggccattttgcccagtttactatagctgtgggcaatcttgatccaaagaaagttaaatattcagacacgctgcacaaattttggaagaaggaacatgattggggatggaaaaagtttatggagctatcaaagattcaagatggttttcttgttgatgatgttcttgaaatcatagctcaagttcaagttatcagagagaaagcagacagaccatttcgctgccttgatcgcccttatcgtcgagaacttctccgtgtctacatgacaaacatagagcaaatttaccgacgttttgttgaagaacgcagaaggaaacttatcaggcttattgaagacaaaatgaggtggtccagtttccgtgctttctggcttgcgattgacccaacaaccaaacatcgcatgtccagagagaagagtgacatcatattgaaaatggtggtgaagaatttttttgtcgagaaagacgtgacctcaacattagttatggatgctctatatacaggtttgaaggctcttgaggcctgtagcaatggcaagaaaggaatggtaacttcaattgacttggaggagctatcagcttctatggtccatgtcgatatggacatgtttgttttggctggtgacttcataactttgattgagagggcagctttagagcccttgtcttgtcaatctctgtcaccaaaaggtgacaaatgttcccaaacccgtgctaaggatggtggtactggagaaattaacaaagttcctattgagcttcaagaaaggcgtcttacggagcttggtcagaagatactgaaatatt

SEQ ID NO: 31806 - DNA, 733 bp, Zea Mays
ctctcctgtctgctcgctttcttctcgcgcggtgcgggagaaccggagaaccgccgcctcagctccgtctcgccgtggacgcagctgtgacttaaggcaattattggaatatcgaggatttgctgatggctggcactatcataatggatgattctgctgcaagcaccagtggtttgggggatcacaatgtctctgctgattccctttctgagtggcgctcctgcgaacatgttgataatgggatcccttcaacatcccctcccttttgggacaccgatagtgaagacgatgatcctgggcctagaccttcagatttatttgggcggtatacttggaaaatcgaaaacttttcaaaggagaagaagagagaaatgaaaagtgaaccgtttgaagctggtggctacaagtggtatattctagtttaccctcaaggatgcgatgtctccaatcacttgtcattgtttctttgcgttgctaatcatgaggaacttctcccaggatggggccattttgcccagtttactatagctgtgggcaatcttgatccaaagaaagttaaatattcagacacgctgcacaaattttggaagaaggaacatgattggggatggaaaaagtttatggagctatcaaagattcaagatggttttcttgttgatgatgttcttgaaatcatagctcaagttcaagttatcaggtaggagaaagactgtctccacggtattatattaag

SEQ ID NO: 31807 - DNA, 1081 bp, Zea Mays
cgctttcttctcgcgcggtgcgggagaaccggagaaccgccgcctcagctccgtctcgccgtggacgcagggcctagaccttcagatttatttgggcggtatacttggaaaatcgaaaacttttcaaaggagaagaagagagaaatgaaaagtgaaccgtttgaagctggtggctacaagtggtatattctagtttaccctcaaggatgcgatgtctccaatcacttgtcattgtttctttgcgttgctaatcatgaggaacttctcccaggatggggccattttgcccagtttactatagctgtgggcaatcttgatccaaagaaagttaaatattcagacacgctgcacaaattttggaagaaggaacatgattggggatggaaaaagtttatggagctatcaaagattcaagatggttttcttgttgatgatgttcttgaaatcatagctcaagttcaagttatcagagagaaagcagacagaccatttcgctgccttgatcgcccttatcgtcgagaacttctccgtgtctacatgacaaacatagagcaaatttaccgacgttttgttgaagaacgcagaaggaaacttatcaggcttattgaagacaaaatgaggtggtccagtttccgtgctttctggcttgcgattgacccaacaaccaaacatcgcatgtccagagagaagagtgacatcatattgaaaatggtggtgaagaatttttttgtcgagaaagacgtgacctcaacattagttatggatgctctatatacaggtttgaaggctcttgaggcctgtagcaatggcaagaaaggaatggtaacttcaattgacttggaggagctatcagcttctatggtccatgtcgatatggacatgtttgttttggctggtgacttcataactttgattgagagggcagctttagagcccttgtcttgtcaatctctgtcaccaaaaggtgacaaatgttcccaaacccgtgctaaggatggtggtactggagaaattaacaaagttcctattgagcttcaagaaaggcgtcttacggagcttggtcagaagatactgaaatatt

SEQ ID NO: 31808 - DNA, 1173 bp, Zea Mays
cgccgcctcagctccgtctcgccgtggacgcagggcctagaccttcagatttatttgggcggtatacttggaaaatcgaaaacttttcaaaggagaagaagagagaaatgaaaagtgaaccgtttgaagctggtggctacaagtggtatattctagtttaccctcaaggatgcgatgtctccaatcacttgtcattgtttctttgcgttgctaatcatgaggaacttctcccaggatggggccattttgcccagtttactatagctgtgggcaatcttgatccaaagaaagttaaatattcagacacgctgcacaaattttggaagaaggaacatgattggggatggaaaaagtttatggagctatcaaagattcaagatggttttcttgttgatgatgttcttgaaatcatagctcaagttcaagttatcagagagaaagcagacagaccatttcgctgccttgatcgcccttatcgtcgagaacttctccgtgtctacatgacaaacatagagcaaatttaccgacgttttgttgaagaacgcagaaggaaacttatcaggcttattgaagacaaaatgaggtggtccagtttccgtgctttctggcttgcgattgacccaacaaccaaacatcgcatgtccagagagaagagtgacatcatattgaaaatggtggtgaagaatttttttgtcgagaaagacgtgacctcaacattagttatggatgctctatatacaggtttgaaggctcttgaggcctgtagcaatggcaagaaaggaatggtaacttcaattgacttggaggagctatcagcttctatggtccatgtcgatatggacatgtttgttttggctggtgacttcataactttgattgagagggcagctttagagcccttgtcttgtcaatctctgtcaccaaaaggtgacaaatgttcccaaacccgtgctaagtatttaacctatttactttgtctccctgattcccttgattatgttgctcatatttggaactggtttacttggtacatagaacacccgttgcaaatgtgaccacactagccactatgtccctgtgatgtttagtaagttcagaacctaaagtgactggtgtcaattgaaagcatcatatattataatttcgtccttgtattattaattttgatttctc

SEQ ID NO: 31809 - DNA, 1072 bp, Zea Mays
atggtgaggcggccgcagggatcaggtttttatacccccaagcgggatgacaacaaccccgagtttgttacatcggtggagatcacggtgaagattcctccagcttcgttggccccacgcgtcggcgactactcgggcaaaacagtacgggtacgcggaacccaaggtgtcagccgtggagccgacaacggccaatatcccctccgagtcgccctcgcggacgaggaagaagactctggaaatgtgaccccacccgacaacggatggggccattttgcccagtttactatagctgtgggcaatcttgatccaaagaaagttaaatattcagacacgctgcacaaattttggaagaaggaacatgattggggatggaaaaagtttatggagctatcaaagattcaagatggttttcttgttgatgatgttcttgaaatcatagctcaagttcaagttatcagagagaaagcagacagaccatttcgctgccttgatcgcccttatcgtcgagaacttctccgtgtctacatgacaaacatagagcaaatttaccgacgttttgttgaagaacgcagaaggaaacttatcaggcttattgaagacaaaatgaggtggtccagtttccgtgctttctggcttgcgattgacccaacaaccaaacatcgcatgtccagagagaagagtgacatcatattgaaaatggtggtgaagaatttttttgtcgagaaagacgtgacctcaacattagttatggatgctctatatacaggtttgaaggctcttgaggcctgtagcaatggcaagaaaggaatggtaacttcaattgacttggaggagctatcagcttctatggtccatgtcgatatggacatgtttgttttggctggtgacttcataactttgattgagagggcagctttagagcccttgtcttgtcaatctctgtcaccaaaaggtgacaaatgttcccaaacccgtgctaaggatggtggtactggagaaattaacaaagttcctattgagcttcaagaaaggcgtcttacggagcttggtcagaagatactgaaatatt

SEQ ID NO: 31810 - DNA, 2177 bp, Zea Mays
atggcggagcgggagcagcaagagcaggtggctagggacgacgcggcggagtggaagcaggtggcggagctgagggctgtcacccaggcccaggacccttcctgcaagggaaaaatgctgggactcactctattggtgtgggaagaaataccacccgttccaaggcgtgaccaggagactgctctactcaccttaaaagaccggcttcgtgagcttgggcagcgactacatgagaaagaaattgagggcagggaactgctcaaggcccatttggaaaagaaggcagctgctgaggctgcagtggattcatccttagcatcctcatccaactccttagaaaagactccccaggttctgaaggggccagatcaatcctcggtaattgttggtgatgcaaaaattaatgcaccacttccaaaggctgtacctgtagccataagtgacgacaacaatggagttattccagcaacggcaacatacaccataaacaccaaacctgtgcttgtcagtcccactccaagtaaacttgagccagttttgtgtgaagaacatgtatcaagttcaatccagcaaacaaataaagctatcctgatgccttcaagatcaccactagttgataatgaggctaatccaactcccccaaaatcacccgtgccacaggctgatacagttgctaaagctactccagctccacccaaatcaccaatgctacagattgatacaattgctaaagctacagcagctcctacaaaatcttctacttcacagcttgataaagttgctaacatccaagctgcccccaaatcacctgcaccccagcctgatgaagttgcctcacatcataactcagtatcgggacagattctgtccacatctatctccaagcctcgagaagatacggtttctaagagggctgcagtcgttactgtacctggaactcctacaccaatgtcaaggcctacaagtgcacctctgctacaggtaccaaaatcaactatgctacctacaccgtcagtccaagtttctccaatgctttcacgttcttggactatgtcagcccaagttcctccaatgctttcacgttcgcggactgtgtctgaacggccgaacaatgagccttcacctaccgccccaatcttcacagccatggtcagcatatgcgatggcaacatctgtcatggcccctccattcgaaaggaatggccagttaccaggtaagcaaggcttcatgtttgggcctagcagggcagaaacccttgataactggcattcatggaaaggtaacactgatgttaacagaaatacgtggaaacatgattttcctaaccagcaaatgaccaattgtgatgctcatttacaccacttgaaagatatttcttatcagcaattgagcagcattgggacggaacagcacagattgggtggactacagtgtagggagttcctccagagggagatacctgctgcaacctttgtttcacgccagcagtatgggtcagtgggcgaagaattcccccacattgatattataaatgacttgcttgatgaagaccaaaacagtgcccatatgacagtctctcctcttcatgagtatcatacgtttggtttgccattttcttcaggaggcaatgtggctgactcagaaataccatccgtaagtagttctgtccggtttgacatgaccgacccttactatggcgagggttaccggagggcctataatacacagaatgctctgcataggttggatggttaccccaacgaaaggttggattcaactgcaccgccgaagcgttgggcatatagccatccaaatccagctgtgaaccttgcatacaattctaatgtatttccacagcagatgggagactactaatttagctagtgggagggatattcagactatatgtatcgccgtggcaatgggcaatggtgatgcctgtatactaataataatactttgtaaacaaaccatggtgccaagtctaaagttcgccatgttctttaatttgaattaatttaagttcaaaataggaaagaaagaatacactatgtaagcttttacatgcattcagcctatctcgtgcttgtatattatttctgtggttttaagagtataaaactgcagctaacaagccaagcatatatatcgcagcgctgtagcctgttgttcgcag

SEQ ID NO: 31811 - DNA, 1947 bp, Zea Mays
ccgccttgggtttcccgaaaacccccctctccacagtccatacaccgctagacccagcgcaccggagcctgtgtcccgcgcggcctcgacgtggagcaccctccgcctcatgtccccgcggcagcctcctcccacccacgcatgcaacaaggtcttctggcctcattcattggcctcaaccctcaagcatcggctgtgcggacatgctgcgctcctgcacctcctcggccgccgctcccagattcaccgcgccaggacgctcgacggaccgggtgcccgccccctggccgcccttcgcagcggtccccgcctgctgaaacccctcccgcccttagctgtaggcctcgcggctcggcgcggtcgaaagcagctggtgcgcgatcgagaagagtccgccggcttctctggtgcgggctgcggggtgcggtgtttctgaggtccgccgcgccgcgatgaggcgaatgcagcagtgagatgagatggtagtgatcctctactcccagagctaaacttgtagagtgctgtgaagggattaatgttatgaacgaaggtaaagaagagtcagaaaactgttgcgtggataagctggaggacatggaagtggggaattgtcccaccagatgctgcaaggatgcttcccatagttcagcctccaggaaaaaagtcgtgcctagcatttcagaaaaccaggcttgctgtgcaaccactttctgcaatgaaagatcttgggaaactaatgcatggcgtgctcggttagtaaaggcagtttgtcagaaagaatctattttgccaacgaacacagagaatccaattttaccttcttccataggaatttcatgtgatgcagtagagttctcaggcaaattggtaggttcccaaggcaagtttcaaagcctgggtgtaagtagtaatgctctagaaattcattctcatgacaattgccaagatccggttctgcacgaaagccataaggatgagcctgttattgctagaggtgagtcagcatctggtgttaatattgttgcaagatgtgagtcggtacctggagttgattccagcaattttgtgagaggcaaagaaaaagttatgtacaatgacagcaattgtggtaacaatacaagggagggtgatgacagcaatgagagcatcgagagctgtacaagtacaaaagccccaaagcgcaagcatgcgcagtgttgtgcagccacgatgccttcttctggaaacaaaagatttagaagagaagacaatgagagttcttgttcgggattattgcaaaaatgtggtacatctttcttcaactggatgtcatcactcacgaatgggttacccatgctagatggagccactgctgccgttccacttgaacagaagttttcagcaagtacaggagatggatctgcagcaccttcccagccacttcaaaacaaccgcagcgttcctatgcaattttttggcttcaattcgctcttccagtccctgtatactcgtaatgttatgataacttcaggagataattgtcgtcaaccagaaagcaactgtgctggacatgtgttcaatagactgaccctggaattaaatgatagcaattctatgttgaacaaagaaattggcatgggtagagaaactcttgatctggctactcagacttcagctgctgaaggatttcagatgatttctggtggctgtagaggaaatgttcagagtcaaattgatattttccaaatgagaccagaaagaaatatgaaactgcccagttccagtaagtttagctctagatctctagaagaaaaacaaaatcagtgcacagctgcctgctcaaatgatgcaacacaaaataaaggtggtttgagggaaagcttgtgggtaactcggcttttgccaaaagcatcagtagaattgatggagggcacaccatgcaatgtagagaatgctgttagtccacag

SEQ ID NO: 31812 - DNA, 2245 bp, Zea Mays
ccgccttgggtttcccgaaaacccccctctccacagtccatacaccgctagacccagcgcaccggagcctgtgtcccgcgcggcctcgacgtggagcaccctccgcctcatgtccccgcggcagcctcctcccacccacgcatgctgcgctcctgcacctcctcggccgccgctcccagattcaccgcgccaggacgctcgacggaccgggtgcccgccccctggccgcccttcgcagcggtccccgcctgctgaaacccctcccgcccttagctgtaggcctcgcggctcggcgcggtcgaaagcagctggtgcgcgatcgagaagagtccgccggcttctctggtgcgggctgcggggtgcggtgtttctgaggtccgccgcgccgcgatgaggcgaatgcagcagtgagatgagatggtagtgatcctctactcccagaggtgcaggtgtaaatgcagtcagaaaattcggcatgagccccctctctgagctggtgtggtctccggatgaaggcttgagcattaaaattgcggcgtctagtcttagcacaagaaaggcttctcttcgttggaatgcagatacattgagcatattgatatcttcacctcaacgaagtggttctggtccaggtgaaaagaacggtgataccataaatgataacctagaggtatcagaaaagatgccatcacaactgcggattcgcagtgacagctcagtgagagtaaccgtggatagccccaatagtacaaatgttgacgccctacaatttacgtctatgagatcgcaggagcaagattcaactaaacttgtagagtgctgtgaagggattaatgttatgaacgaaggtaaagaagagtcagaaaactgttgcgtggataagctggaggacatggaagtggggaattgtcccaccagatgctgcaaggatgcttcccatagttcagcctccaggaaaaaagtcgtgcctagcatttcagaaaaccaggcttgctgtgcaaccactttctgcaatgaaagatcttgggaaactaatgcatggcgtgctcggttagtaaaggcagtttgtcagaaagaatctattttgccaacgaacacagagaatccaattttaccttcttccataggaatttcatgtgatgcagtagagttctcaggcaaattggtaggttcccaaggcaagtttcaaagcctgggtgtaagtagtaatgctctagaaattcattctcatgacaattgccaagatccggttctgcacgaaagccataaggatgagcctgttattgctagaggtgagtcagcatctggtgttaatattgttgcaagatgtgagtcggtacctggagttgattccagcaattttgtgagaggcaaagaaaaagttatgtacaatgacagcaattgtggtaacaatacaagggagggtgatgacagcaatgagagcatcgagagctgtacaagtacaaaagccccaaagcgcaagcatgcgcagtgttgtgcagccacgatgccttcttctggaaacaaaagatttagaagagaagacaatgagagttcttgttcgggattattgcaaaaatgtggtacatctttcttcaactggatgtcatcactcacgaatgggttacccatgctagatggagccactgctgccgttccacttgaacagaagttttcagcaagtacaggagatggatctgcagcaccttcccagccacttcaaaacaaccgcagcgttcctatgcaattttttggcttcaattcgctcttccagtccctgtatactcgtaatgttatgataacttcaggagataattgtcgtcaaccagaaagcaactgtgctggacatgtgttcaatagactgaccctggaattaaatgatagcaattctatgttgaacaaagaaattggcatgggtagagaaactcttgatctggctactcagacttcagctgctgaaggatttcagatgatttctggtggctgtagaggaaatgttcagagtcaaattgatattttccaaatgagaccagaaagaaatatgaaactgcccagttccagtaagtttagctctagatctctagaagaaaaacaaaatcagtgcacagctgcctgctcaaatgatgcaacacaaaataaaggtggtttgagggaaagcttgtgggtaactcggcttttgccaaaagcatcagtagaattgatggagggcacaccatgcaatgtagagaatgctgttagtccacag

SEQ ID NO: 31813 - DNA, 2294 bp, Zea Mays
ccgccttgggtttcccgaaaacccccctctccacagtccatacaccgctagacccagcgcaccggagcctgtgtcccgcgcggcctcgacgtggagcaccctccgcctcatgtccccgcggcagcctcctcccacccacgcatgcaacaaggtcttctggcctcattcattggcctcaaccctcaagcatcggctgtgcggacatgctgcgctcctgcacctcctcggccgccgctcccagattcaccgcgccaggacgctcgacggaccgggtgcccgccccctggccgcccttcgcagcggtccccgcctgctgaaacccctcccgcccttagctgtaggcctcgcggctcggcgcggtcgaaagcagctggtgcgcgatcgagaagagtccgccggcttctctggtgcgggctgcggggtgcggtgtttctgaggtccgccgcgccgcgatgaggcgaatgcagcagtgagatgagatggtagtgatcctctactcccagaggtgaggtgtaaatgcagtcagaaaattcggcatgagccccctctctgagctggtgtggtctccggatgaaggcttgagcattaaaattgcggcgtctagtcttagcacaagaaaggcttctcttcgttggaatgcagatacattgagcatattgatatcttcacctcaacgaagtggttctggtccaggtgaaaagaacggtgataccataaatgataacctagaggtatcagaaaagatgccatcacaactgcggattcgcagtgacagctcagtgagagtaaccgtggatagccccaatagtacaaatgttgacgccctacaatttacgtctatgagatcgcaggagcaagattcaaagtgctgtgaagggattaatgttatgaacgaaggtaaagaagagtcagaaaactgttgcgtggataagctggaggacatggaagtggggaattgtcccaccagatgctgcaaggatgcttcccatagttcagcctccaggaaaaaagtcgtgcctagcatttcagaaaaccaggcttgctgtgcaaccactttctgcaatgaaagatcttgggaaactaatgcatggcgtgctcggttagtaaaggcagtttgtcagaaagaatctattttgccaacgaacacagagaatccaattttaccttcttccataggaatttcatgtgatgcagtagagttctcaggcaaattggtaggttcccaaggcaagtttcaaagcctgggtgtaagtagtaatgctctagaaattcattctcatgacaattgccaagatccggttctgcacgaaagccataaggatgagcctgttattgctagaggtgagtcagcatctggtgttaatattgttgcaagatgtgagtcggtacctggagttgattccagcaattttgtgagaggcaaagaaaaagttatgtacaatgacagcaattgtggtaacaatacaagggagggtgatgacagcaatgagagcatcgagagctgtacaagtacaaaagccccaaagcgcaagcatgcgcagtgttgtgcagccacgatgccttcttctggaaacaaaagatttagaagagaagacaatgagagttcttgttcgggattattgcaaaaatgtggtacatctttcttcaactggatgtcatcactcacgaatgggttacccatgctagatggagccactgctgccgttccacttgaacagaagttttcagcaagtacaggagatggatctgcagcaccttcccagccacttcaaaacaaccgcagcgttcctatgcaattttttggcttcaattcgctcttccagtccctgtatactcgtaatgttatgataacttcaggagataattgtcgtcaaccagaaagcaactgtgctggacatgtgttcaatagactgaccctggaattaaatgatagcaattctatgttgaacaaagaaattggcatgggtagagaaactcttgatctggctactcagacttcagctgctgaaggatttcagatgatttctggtggctgtagaggaaatgttcagagtcaaattgatattttccaaatgagaccagaaagaaatatgaaactgcccagttccagtaagtttagctctagatctctagaagaaaaacaaaatcagtgcacagctgcctgctcaaatgatgcaacacaaaataaaggtggtttgagggaaagcttgtgggtaactcggcttttgccaaaagcatcagtagaattgatggagggcacaccatgcaatgtagagaatgctgttagtccacag

SEQ ID NO: 31814 - DNA, 2300 bp, Zea Mays
ccgccttgggtttcccgaaaacccccctctccacagtccatacaccgctagacccagcgcaccggagcctgtgtcccgcgcggcctcgacgtggagcaccctccgcctcatgtccccgcggcagcctcctcccacccacgcatgcaacaaggtcttctggcctcattcattggcctcaaccctcaagcatcggctgtgcggacatgctgcgctcctgcacctcctcggccgccgctcccagattcaccgcgccaggacgctcgacggaccgggtgcccgccccctggccgcccttcgcagcggtccccgcctgctgaaacccctcccgcccttagctgtaggcctcgcggctcggcgcggtcgaaagcagctggtgcgcgatcgagaagagtccgccggcttctctggtgcgggctgcggggtgcggtgtttctgaggtccgccgcgccgcgatgaggcgaatgcagcagtgagatgagatggtagtgatcctctactcccagaggtgaggtgcaggtgtaaatgcagtcagaaaattcggcatgagccccctctctgagctggtgtggtctccggatgaaggcttgagcattaaaattgcggcgtctagtcttagcacaagaaaggcttctcttcgttggaatgcagatacattgagcatattgatatcttcacctcaacgaagtggttctggtccaggtgaaaagaacggtgataccataaatgataacctagaggtatcagaaaagatgccatcacaactgcggattcgcagtgacagctcagtgagagtaaccgtggatagccccaatagtacaaatgttgacgccctacaatttacgtctatgagatcgcaggagcaagattcaaagtgctgtgaagggattaatgttatgaacgaaggtaaagaagagtcagaaaactgttgcgtggataagctggaggacatggaagtggggaattgtcccaccagatgctgcaaggatgcttcccatagttcagcctccaggaaaaaagtcgtgcctagcatttcagaaaaccaggcttgctgtgcaaccactttctgcaatgaaagatcttgggaaactaatgcatggcgtgctcggttagtaaaggcagtttgtcagaaagaatctattttgccaacgaacacagagaatccaattttaccttcttccataggaatttcatgtgatgcagtagagttctcaggcaaattggtaggttcccaaggcaagtttcaaagcctgggtgtaagtagtaatgctctagaaattcattctcatgacaattgccaagatccggttctgcacgaaagccataaggatgagcctgttattgctagaggtgagtcagcatctggtgttaatattgttgcaagatgtgagtcggtacctggagttgattccagcaattttgtgagaggcaaagaaaaagttatgtacaatgacagcaattgtggtaacaatacaagggagggtgatgacagcaatgagagcatcgagagctgtacaagtacaaaagccccaaagcgcaagcatgcgcagtgttgtgcagccacgatgccttcttctggaaacaaaagatttagaagagaagacaatgagagttcttgttcgggattattgcaaaaatgtggtacatctttcttcaactggatgtcatcactcacgaatgggttacccatgctagatggagccactgctgccgttccacttgaacagaagttttcagcaagtacaggagatggatctgcagcaccttcccagccacttcaaaacaaccgcagcgttcctatgcaattttttggcttcaattcgctcttccagtccctgtatactcgtaatgttatgataacttcaggagataattgtcgtcaaccagaaagcaactgtgctggacatgtgttcaatagactgaccctggaattaaatgatagcaattctatgttgaacaaagaaattggcatgggtagagaaactcttgatctggctactcagacttcagctgctgaaggatttcagatgatttctggtggctgtagaggaaatgttcagagtcaaattgatattttccaaatgagaccagaaagaaatatgaaactgcccagttccagtaagtttagctctagatctctagaagaaaaacaaaatcagtgcacagctgcctgctcaaatgatgcaacacaaaataaaggtggtttgagggaaagcttgtgggtaactcggcttttgccaaaagcatcagtagaattgatggagggcacaccatgcaatgtagagaatgctgttagtccacag

SEQ ID NO: 31815 - DNA, 1935 bp, Zea Mays
ccgccttgggtttcccgaaaacccccctctccacagtccatacaccgctagacccagcgcaccggagcctgtgtcccgcgcggcctcgacgtggagcaccctccgcctcatgtccccgcggcagcctcctcccacccacgcatgcaacaaggtcttctggcctcattcattggcctcaaccctcaagcatcggctgtgcggacatgctgcgctcctgcacctcctcggccgccgctcccagattcaccgcgccaggacgctcgacggaccgggtgcccgccccctggccgcccttcgcagcggtccccgcctgctgaaacccctcccgcccttagctgtaggcctcgcggctcggcgcggtcgaaagcagctggtgcgcgatcgagaagagtccgccggcttctctggtgcgggctgcggggtgcggtgtttctgaggtccgccgcgccgcgatgaggcgaatgcagcagtgagatgagatggtagtgatcctctactcccagagagtgctgtgaagggattaatgttatgaacgaaggtaaagaagagtcagaaaactgttgcgtggataagctggaggacatggaagtggggaattgtcccaccagatgctgcaaggatgcttcccatagttcagcctccaggaaaaaagtcgtgcctagcatttcagaaaaccaggcttgctgtgcaaccactttctgcaatgaaagatcttgggaaactaatgcatggcgtgctcggttagtaaaggcagtttgtcagaaagaatctattttgccaacgaacacagagaatccaattttaccttcttccataggaatttcatgtgatgcagtagagttctcaggcaaattggtaggttcccaaggcaagtttcaaagcctgggtgtaagtagtaatgctctagaaattcattctcatgacaattgccaagatccggttctgcacgaaagccataaggatgagcctgttattgctagaggtgagtcagcatctggtgttaatattgttgcaagatgtgagtcggtacctggagttgattccagcaattttgtgagaggcaaagaaaaagttatgtacaatgacagcaattgtggtaacaatacaagggagggtgatgacagcaatgagagcatcgagagctgtacaagtacaaaagccccaaagcgcaagcatgcgcagtgttgtgcagccacgatgccttcttctggaaacaaaagatttagaagagaagacaatgagagttcttgttcgggattattgcaaaaatgtggtacatctttcttcaactggatgtcatcactcacgaatgggttacccatgctagatggagccactgctgccgttccacttgaacagaagttttcagcaagtacaggagatggatctgcagcaccttcccagccacttcaaaacaaccgcagcgttcctatgcaattttttggcttcaattcgctcttccagtccctgtatactcgtaatgttatgataacttcaggagataattgtcgtcaaccagaaagcaactgtgctggacatgtgttcaatagactgaccctggaattaaatgatagcaattctatgttgaacaaagaaattggcatgggtagagaaactcttgatctggctactcagacttcagctgctgaaggatttcagatgatttctggtggctgtagaggaaatgttcagagtcaaattgatattttccaaatgagaccagaaagaaatatgaaactgcccagttccagtaagtttagctctagatctctagaagaaaaacaaaatcagtgcacagctgcctgctcaaatgatgcaacacaaaataaaggtggtttgagggaaagcttgtgggtaactcggcttttgccaaaagcatcagtagaattgatggagggcacaccatgcaatgtagagaatgctgttagtccacag

SEQ ID NO: 31816 - DNA, 2301 bp, Zea Mays
ccgccttgggtttcccgaaaacccccctctccacagtccatacaccgctagacccagcgcaccggagcctgtgtcccgcgcggcctcgacgtggagcaccctccgcctcatgtccccgcggcagcctcctcccacccacgcatgcaacaaggtcttctggcctcattcattggcctcaaccctcaagcatcggctgtgcggacatgctgcgctcctgcacctcctcggccgccgctcccagattcaccgcgccaggacgctcgacggaccgggtgcccgccccctggccgcccttcgcagcggtccccgcctgctgaaacccctcccgcccttagctgtaggcctcgcggctcggcgcggtcgaaagcagctggtgcgcgatcgagaagagtccgccggcttctctggtgcgggctgcggggtgcggtgtttctgaggtccgccgcgccgcgatgaggcgaatgcagcagtgagatgagatggtagtgatcctctactcccagaggtgtaaatgcagtcagaaaattcggcatgagccccctctctgagctggtgtggtctccggatgaaggcttgagcattaaaattgcggcgtctagtcttagcacaagaaaggcttctcttcgttggaatgcagatacattgagcatattgatatcttcacctcaacgaagtggttctggtccaggtgaaaagaacggtgataccataaatgataacctagaggtatcagaaaagatgccatcacaactgcggattcgcagtgacagctcagtgagagtaaccgtggatagccccaatagtacaaatgttgacgccctacaatttacgtctatgagatcgcaggagcaagattcaactaaacttgtagagtgctgtgaagggattaatgttatgaacgaaggtaaagaagagtcagaaaactgttgcgtggataagctggaggacatggaagtggggaattgtcccaccagatgctgcaaggatgcttcccatagttcagcctccaggaaaaaagtcgtgcctagcatttcagaaaaccaggcttgctgtgcaaccactttctgcaatgaaagatcttgggaaactaatgcatggcgtgctcggttagtaaaggcagtttgtcagaaagaatctattttgccaacgaacacagagaatccaattttaccttcttccataggaatttcatgtgatgcagtagagttctcaggcaaattggtaggttcccaaggcaagtttcaaagcctgggtgtaagtagtaatgctctagaaattcattctcatgacaattgccaagatccggttctgcacgaaagccataaggatgagcctgttattgctagaggtgagtcagcatctggtgttaatattgttgcaagatgtgagtcggtacctggagttgattccagcaattttgtgagaggcaaagaaaaagttatgtacaatgacagcaattgtggtaacaatacaagggagggtgatgacagcaatgagagcatcgagagctgtacaagtacaaaagccccaaagcgcaagcatgcgcagtgttgtgcagccacgatgccttcttctggaaacaaaagatttagaagagaagacaatgagagttcttgttcgggattattgcaaaaatgtggtacatctttcttcaactggatgtcatcactcacgaatgggttacccatgctagatggagccactgctgccgttccacttgaacagaagttttcagcaagtacaggagatggatctgcagcaccttcccagccacttcaaaacaaccgcagcgttcctatgcaattttttggcttcaattcgctcttccagtccctgtatactcgtaatgttatgataacttcaggagataattgtcgtcaaccagaaagcaactgtgctggacatgtgttcaatagactgaccctggaattaaatgatagcaattctatgttgaacaaagaaattggcatgggtagagaaactcttgatctggctactcagacttcagctgctgaaggatttcagatgatttctggtggctgtagaggaaatgttcagagtcaaattgatattttccaaatgagaccagaaagaaatatgaaactgcccagttccagtaagtttagctctagatctctagaagaaaaacaaaatcagtgcacagctgcctgctcaaatgatgcaacacaaaataaaggtggtttgagggaaagcttgtgggtaactcggcttttgccaaaagcatcagtagaattgatggagggcacaccatgcaatgtagagaatgctgttagtccacag

SEQ ID NO: 31817 - DNA, 2312 bp, Zea Mays
ccgccttgggtttcccgaaaacccccctctccacagtccatacaccgctagacccagcgcaccggagcctgtgtcccgcgcggcctcgacgtggagcaccctccgcctcatgtccccgcggcagcctcctcccacccacgcatgcaacaaggtcttctggcctcattcattggcctcaaccctcaagcatcggctgtgcggacatgctgcgctcctgcacctcctcggccgccgctcccagattcaccgcgccaggacgctcgacggaccgggtgcccgccccctggccgcccttcgcagcggtccccgcctgctgaaacccctcccgcccttagctgtaggcctcgcggctcggcgcggtcgaaagcagctggtgcgcgatcgagaagagtccgccggcttctctggtgcgggctgcggggtgcggtgtttctgaggtccgccgcgccgcgatgaggcgaatgcagcagtgagatgagatggtagtgatcctctactcccagaggtgaggtgcaggtgtaaatgcagtcagaaaattcggcatgagccccctctctgagctggtgtggtctccggatgaaggcttgagcattaaaattgcggcgtctagtcttagcacaagaaaggcttctcttcgttggaatgcagatacattgagcatattgatatcttcacctcaacgaagtggttctggtccaggtgaaaagaacggtgataccataaatgataacctagaggtatcagaaaagatgccatcacaactgcggattcgcagtgacagctcagtgagagtaaccgtggatagccccaatagtacaaatgttgacgccctacaatttacgtctatgagatcgcaggagcaagattcaactaaacttgtagagtgctgtgaagggattaatgttatgaacgaaggtaaagaagagtcagaaaactgttgcgtggataagctggaggacatggaagtggggaattgtcccaccagatgctgcaaggatgcttcccatagttcagcctccaggaaaaaagtcgtgcctagcatttcagaaaaccaggcttgctgtgcaaccactttctgcaatgaaagatcttgggaaactaatgcatggcgtgctcggttagtaaaggcagtttgtcagaaagaatctattttgccaacgaacacagagaatccaattttaccttcttccataggaatttcatgtgatgcagtagagttctcaggcaaattggtaggttcccaaggcaagtttcaaagcctgggtgtaagtagtaatgctctagaaattcattctcatgacaattgccaagatccggttctgcacgaaagccataaggatgagcctgttattgctagaggtgagtcagcatctggtgttaatattgttgcaagatgtgagtcggtacctggagttgattccagcaattttgtgagaggcaaagaaaaagttatgtacaatgacagcaattgtggtaacaatacaagggagggtgatgacagcaatgagagcatcgagagctgtacaagtacaaaagccccaaagcgcaagcatgcgcagtgttgtgcagccacgatgccttcttctggaaacaaaagatttagaagagaagacaatgagagttcttgttcgggattattgcaaaaatgtggtacatctttcttcaactggatgtcatcactcacgaatgggttacccatgctagatggagccactgctgccgttccacttgaacagaagttttcagcaagtacaggagatggatctgcagcaccttcccagccacttcaaaacaaccgcagcgttcctatgcaattttttggcttcaattcgctcttccagtccctgtatactcgtaatgttatgataacttcaggagataattgtcgtcaaccagaaagcaactgtgctggacatgtgttcaatagactgaccctggaattaaatgatagcaattctatgttgaacaaagaaattggcatgggtagagaaactcttgatctggctactcagacttcagctgctgaaggatttcagatgatttctggtggctgtagaggaaatgttcagagtcaaattgatattttccaaatgagaccagaaagaaatatgaaactgcccagttccagtaagtttagctctagatctctagaagaaaaacaaaatcagtgcacagctgcctgctcaaatgatgcaacacaaaataaaggtggtttgagggaaagcttgtgggtaactcggcttttgccaaaagcatcagtagaattgatggagggcacaccatgcaatgtagagaatgctgttagtccacag

SEQ ID NO: 31818 - DNA, 2403 bp, Zea Mays
ccgccttgggtttcccgaaaacccccctctccacagtccatacaccgctagacccagcgcaccggagcctgtgtcccgcgcggcctcgacgtggagcaccctccgcctcatgtccccgcggcagcctcctcccacccacgcatgcaacaaggtcttctggcctcattcattggcctcaaccctcaagcatcggctgtgcggacatgctgcgctcctgcacctcctcggccgccgctcccagattcaccgcgccaggacgctcgacggaccgggtgcccgccccctggccgcccttcgcagcggtccccgcctgctgaaacccctcccgcccttagctgtaggcctcgcggctcggcgcggtcgaaagcagctggtgcgcgatcgagaagagtccgccggcttctctggtgcgggctgcggggtgcggtgtttctgaggtccgccgcgccgcgatgaggcgaatgcagcagtgagatgagatggtagtgatcctctactcccagagcctccagttccagggaaagtcttcaccgtacttttctgcattgtgttttatcaaaagcaagcacgatcggatgtagatggtgctctctctttttaggtgcaggtgtaaatgcagtcagaaaattcggcatgagccccctctctgagctggtgtggtctccggatgaaggcttgagcattaaaattgcggcgtctagtcttagcacaagaaaggcttctcttcgttggaatgcagatacattgagcatattgatatcttcacctcaacgaagtggttctggtccaggtgaaaagaacggtgataccataaatgataacctagaggtatcagaaaagatgccatcacaactgcggattcgcagtgacagctcagtgagagtaaccgtggatagccccaatagtacaaatgttgacgccctacaatttacgtctatgagatcgcaggagcaagattcaactaaacttgtagagtgctgtgaagggattaatgttatgaacgaaggtaaagaagagtcagaaaactgttgcgtggataagctggaggacatggaagtggggaattgtcccaccagatgctgcaaggatgcttcccatagttcagcctccaggaaaaaagtcgtgcctagcatttcagaaaaccaggcttgctgtgcaaccactttctgcaatgaaagatcttgggaaactaatgcatggcgtgctcggttagtaaaggcagtttgtcagaaagaatctattttgccaacgaacacagagaatccaattttaccttcttccataggaatttcatgtgatgcagtagagttctcaggcaaattggtaggttcccaaggcaagtttcaaagcctgggtgtaagtagtaatgctctagaaattcattctcatgacaattgccaagatccggttctgcacgaaagccataaggatgagcctgttattgctagaggtgagtcagcatctggtgttaatattgttgcaagatgtgagtcggtacctggagttgattccagcaattttgtgagaggcaaagaaaaagttatgtacaatgacagcaattgtggtaacaatacaagggagggtgatgacagcaatgagagcatcgagagctgtacaagtacaaaagccccaaagcgcaagcatgcgcagtgttgtgcagccacgatgccttcttctggaaacaaaagatttagaagagaagacaatgagagttcttgttcgggattattgcaaaaatgtggtacatctttcttcaactggatgtcatcactcacgaatgggttacccatgctagatggagccactgctgccgttccacttgaacagaagttttcagcaagtacaggagatggatctgcagcaccttcccagccacttcaaaacaaccgcagcgttcctatgcaattttttggcttcaattcgctcttccagtccctgtatactcgtaatgttatgataacttcaggagataattgtcgtcaaccagaaagcaactgtgctggacatgtgttcaatagactgaccctggaattaaatgatagcaattctatgttgaacaaagaaattggcatgggtagagaaactcttgatctggctactcagacttcagctgctgaaggatttcagatgatttctggtggctgtagaggaaatgttcagagtcaaattgatattttccaaatgagaccagaaagaaatatgaaactgcccagttccagtaagtttagctctagatctctagaagaaaaacaaaatcagtgcacagctgcctgctcaaatgatgcaacacaaaataaaggtggtttgagggaaagcttgtgggtaactcggcttttgccaaaagcatcagtagaattgatggagggcacaccatgcaatgtagagaatgctgttagtccacag

SEQ ID NO: 31819 - DNA, 2295 bp, Zea Mays
ccgccttgggtttcccgaaaacccccctctccacagtccatacaccgctagacccagcgcaccggagcctgtgtcccgcgcggcctcgacgtggagcaccctccgcctcatgtccccgcggcagcctcctcccacccacgcatgcaacaaggtcttctggcctcattcattggcctcaaccctcaagcatcggctgtgcggacatgctgcgctcctgcacctcctcggccgccgctcccagattcaccgcgccaggacgctcgacggaccgggtgcccgccccctggccgcccttcgcagcggtccccgcctgctgaaacccctcccgcccttagctgtaggcctcgcggctcggcgcggtcgaaagcagctggtgcgcgatcgagaagagtccgccggcttctctggtgcgggctgcggggtgcggtgtttctgaggtccgccgcgccgcgatgaggcgaatgcagcagtgagatgagatggtagtgatcctctactcccagaggtgcaggtgtaaatgcagtcagaaaattcggcatgagccccctctctgagctggtgtggtctccggatgaaggcttgagcattaaaattgcggcgtctagtcttagcacaagaaaggcttctcttcgttggaatgcagatacattgagcatattgatatcttcacctcaacgaagtggttctggtccaggtgaaaagaacggtgataccataaatgataacctagaggtatcagaaaagatgccatcacaactgcggattcgcagtgacagctcagtgagagtaaccgtggatagccccaatagtacaaatgttgacgccctacaatttacgtctatgagatcgcaggagcaagattcaaagtgctgtgaagggattaatgttatgaacgaaggtaaagaagagtcagaaaactgttgcgtggataagctggaggacatggaagtggggaattgtcccaccagatgctgcaaggatgcttcccatagttcagcctccaggaaaaaagtcgtgcctagcatttcagaaaaccaggcttgctgtgcaaccactttctgcaatgaaagatcttgggaaactaatgcatggcgtgctcggttagtaaaggcagtttgtcagaaagaatctattttgccaacgaacacagagaatccaattttaccttcttccataggaatttcatgtgatgcagtagagttctcaggcaaattggtaggttcccaaggcaagtttcaaagcctgggtgtaagtagtaatgctctagaaattcattctcatgacaattgccaagatccggttctgcacgaaagccataaggatgagcctgttattgctagaggtgagtcagcatctggtgttaatattgttgcaagatgtgagtcggtacctggagttgattccagcaattttgtgagaggcaaagaaaaagttatgtacaatgacagcaattgtggtaacaatacaagggagggtgatgacagcaatgagagcatcgagagctgtacaagtacaaaagccccaaagcgcaagcatgcgcagtgttgtgcagccacgatgccttcttctggaaacaaaagatttagaagagaagacaatgagagttcttgttcgggattattgcaaaaatgtggtacatctttcttcaactggatgtcatcactcacgaatgggttacccatgctagatggagccactgctgccgttccacttgaacagaagttttcagcaagtacaggagatggatctgcagcaccttcccagccacttcaaaacaaccgcagcgttcctatgcaattttttggcttcaattcgctcttccagtccctgtatactcgtaatgttatgataacttcaggagataattgtcgtcaaccagaaagcaactgtgctggacatgtgttcaatagactgaccctggaattaaatgatagcaattctatgttgaacaaagaaattggcatgggtagagaaactcttgatctggctactcagacttcagctgctgaaggatttcagatgatttctggtggctgtagaggaaatgttcagagtcaaattgatattttccaaatgagaccagaaagaaatatgaaactgcccagttccagtaagtttagctctagatctctagaagaaaaacaaaatcagtgcacagctgcctgctcaaatgatgcaacacaaaataaaggtggtttgagggaaagcttgtgggtaactcggcttttgccaaaagcatcagtagaattgatggagggcacaccatgcaatgtagagaatgctgttagtccacag

SEQ ID NO: 31820 - DNA, 1363 bp, Zea Mays
ccgccttgggtttcccgaaaacccccctctccacagtccatacaccgctagacccagcgcaccggagcctgtgtcccgcgcggcctcgacgtggagcaccctccgcctcatgtccccgcggcagcctcctcccacccacgcatgcaacaaggtcttctggcctcattcattggcctcaaccctcaagcatcggctgtgcggacatgctgcgctcctgcacctcctcggccgccgctcccagattcaccgcgccaggacgctcgacggaccgggtgcccgccccctggccgcccttcgcagcggtccccgcctgctgaaacccctcccgcccttagctgtaggcctcgcggctcggcgcggtcgaaagcagctggtgcgcgatcgagaagagtccgccggcttctctggtgcgggctgcggggtgcggtgtttctgaggtccgccgcgccgcgatgaggcgaatgcagcagtgagatgagatggtagtgatcctctactcccagaggtgcaggtgtaaatgcagtcagaaaattcggcatgagccccctctctgagctggtgtggtctccggatgaaggcttgagcattaaaattgcggcgtctagtcttagcacaagaaaggcttctcttcgttggaatgcagatacattgagcatattgatatcttcacctcaacgaagtggttctggtccaggtgaaaagaacggtgataccataaatgataacctagaggtatcagaaaagatgccatcacaactgcggattcgcagtgacagctcagtgagagtaaccgtggatagccccaatagtacaaatgttgacgccctacaatttacgtctatgagatcgcaggagcaagattcaagatgagctgaaggcatggtggtctgctgctatgaagggtgagtggaagctaccgtcgaaggaagaactgggtgtgaaactaagagaaaaagagctacttcgctcgtaggatggaacggttgcgaagtactaaaatatgaaggcttctattgtacccatcctactaggaaattatgagccagttgatgaggcatgaattatttcacgacttggccgcggttagtgtgaaaaggagacgctgctatatatggtcatcacccttggtttgtccgttcgccagatatcacgattatcatatttatcggttgtaacataagcttcttgtattagcatatggtttaatattttttttcagatgggatgaggtcctgcgtgatatcctatctgtaaataggaaggcactagcagatctcgacaaatgtacaactgtttttttttttttttttgagaaacttgaaataagatttatcgttcaccactgttaattgcttcatctggg

SEQ ID NO: 31821 - DNA, 1902 bp, Zea Mays
gggctctcagattcgatctttccccttcttctgcagagcttcatggtgcggcggtgtaccttgtgctgctctttgtggttgcgacattgtgatctgcgaccatgacttgatttgactgtgcgactgtgtgttgggagagggtgcttggtgaaagccttgatgtgaggccgacaatggcgatgccctttgggcgccattttccaccttggaggcatgtgtcatgcatgcaccttccattctcatcgtggatcttttgggtgaaaacctatgactgtgttgtctgcatcgtgttcctccttgatggtgttgtcttgaagttcccttgccatggcgatggtggcacacaaatggctacctaccccctcggtgttgcgtgtagttgtcgttgccgcttgtggtcctaccacgtcatctatctagctatggagctcttcgttgttttcgtgcacgcttgatatccttctattaggcaaggatcttcgttgattggtgttagaatcccctatatggctaggatagatagatagatctctattagacaaggatctacattgatagatagatctctattggtcatcctcagcgacaattggtcatccaagctctagccaaccatctctcaatctaatgttgaggctaagtatagagcagttgtcaatggtgttgcagataattgttggttctgccaactcctccagaaacttaatagtcctttaaccaagagaaccctagtctattgcgacaatgtgagtgcggtctacctctacaccaacctagttcgacaccatcacacgaaacatgttgagattgacctttactttgtccgcgagcgagttaccatcgacgacatttgagttcttcacgtcccaatgacctctcagtttattgatatcttcacaaaggagatgccttctacggtgttctcgaagttttgttgtagtcttagtgtcctagttgacgcctagactagggggtgttttctctttgtaccggtctcaccgtaccgtcccacaggacgctcagactgtggggggtgttagaatcctgcctatatggctaggatagatgaatcggtctctattatacaaggatatctgttgattggtattataatcttgtctatatggctaggatagatagatcaatctctattaggcaagaatcttcgttgatagatagatcaatctctattaggcaaggatctttgttgactggttctctttttataaaccctcggctatacttgcttatatatgtgtaacaccatatctcgtacaatacatcgatagtctttctatcaccttcaacactttttcctgccgtggtcctcttgcagacgctttgccgattctgttgtcgcttctttggtggatacttcgccactactcctatcgcttctccggcgatgagctgaaggcatggtggtctgctgctatgaagggtgagtggaagctaccgtcgaaggaagaactgggtgtgaaactaagagaaaaagagctacttcgctcgtaggatggaacggttgcgaagtactaaaatatgaaggcttctattgtacccatcctactaggaaattatgagccagttgatgaggcatgaattatttcacgacttggccgcggttagtgtgaaaaggagacgctgctatatatggtcatcacccttggtttgtccgttcgccagatatcacgattatcatatttatcggttgtaacataagcttcttgtattagcatatggtttaatattttttttcagatgggatgaggtcctgcgtgatatcctatctgtaaataggaaggcactagcagatctcgacaaatgtacaactgtttttttttttttttttgagaaacttgaaataagatttatcgttcaccactgttaattgcttcatctggg

SEQ ID NO: 31822 - DNA, 1661 bp, Zea Mays
cttcgcctctccagccacgtgcagtctctgcgtgtccacctccacccgtgcattcggcatccatctgtcatctagtattatatacagtacattcattcgcttcgccacgtacgttcagcatcgtcgtctttcgaaaaatgtggttcggtggcggacccatcgacgcggcgggcgcgctgcgcggcttcgtgcgggaagcaggcgggtgcgcggtggtggacgggggtctcggcacggagctggaggcgcacggcgcggacctgcacgacgcgctctggagcgccaagtgcctcgcctccgccccgcatctcatccgcaaggtccatctggactacctcgaagcaggcgcggacgtcataatctctgcgtcctaccaggccacgatcgaggggttccagtcgaggggcttctcgcgggacgagagcgaggagctgctgcggcgtagcgtgcacgtcgcgcaggaggcgcgcagggtcttcgcggcggagggcgacaggtcatcgcgccgcggacgcccgccggcgctggtggcggcctcggtcgggagctacggggcgtaccgggcagacggctccgagtacagcggggattatggaaaatcgatgacgaaagaagatctgaagaacttccacaggaggcggctgcaggtgctggcaggcgcggggcccgacctcatcgccttcgagacgatcccaaacaaactcgaagcgcaggtctacgctgagctcctcgaggagaacggcatacggatcccagcctggttctccttcacttccaaggacggggtgaacgcggcgagcggagacccgatcaacgagtgcgcggccgtcgctgattcctgcccgagggtggccgcggtcggagtgaactgcactgctcccaggttcatccacgggcttatcctctccataaagaaggtgacgagcaagccgatcgtcgtgtatccgaacagcggggagtcgtacgtcgcggagacgaacgaatgggtggtgcgctagccttcgtcaccaactaactggactcggacggcgccacggggacggacgacttcgtgtcgcgcgtcggcgagtggaggcgggcgggggccgcgctcatcggagggtgctgcaggacgagcccggccacggtgcgagccatcgcgcgggcggtgcgcgaggcggaatacgacgatatccctgccgtggccgtgctctaagcttttgctagttcttccattcccggcggagaaactgaagacggtcatcttcggcaataaagaacacacgctcgagtgccacattgtgcgcagttgtctttgatgtggagaaactggagacggcgattcgtcgtcatgctcacgttccttcggcaataaaatgcacgtgcacgagtgccacattgttcgtagttttgaacgttcatgtgcacgagtacaatcagtttacactgatggtactgtttcctcgatctggatctgctcggctgcctatttttttctacgttggctgtagcacagctgtccttgcagcagcacaaacagcgctgcatcaccggcagtcaatttccaacttccgccgagcacaaagtgcacacctaaacaagcaccctggcaagaaagttccatggcgcatcctttgccaacccaacgacaccaccactggaagactaatgtttggagtaac

SEQ ID NO: 31823 - DNA, 875 bp, Zea Mays
gtcatctagtattatatacagtacattcattcgcttcgccacgtacgttcagcatcgtcgtctttcgaaaaatgtggttcggtggcggacccatcgacgcggcgggcgcgctgcgcggcttcgtgcgggaagcaggcgggtgcgcggtggtggacgggggtctcggcacggagctggaggcgcacggcgcggacctgcacgacgcgctctggagcgccaagtgcctcgcctccgccccgcatctcatccgcaaggtccatctggactacctcgaagcaggcgcggacgtcataatctctgcgtcctaccaggccacgatcgaggggttccagtcgaggggcttctcgcgggacgagagcgaggagctgctgcggcgtagcgtgcacgtcgcgcaggaggcgcgcagggtcttcgcggcggagggcgacaggtcatcgcgccgcggacgcccgccggcgctggtggcggcctcggtcgggagctacggggcgtaccgggcagacggctccgagtacagcggggattatggaaaatcgatgacgaaagaagatctgaagaacttccacaggaggcggctgcaggtgctggcaggcgcggggcccgacctcatcgccttcgagacgatcccaaacaaactcgaagcgcaggtctacgctgagctcctcgaggagaacggcatacggatcccagcctggttctccttcacttccaaggacggggtgaacgcggcgagcggagacccgatcaacgagtgcgcggccgtcgctgattcctgcccgagggtggccgcggtcggagtgaactgcactgctcccaggttcatccacgggcttatcctctccataaagaagtgacaacaacgaacttgctttggg

SEQ ID NO: 31824 - DNA, 1600 bp, Zea Mays
gtcatctagtattatatacagtacattcattcgcttcgccacgtacgttcagcatcgtcgtctttcgaaaaatgtggttcggtggcggacccatcgacgcggcgggcgcgctgcgcggcttcgtgcgggaagcaggcgggtgcgcggtggtggacgggggtctcggcacggagctggaggcgcacggcgcggacctgcacgacgcgctctggagcgccaagtgcctcgcctccgccccgcatctcatccgcaagcacaggtccatctggactacctcgaagcaggcgcggacgtcataatctctgcgtcctaccaggccacgatcgaggggttccagtcgaggggcttctcgcgggacgagagcgaggagctgctgcggcgtagcgtgcacgtcgcgcaggaggcgcgcagggtcttcgcggcggagggcgacaggtcatcgcgccgcggacgcccgccggcgctggtggcggcctcggtcgggagctacggggcgtaccgggcagacggctccgagtacagcggggattatggaaaatcgatgacgaaagaagatctgaagaacttccacaggaggcggctgcaggtgctggcaggcgcggggcccgacctcatcgccttcgagacgatcccaaacaaactcgaagcgcaggtctacgctgagctcctcgaggagaacggcatacggatcccagcctggttctccttcacttccaaggacggggtgaacgcggcgagcggagacccgatcaacgagtgcgcggccgtcgctgattcctgcccgagggtggccgcggtcggagtgaactgcactgctcccaggttcatccacgggcttatcctctccataaagaaggtgacgagcaagccgatcgtcgtgtatccgaacagcggggagtcgtacgtcgcggagacgaacgaatgggtggtgcgctagccttcgtcaccaactaactggactcggacggcgccacggggacggacgacttcgtgtcgcgcgtcggcgagtggaggcgggcgggggccgcgctcatcggagggtgctgcaggacgagcccggccacggtgcgagccatcgcgcgggcggtgcgcgaggcggaatacgacgatatccctgccgtggccgtgctctaagcttttgctagttcttccattcccggcggagaaactgaagacggtcatcttcggcaataaagaacacacgctcgagtgccacattgtgcgcagttgtctttgatgtggagaaactggagacggcgattcgtcgtcatgctcacgttccttcggcaataaaatgcacgtgcacgagtgccacattgttcgtagttttgaacgttcatgtgcacgagtacaatcagtttacactgatggtactgtttcctcgatctggatctgctcggctgcctatttttttctacgttggctgtagcacagctgtccttgcagcagcacaaacagcgctgcatcaccggcagtcaatttccaacttccgccgagcacaaagtgcacacctaaacaagcaccctggcaagaaagttccatggcgcatcctttgccaacccaacgacaccaccactggaagactaatgtttggagtaac

SEQ ID NO: 31825 - DNA, 1532 bp, Zea Mays
gtcatctagtattatatacagtacattcattcgcttcgccacgtacgttcagcatcgtcgtctttcgaaaaatgtggttcggtggcggacccatcgacgcggcgggcgcgctgcgcggcttcgtgcgggaagcaggcgggtgcgcggtggtggacgggggtctcggcacggagctggaggcgcacggcgcggacctgcacgacgcgctctggagcgccaagtgcctcgcctccgccccgcatctcatccgcaaggtccatctggactacctcgaagcaggcgcggacgtcataatctctgcgtcctaccaggccacgatcgaggggttccagtcgaggggcttctcgcgggacgagagcgaggagctgctgcggcgtagcgtgcacgtcgcgcaggaggcgcgcagggtcttcgcggcggagggcgacaggtcatcgcgccgcggacgcccgccggcgctggtggcggcctcggtcgggagctacggggcgtaccgggcagacggctccgagtacagcggggattatggaaaatcgatgacgaaagaagatctgaagaacttccacaggaggcggctgcaggtgctggcaggcgcggggcccgacctcatcgccttcgagacgatcccaaacaaactcgaagcgcaggtctacgctgagctcctcgaggagaacggcatacggatcccagcctggttctccttcacttccaaggacggggtgaacgcggcgagcggagacccgatcaacgagtgcgcggccgtcgctgattcctgcccgagggtggccgcggtcggagtgaactgcactgctcccaggtgacgagcaagccgatcgtcgtgtatccgaacagcggggagtcgtacgtcgcggagacgaacgaatgggtggactcggacggcgccacggggacggacgacttcgtgtcgcgcgtcggcgagtggaggcgggcgggggccgcgctcatcggagggtgctgcaggacgagcccggccacggtgcgagccatcgcgcgggcggtgcgcgaggcggaatacgacgatatccctgccgtggccgtgctctaagcttttgctagttcttccattcccggcggagaaactgaagacggtcatcttcggcaataaagaacacacgctcgagtgccacattgtgcgcagttgtctttgatgtggagaaactggagacggcgattcgtcgtcatgctcacgttccttcggcaataaaatgcacgtgcacgagtgccacattgttcgtagttttgaacgttcatgtgcacgagtacaatcagtttacactgatggtactgtttcctcgatctggatctgctcggctgcctatttttttctacgttggctgtagcacagctgtccttgcagcagcacaaacagcgctgcatcaccggcagtcaatttccaacttccgccgagcacaaagtgcacacctaaacaagcaccctggcaagaaagttccatggcgcatcctttgccaacccaacgacaccaccactggaagactaatgtttggagtaac

SEQ ID NO: 31826 - DNA, 643 bp, Zea Mays
cttgacacatgcaactcttaaaggaacaaaaaaaactagatccacacagaaatgctgtaacaataattcgtcatgtaacctggtgtaagtgtaatgaatcaaaaattggcaaggaacaagtcgttagccagttagcctgatcttacttgcaacgcctgatccacgtggccaagcgtttctgtattaagacgacaactctgttcatgtcaaaaagatacggccatacagggggagtgagggaactggcacacaatacatgagtggcagaatggatttcttgcgtaagaaaacgttgaaagaatgggttgtacacctagtgactccagaaacagccaccatattttcccaacaaaatgttacatacacagctctgttcttagatacatgtgacaagcacctaatttgcctgtcacgatggatatacaaaatcaattttgtaagagaaggggacaatactgacaaggttatatgattttcctccagcaagagaatagaaaacagagtttcatcattagttgttacgtcagctgatgtagtcccagctccgaggaaatgagtctgagcagcacttgtacaagctcccgtaccctagcttctcttgagacaacaagctcagaaaaagtgggaagcaaagacaataaat

SEQ ID NO: 31827 - DNA, 3623 bp, Zea Mays
atcaaacagctctacacttcataaaaacagtgtgagtggtgtggctgtggggagaaggtgctggtttttgctaacagccattccaatagatcagttttataagtatattgttttacactatttaactgcgattgtttgatgtgctaccccctctcccagaagctacgcaccaattcaattcccgagaaagtgattggggttttacatcttttatgcctttgttggatctgtatgattcaagtaaaggatatgttgtgaatgataaatgtatcatagaagctgaggttgctgtgcgtaaaactcttgatttctggaactatgactccaaaaggatgactggttatgttggcctgaagaatcaaggggctacctgttacatgaactcccttcttcagactttataccacattccttactttcggaaggctgtatatcatatgcctactacagagaatgatacgccttcagggaacattccattggctttgcaaagccttttttataaacttcagcatagtgataacagtgttgctacaaaagagctcaccaaatcttttggatgggatagctatgattcgttcatgcagcatgatgttcaagaattgaatagggtcctatgtgaaaagctggagaacaagatgaagggaaccactgtggaaggagcaatacaaaaattgttcgagggtcaccatatgaattatatcgagtgtattaatgttgagtctaaatctaccaggaaagagtcattctatgatcttgcactcgatgtcaagggatgttctgatgtctatgcatcatttgataagtatgttgcagtggagaggttagaaggtgataataagtatcaatctgaggaacatggtctacaggatgccaagaaaggaatgctttttattgactttcctccagttctgcaacttcagttaaaacggtttgaatatgattttgtgcgggatacgatgctcaagataaatgaccgttatgagttcccacttcaattggatcttgatagagatgatggaaaatatctttctccagacgcggatagaagtgtgcgtaacctatatactcttcatagtgtactggttcatagtggtggagttcatggaggacactattatgcctttattcgtccgaagctgtctgatcaatggtacaagttcgaggatgaacgagtgacgaaagaagacatgaaacgagcattggaggaacaatatggtggtgaagaagagctcccgcataccaaccctgggttggatactgcaccgcttagatttaccaagcattcaaatgcttacatgcttgtttacattcgagaaagtgacaaagataacattatctgtgatttggatgatgaagatatttcagaacaccttaaggttaggttgagaaaggaacatgaagagaaggagtacaagaaaaaggagaaggctgaggctcatatgttcactgcattgaaggtggcccgagactttgatattaaagagcaaattggaagacacatgcactttgatcttgtggactttgacagagttaatagcttccgtgcacctaagaacatgtcaatcaacgaagtcaaggaggagctttctaaagaatttggcatccctgtagaatgccaacgattttgggtatgggcaaaacgacagaactgtacctacagacccagtcgtccattaacctcccaggaggaaacatctactattggggttctcaaagatgcaacagtggcgaagttaccgaattctgaagtacgattgttcttggaggttcatttcagacaggagaaccaaccaattgctccttggaataccaaagaagatatattacttttcttcaagctctatgatcctgaaaaagaagacctaagatatgtcggcaatttttttgtgaaagcatcaggcaaaccatctgatatagtagaaaggctgaatcagattgctggatttctgtctgatgaagatattgagctctatgaggaaataaagtttgaaccagttgtgatgtgcgtacccattgagagtaatgcttcgttccgttcaagccagattgacaatggtgatataatatgctaccaaaagcactgtttgccagattcaatggatcgatatcgatatcctaccgtcccttctttctttgaatatattcataatagacagattgtccatttcagattgcttgagaaaccaaaagaagaaggcttctctcttgagctttcaaaatgctccacatatgatgatgttgttgagaaggttgctaagcaactacgtatggatgacccttctaaaatccggcttactcaacacaatccatcgtctcagcaacccaaacctcacttcatcaaatacaggagtcttaattatctttcggacatgctacataatcacaatcagatgtgtgacatattatattatgacatcctggatattcctttgcctgaactagaatctatgagatctctgaaggtcgctttccaaaatgccgcaaaccatgagatgtcgtttcacattatgcggttaccaaaaagtaactctctccttgatttgattgaagacttaaagtcaaaggttgaaatttcttgtaatgatgctgaatttcggttttttggagtctaccttcacaagatatgcaaggtgtatcaacctggagataagatagattcagttaatgaccatggacccttgtatattgaagaggttcccgaggatgaaaaaaatgccgggcctcatgaccgtttggttcatgtctatcattttgaatataatcatcatattcagtattttggtgaacctttcttcttcctaattcgtgatggtgaagctttgtcggatatgaaagtacggattcagaagagacttcaagttcctgatgagcagtttctaaagtggaaatttgctcatgttacattcagtaagccagaatacctccaagattcagatattgtaatgaacagattccatagacctgtttatggaggttgggaacaacaccttggattggagcatacagccaccaccccaaaaaggtcctacttaggcaacaaccagaaccgccattcttttgagaagcctgtgaggatttacaactaaagctaggaatactttttacatgcgatgaatgatgaacaggatatgaagcagtcttgttccaaaagcagtcttttggtgatgtacatggagcttttgcatagagtagtttatgtggcaattatctcaagaattttcatctggtggatgtacagggtccgtatagcaacatttccttgtagaaagttgaagctgtatatcgagggtggatttacatgtgttaatcttttcgaccccaagcctctgggaggctgtgaaccatagcctcatgaaatatgcctgttgttcattcagtgtttgtgtttttctcgtttgtcattattgtgcactcgcttttaatatgctcggtctattggaccgagcaggaaaatgatgttttaccttatagtggtctaactggttcattaggcgcgcaagtgcacagttgaattactcctttggaagcttgaaacgagaaacataggaaatgtctatgacggtggacatgccaagaccccaagtcctcggtttcaaggcctcccaccgctggctttctag

SEQ ID NO: 31828 - DNA, 3558 bp, Zea Mays
cactatttaactgcgattgtttgatgtgctaccccctctcccagaagctacgcaccaattcaattcccgagaaagtgattggggttttacatcttttatgcctttgttggatctgtatgattcaagtaaaggatatgttgtgaatgataaatgtatcatagaagctgaggttgctgtgcgtaaaactcttgatttctggaactatgactccaaaaggatgactggttatgttggcctgaagaatcaaggggctacctgttacatgaactcccttcttcagactttataccacattccttactttcggaaggctgtatatcatatgcctactacagagaatgatacgccttcagggaacattccattggctttgcaaagccttttttataaacttcagcatagtgataacagtgttgctacaaaagagctcaccaaatcttttggatgggatagctatgattcgttcatgcagcatgatgttcaagaattgaatagggtcctatgtgaaaagctggagaacaagatgaagggaaccactgtggaaggagcaatacaaaaattgttcgagggtcaccatatgaattatatcgagtgtattaatgttgagtctaaatctaccaggaaagagtcattctatgatcttgcactcgatgtcaagggatgttctgatgtctatgcatcatttgataagtatgttgcagtggagaggttagaaggtgataataagtatcaatctgaggaacatggtctacaggatgccaagaaaggaatgctttttattgactttcctccagttctgcaacttcagttaaaacggtttgaatatgattttgtgcgggatacgatgctcaagataaatgaccgttatgagttcccacttcaattggatcttgatagagatgatggaaaatatctttctccagacgcggatagaagtgtgcgtaacctatatactcttcatagtgtactggttcatagtggtggagttcatggaggacactattatgcctttattcgtccgaagctgtctgatcaatggtacaagttcgaggatgaacgagtgacgaaagaagacatgaaacgagcattggaggaacaatatggtggtgaagaagagctcccgcataccaaccctgggttggatactgcaccgcttagatttaccaagcattcaaatgcttacatgcttgtttacattcgagaaagtgacaaagataacattatctgtgatttggatgatgaagatatttcagaacaccttaaggttaggttgagaaaggaacatgaagagaaggagtacaagaaaaaggagaaggctgaggctcatatgttcactgcattgaaggtggcccgagactttgatattaaagagcaaattggaagacacatgcactttgatcttgtggactttgacagagttaatagcttccgtgcacctaagaacatgtcaatcaacgaagtcaaggaggagctttctaaagaatttggcatccctgtagaatgccaacgattttgggtatgggcaaaacgacagaactgtacctacagacccagtcgtccattaacctcccaggaggaaacatctactattggggttctcaaagatgcaacagtggcgaagttaccgaattctgaagtacgattgttcttggaggttcatttcagacaggagaaccaaccaattgctccttggaataccaaagaagatatattacttttcttcaagctctatgatcctgaaaaagaagacctaagatatgtcggcaatttttttgtgaaagcatcaggcaaaccatctgatatagtagaaaggctgaatcagattgctggatttctgtctgatgaagatattgagctctatgaggaaataaagtttgaaccagttgtgatgtgcgtacccattgagagtaatgcttcgttccgttcaagccagattgacaatggtgatataatatgctaccaaaagcactgtttgccagattcaatggatcgatatcgatatcctaccgtcccttctttctttgaatatattcataatagacagattgtccatttcagattgcttgagaaaccaaaagaagaaggcttctctcttgagctttcaaaatgctccacatatgatgatgttgttgagaaggttgctaagcaactacgtatggatgacccttctaaaatccggcttactcaacacaatccatcgtctcagcaacccaaacctcacttcatcaaatacaggagtcttaattatctttcggacatgctacataatcacaatcagaatctatgagatctctgaaggtcgctttccaaaatgccgcaaaccatgagatgtcgtttcacattatgcggttaccaaaaagtaactctctccttgatttgattgaagacttaaagtcaaaggttgaaatttcttgtaatgatgctgaatttcggttttttggagtctaccttcacaagatatgcaaggtgtatcaacctggagataagatagattcagttaatgaccatggacccttgtatattgaagaggttcccgaggatgaaaaaaatgccgggcctcatgaccgtttggttcatgtctatcattttgaatataatcatcatattcagtattttggtgaacctttcttcttcctaattcgtgatggtgaagctttgtcggatatgaaagtacggattcagaagagacttcaagttcctgatgagcagtttctaaagtggaaatttgctcatgttacattcagtaagccagaatacctccaagattcagatattgtaatgaacagattccatgtgagataagttttccttttggcgaaagaatcctttcgcaagaacattcattgtaacattgaagtattgtataagcttttcctggtattgttttagaaacagagacctgtttatggaggttgggaacaacaccttggattggagcatacagccaccaccccaaaaaggtcctacttaggcaacaaccagaaccgccattcttttgagaagcctgtgaggatttacaactaaagctaggaatactttttacatgcgatgaatgatgaacaggatatgaagcagtcttgttccaaaagcagtcttttggtgatgtacatggagcttttgcatagagtagtttatgtggcaattatctcaagaattttcatctggtggatgtacagggtccgtatagcaacatttccttgtagaaagttgaagctgtatatcgagggtggatttacatgtgttaatcttttcgaccccaagcctctgggaggctgtgaaccatagcctcatgaaatatgcctgttgttcattcagtgtttgtgtttttctcgtttgtcattattgtgcactcgcttttaatatgctcggtctattggaccgagcaggaaaatgatgttttaccttatagtggtctaactggttcattaggcgcgcaagtgcacagttgaattactcctttggaagcttgaaacgagaaacataggaaatgtctatgacggtggacatgccaagaccccaagtcctcggtttcaaggcctcccaccgctggctttctag

SEQ ID NO: 31829 - DNA, 3459 bp, Zea Mays
ccagaagctacgcaccaattcaattcccgagaaagtgattggggttttacatcttttatgcctttgttggatctgtatgattcaagtaaaggatatgttgtgaatgataaatgtatcatagaagctgaggttgctgtgcgtaaaactcttgatttctggaactatgactccaaaaggatgactggttatgttggcctgaagaatcaaggggctacctgttacatgaactcccttcttcagactttataccacattccttactttcggaaggctgtatatcatatgcctactacagagaatgatacgccttcagggaacattccattggctttgcaaagccttttttataaacttcagcatagtgataacagtgttgctacaaaagagctcaccaaatcttttggatgggatagctatgattcgttcatgcagcatgatgttcaagaattgaatagggtcctatgtgaaaagctggagaacaagatgaagggaaccactgtggaaggagcaatacaaaaattgttcgagggtcaccatatgaattatatcgagtgtattaatgttgagtctaaatctaccaggaaagagtcattctatgatcttgcactcgatgtcaagggatgttctgatgtctatgcatcatttgataagtatgttgcagtggagaggttagaaggtgataataagtatcaatctgaggaacatggtctacaggatgccaagaaaggaatgctttttattgactttcctccagttctgcaacttcagttaaaacggtttgaatatgattttgtgcgggatacgatgctcaagataaatgaccgttatgagttcccacttcaattggatcttgatagagatgatggaaaatatctttctccagacgcggatagaagtgtgcgtaacctatatactcttcatagtgtactggttcatagtggtggagttcatggaggacactattatgcctttattcgtccgaagctgtctgatcaatggtacaagttcgaggatgaacgagtgacgaaagaagacatgaaacgagcattggaggaacaatatggtggtgaagaagagctcccgcataccaaccctgggttggatactgcaccgcttagatttaccaagcattcaaatgcttacatgcttgtttacattcgagaaagtgacaaagataacattatctgtgatttggatgatgaagatatttcagaacaccttaaggttaggttgagaaaggaacatgaagagaaggagtacaagaaaaaggagaaggctgaggctcatatgttcactgcattgaaggtggcccgagactttgatattaaagagcaaattggaagacacatgcactttgatcttgtggactttgacagagttaatagcttccgtgcacctaagaacatgtcaatcaacgaagtcaaggaggagctttctaaagaatttggcatccctgtagaatgccaacgattttgggtatgggcaaaacgacagaactgtacctacagacccagtcgtccattaacctcccaggaggaaacatctactattggggttctcaaagatgcaacagtggcgaagttaccgaattctgaagtacgattgttcttggaggttcatttcagacaggagaaccaaccaattgctccttggaataccaaagaagatatattacttttcttcaagctctatgatcctgaaaaagaagacctaagatatgtcggcaatttttttgtgaaagcatcaggcaaaccatctgatatagtagaaaggctgaatcagattgctggatttctgtctgatgaagatattgagctctatgaggaaataaagtttgaaccagttgtgatgtgcgtacccattgagagtaatgcttcgttccgttcaagccagattgacaatggtgatataatatgctaccaaaagcactgtttgccagattcaatggatcgatatcgatatcctaccgtcccttctttctttgaatatattcataatagacagattgtccatttcagattgcttgagaaaccaaaagaagaaggcttctctcttgagctttcaaaatgctccacatatgatgatgttgttgagaaggttgctaagcaactacgtatggatgacccttctaaaatccggcttactcaacacaatccatcgtctcagcaacccaaacctcacttcatcaaatacaggagtcttaattatctttcggacatgctacataatcacaatcagatgtgtgacatattatattatgacatcctggatattcctttgcctgaactagaatctatgagatctctgaaggtcgctttccaaaatgccgcaaaccatgagatgtcgtttcacattatgcggttaccaaaaagtaactctctccttgatttgattgaagacttaaagtcaaaggttgaaatttcttgtaatgatgctgaatttcggttttttggagtctaccttcacaagatatgcaaggtgtatcaacctggagataagatagattcagttaatgaccatggacccttgtatattgaagaggttcccgaggatgaaaaaaatgccgggcctcatgaccgtttggttcatgtctatcattttgaatataatcattattttggtgaacctttcttcttcctaattcgtgatggtgaagctttgtcggatatgaaagtacggattcagaagagacttcaagttcctgatgagcagtttctaaagtggaaatttgctcatgttacattcagtaagccagaatacctccaagattcagatattgtaatgaacagattccatagacctgtttatggaggttgggaacaacaccttggattggagcatacagccaccaccccaaaaaggtcctacttaggcaacaaccagaaccgccattcttttgagaagcctgtgaggatttacaactaaagctaggaatactttttacatgcgatgaatgatgaacaggatatgaagcagtcttgttccaaaagcagtcttttggtgatgtacatggagcttttgcatagagtagtttatgtggcaattatctcaagaattttcatctggtggatgtacagggtccgtatagcaacatttccttgtagaaagttgaagctgtatatcgagggtggatttacatgtgttaatcttttcgaccccaagcctctgggaggctgtgaaccatagcctcatgaaatatgcctgttgttcattcagtgtttgtgtttttctcgtttgtcattattgtgcactcgcttttaatatgctcggtctattggaccgagcaggaaaatgatgttttaccttatagtggtctaactggttcattaggcgcgcaagtgcacagttgaattactcctttggaagcttgaaacgagaaacataggaaatgtctatgacggtggacatgccaagaccccaagtcctcggtttcaaggcctcccaccgctggctttctag

SEQ ID NO: 31830 - DNA, 3397 bp, Zea Mays
ccagaagctacgcaccaattcaattcccgagaaagtgattggggttttacatcttttatgcctttgttggatctgtatgattcaagtaaaggatatgttgtgaatgataaatgtatcatagaagctgaggttgctgtgcgtaaaactcttgatttctggaactatgactccaaaaggatgactggttatgttggcctgaagaatcaaggggctacctgttacatgaactcccttcttcagactttataccacattccttactttcggaaggctgtatatcatatgcctactacagagaatgatacgccttcagggaacattccattggctttgcaaagccttttttataaacttcagcatagtgataacagtgttgctacaaaagagctcaccaaatcttttggatgggatagctatgattcgttcatgcagcatgatgttcaagaattgaatagggtcctatgtgaaaagctggagaacaagatgaagggaaccactgtggaaggagcaatacaaaaattgttcgagggtcaccatatgaattatatcgagtgtattaatgttgagtctaaatctaccaggaaagagtcattctatgatcttgcactcgatgtcaagggatgttctgatgtctatgcatcatttgataagtatgttgcagtggagaggttagaaggtgataataagtatcaatctgaggaacatggtctacaggatgccaagaaaggaatgctttttattgactttcctccagttctgcaacttcagttaaaacggtttgaatatgattttgtgcgggatacgatgctcaagataaatgaccgttatgagttcccacttcaattggatcttgatagagatgatggaaaatatctttctccagacgcggatagaagtgtgcgtaacctatatactcttcatagtgtactggttcatagtggtggagttcatggaggacactattatgcctttattcgtccgaagctgtctgatcaatggtacaagttcgaggatgaacgagtgacgaaagaagacatgaaacgagcattggaggaacaatatggtggtgaagaagagctcccgcataccaaccctgggttggatactgcaccgcttagatttaccaagcattcaaatgcttacatgcttgtttacattcgagaaagtgacaaagataacattatctgtgatttggatgatgaagatatttcagaacaccttaaggttaggttgagaaaggaacatgaagagaaggagtacaagaaaaaggagaaggctgaggctcatatgttcactgcattgaaggtggcccgagactttgatattaaagagcaaattggaagacacatgcactttgatcttgtggactttgacagagttaatagcttccgtgcacctaagaacatgtcaatcaacgaagtcaaggaggagctttctaaagaatttggcatccctgtagaatgccaacgattttgggtatgggcaaaacgacagaactgtacctacagacccagtcgtccattaacctcccaggaggaaacatctactattggggttctcaaagatgcaacagtggcgaagttaccgaattctgaagtacgattgttcttggaggttcatttcagacaggagaaccaaccaattgctccttggaataccaaagaagatatattacttttcttcaagctctatgatcctgaaaaagaagacctaagatatgtcggcaatttttttgtgaaagcatcaggcaaaccatctgatatagtagaaaggctgaatcagattgctggatttctgtctgatgaagatattgagctctatgaggaaataaagtttgaaccagttgtgatgtgcgtacccattgagagtaatgcttcgttccgttcaagccagattgacaatggtgatataatatgctaccaaaagcactgtttgccagattcaatggatcgatatcgatatcctaccgtcccttctttctttgaatatattcataatagacagattgtccatttcagattgcttgagaaaccaaaagaagaaggcttctctcttgagctttcaaaatgctccacatatgatgatgttgttgagaaggttgctaagcaactacgtatggatgacccttctaaaatccggcttactcaacacaatccatcgtctcagcaacccaaacctcacttcatcaaatacaggagtcttaattatctttcggacatgctacataatcacaatcagatgtgtgacatattatattatgacatcctggatattcctttgcctgaactagaatctatgagatctctgaaggtcgctttccaaaatgccgcaaaccatgagatgtcgtttcacattatgcggttaccaaaaagtaactctctccttgatttgattgaagacttaaagtcaaaggttgaaatttcttgtaatgatgctgaatttcggttttttggagtctaccttcacaagatatgcaaggtgtatcaacctggagataagatagattcagttaatgaccatggacccttgtatattgaagaggttcccgaggatgaaaaaaatgccgggcctcatgaccgtttggttcatgtctatcattttgaatataatcatcatattcagtattttggtgaacctttcttcttcctaattcgtgatggtgaagctttgtcggatatgaaagtacggattcagaagagacttcaagttcctgatgagcagtttctaaagtggaaatttgctcatgttacattcagtaagccagaatacctccaagattcagatattgtaatgaacagattccataaacagagacctgtttatggaggttgggaacaacaccttggattggagcatacagccaccaccccaaaaaggtcctacttaggcaacaaccagaaccgccattcttttgagaagcctgtgaggatttacaactaaagctaggaatactttttacatgcgatgaatgatgaacaggatatgaagcagtcttgttccaaaagcagtcttttgggtccgtatagcaacatttccttgtagaaagttgaagctgtatatcgagggtggatttacatgtgttaatcttttcgaccccaagcctctgggaggctgtgaaccatagcctcatgaaatatgcctgttgttcattcagtgtttgtgtttttctcgtttgtcattattgtgcactcgcttttaatatgctcggtctattggaccgagcaggaaaatgatgttttaccttatagtggtctaactggttcattaggcgcgcaagtgcacagttgaattactcctttggaagcttgaaacgagaaacataggaaatgtctatgacggtggacatgccaagaccccaagtcctcggtttcaaggcctcccaccgctggctttctag

SEQ ID NO: 31831 - DNA, 1115 bp, Zea Mays
ttcttgtccacgctgcttcttgtgtgtatcaacctggagataagatagattcagttaatgaccatggacccttgtatattgaagaggttcccgaggatgaaaaaaatgccgggcctcatgaccgtttggttcatgtctatcattttgaatataatcatcatattcagtattttggtgaacctttcttcttcctaattcgtgatggtgaagctttgtcggatatgaaagtacggattcagaagagacttcaagttcctgatgagcagtttctaaagtggaaatttgctcatgttacattcagtaagccagaatacctccaagattcagatattgtaatgaacagattccatgtgagataagttttccttttggcgaaagaatcctttcgcaagaacattcattgtaacattgaagtattgtataagcttttcctggtattgttttagaaacagagacctgtttatggaggttgggaacaacaccttggattggagcatacagccaccaccccaaaaaggtcctacttaggcaacaaccagaaccgccattcttttgagaagcctgtgaggatttacaactaaagctaggaatactttttacatgcgatgaatgatgaacaggatatgaagcagtcttgttccaaaagcagtcttttggtgatgtacatggagcttttgcatagagtagtttatgtggcaattatctcaagaattttcatctggtggatgtacagggtccgtatagcaacatttccttgtagaaagttgaagctgtatatcgagggtggatttacatgtgttaatcttttcgaccccaagcctctgggaggctgtgaaccatagcctcatgaaatatgcctgttgttcattcagtgtttgtgtttttctcgtttgtcattattgtgcactcgcttttaatatgctcggtctattggaccgagcaggaaaatgatgttttaccttatagtggtctaactggttcattaggcgcgcaagtgcacagttgaattactcctttggaagcttgaaacgagaaacataggaaatgtctatgacggtggacatgccaagaccccaagtcctcggtttcaaggcctcccaccgctggctttctag

SEQ ID NO: 31832 - DNA, 977 bp, Zea Mays
caaaccacagccaccgctagcaccaccgtcgctaccactactagcagcaaagcagcaggatcttcgaagtggtgccgtggcgctgccctgggtacatgttccaggagtcggggccggtgggcacgacgaaccagagccgcaccgaggtgcgcgtgctcatggcggagctcgccgctgacttcctgggaacgcctagaccaggacgacgactcggttcgcggacgaagccagccgtagtcctcccttctcagatctgcgcgctcgtggtgcaggagcgctcctggccccccgccgcgacggtggccagggccccctcgctggcgtcccgatcgcgtcaaccacctcaaccgcgctggcgtccgcctccacgatgtcaagaggtgtatcttgtttctgcagtgagttgctcatctggagacaatcgagcgtagattgttgaaggcacatctccaatattcctgcacaaaaacacaatgcgcatcaactaacagaagtgcaacaccctctcatctgagtgttcacatctttctttctttttttggctgattcgtttaaacctcactgtgtacagggcagaatcacagtccctgcatcgctggcttgccatgtttttctctcttttgccacctcctaggtcaactattgctattgcttccggttcagatggaaaaacacttgcatccataagatcattttatacaaacttaactgaaagacatttattttgttagtggcgaccatacagtgaaattaattgactgtcatatagggaaatgtttgaaagttttgagtggacatcataatacaaactgaactgaaatacgtttattttttttcagttatcagcctcatcaaactgtattgaaagacaccaaactgtattgaaagacaccaaactgaactgaaagacaacaaacatgccagaccgtagtccttagagcttggaagggctgcacatccgacaagctacatggttg

SEQ ID NO: 31833 - DNA, 3655 bp, Zea Mays
tgcctaccaagtcacctctttgcccggttggccgccgcgcccagtggccccctcctagcctaccgctccccgatccaatctgtgccgtccgttctcccgccgcaaccttcgtcttgtcctcaaggccggcggcggccactgcccgccttacaccatgaaaccaccacggctctttcccctcctccgccgccacctctcatccgccgccgacgccaccgccgacgccgcggagctttccagcgcgctatccgtggcgccctcctcagatgcgaaacgcgatcttgccatcctgctccgccgccttggcggccgcggtctcgcctccgccctctcgtcccttccggctccgcttcccgcctcctccgccctgcgcctccttcagcatattctctccgacacccacgcgtccgcctcccgccacgccgaggacctcctgtctcctcgcgtctctacgctcctcctaccatcgctcgtcgccgatggcgcctcgctaccgtccgcgcgccgcctcatctcacgcctcctcttcttcaaccctctttctgtcgccgcagcggctatcgcggactccgactgcactgccacagcggaccttctcgtccgcgcctgcctcaactcgcctgcccccggatctctgtcctgtgccgccgatgcctttctcgagctttccacacgtggtgcatcaccgtccatcaagacatgcaatatccttgtcgaagccctaggttgtggtggccaactggacctggcccgcaaggtgttcggagaaatgcgggatggcaacgctgttgctcctgatgtgtacacatacacggtgatgattaaggcactctgcagggctggagagattgatgctgcttttgtgatgcttgcggagttggaacggtctggtatccagccgacggttgtcacttacaacgtgctaatggatgcattgtgcaggagtgggagggtggaagaggcctttcagttgaaggggagaatggttgaaggcaggctgagaccaagcattgtcacatttggcatcctgatcaatggtcttgcaaggggccaacggtttggtgaggttgatgcagtgctgcaggagatggagggttttgggatcacccccaatgaggttatttacaatcagctgatcggttggcattgtagggaaggacattgctcagaggcgcttaggctgtttgatgaaatggtctcaaaggggataaagcagacagtggtgacttacaacttgattgcgaaggctctgtgcaaggaaggagaaatggaacatgctgagcagatattggatgagatgttgttggctggaatgacggttcattgcagcttgtttaatagtgtggttgcatggcatcttcgcggaactggaagactggatgtggtgctaaggcttataagagaaatggttgcgagatttctgaaaccaaatgatgctgtgatgacagcttgtatccaggagctttgcaaaagagggaaacacgaagaagcagctgaaatttggttcctagtattgggtaaaggtttgggtgtcaatattgcaacatccaatgcgttgattcatgggctttgccaaggtaacaacatgaaagaagctactaaggttctaaaggctatggtggatagcggggttgaattcgatagaatcacatataatataatgattcaattctgctgcaaagccagtaaaatggaggaagcaatacaacttcgtgatgacatgatcaaaagagggtttaagccagacctcttcacgtttaatactttcctacgcgcttactgtaatttgggtaaggtggaagacatccttcacttgctggatcagatgaaaagtgagggtcttaagccagatattgtgacatatggtaccataatagatggttactgcaaagcgaaggatgtgcataaggcgaataaatatttgattgaattgattaaaaatgggttaagaccgaatgcagtcatctataatgctcttattggtggttatggtaggaatggtagcatttctgatgcaattggtgttcttgacactatgaagcataatggcatacaaccaacaccaataacttacaacagccttatgtattggatgtgtcatgctggtcttgttgaagaggccaaagaaattttcgcgcaatgtatactaaagaacattgagcttggtgtaattggctacacaattataatacaaggtttttgcaaaataggaaaaattgatgaagctgtgatgtactttaaggaaatgcattacagggatatacgtccaaataagatgacctacaccactttgatgtatgcctattgcaaatgtggcaacaaagaagaagctttcaagctttttgacgagatggtgagctcaggcattgttcctgatactgtttcttacaatacactaatttcagggtgttgtgaggtggattcattggataagattgtagaaagtcccgctgaaatgtcctcatgagttttggaacaaggtggttgtttgtcaacgtttttgataatggataactacaccctggagccagagaagctgtgtctagtgttgaattatgtgtaaccaaggaagatgtaagaaaggagactcaaactttgagcttgatatatcaccctaatgtcatcaggtcttagcgctcatttgttgtgggtcaaaacctttgggtagtagtgctgttcatgctagaaggttcatgtttgcaccaaatgaaggttggatatctgatggttttgaggagccagttattgcctctattctaaaggaaacactcaaagctctagactacctccataggcaggatatctttattgccatcccggtgtagtcaagcttggggactttggtgtctctgcttgcatgtttgataggaggcaaggggctatgaatacatttgttggaacactgtgctggaattaggatggctccagaagttctccagcttcaaactggatataatttcaagtatatgagctgatatggtctttggaataactgcactggaggtggcacatggacatgctccctttttgaagtaccctcctatgaagctaaaggattcagctagctttgaagagaatgccttcttcagaaatcagaacaagaaacacttttcatgggtgagtgttaataaggggtcagtgcatgaaactttgatattgaggatctaaaaagccagccatcactgatttgcaatgatgatgcacctgaaatagaagaacatgatgacactgctagaataactgacttcgataaagtttgtttgagtcctttgtctttattttaaaaatgccttcgagtcctttgtctttattttaagaaatgcattagtcatgtgtactaggaataatgacataaatatgatgtaagcttcacagagtgatagaagaaatcatatataagatcatcatctgtcactaggtgagtacccgtgcgttgcaacggggacatataataacataataacttatatataaaatgtgtcttatattgttataagaaaatgtttcataattcatttgtaatcctagtcatacataaattttgttattttaatttagctgtttcactactacattacaaccaccagtatcatgcagacttcgatatatgccacgatttgcatggtctcatcattgaagagcacgtgccacacct

SEQ ID NO: 31834 - DNA, 4626 bp, Zea Mays
tgcctaccaagtcacctctttgcccggttggccgccgcgcccagtggccccctcctagcctaccgctccccgatccaatctgtgccgtccgttctcccgccgcaaccttcgtcttgtcctcaaggccggcggcggccactgcccgccttacaccatgaaaccaccacggctctttcccctcctccgccgccacctctcatccgccgccgacgccaccgccgacgccgcggagctttccagcgcgctatccgtggcgccctcctcagatgcgaaacgcgatcttgccatcctgctccgccgccttggcggccgcggtctcgcctccgccctctcgtcccttccggctccgcttcccgcctcctccgccctgcgcctccttcagcatattctctccgacacccacgcgtccgcctcccgccacgccgaggacctcctgtctcctcgcgtctctacgctcctcctaccatcgctcgtcgccgatggcgcctcgctaccgtccgcgcgccgcctcatctcacgcctcctcttcttcaaccctctttctgtcgccgcagcggctatcgcggactccgactgcactgccacagcggaccttctcgtccgcgcctgcctcaactcgcctgcccccggatctctgtcctgtgccgccgatgcctttctcgagctttccacacgtggtgcatcaccgtccatcaagacatgcaatatccttgtcgaagccctaggttgtggtggccaactggacctggcccgcaaggtgttcggagaaatgcgggatggcaacgctgttgctcctgatgtgtacacatacacggtgatgattaaggcactctgcagggctggagagattgatgctgcttttgtgatgcttgcggagttggaacggtctggtatccagccgacggttgtcacttacaacgtgctaatggatgcattgtgcaggagtgggagggtggaagaggcctttcagttgaaggggagaatggttgaaggcaggctgagaccaagcattgtcacatttggcatcctgatcaatggtcttgcaaggggccaacggtttggtgaggttgatgcagtgctgcaggagatggagggttttgggatcacccccaatgaggttatttacaatcagctgatcggttggcattgtagggaaggacattgctcagaggcgcttaggctgtttgatgaaatggtctcaaaggggataaagcagacagtggtgacttacaacttgattgcgaaggctctgtgcaaggaaggagaaatggaacatgctgagcagatattggatgagatgttgttggctggaatgacggttcattgcagcttgtttaatagtgtggttgcatggcatcttcgcggaactggaagactggatgtggtgctaaggcttataagagaaatggttgcgagatttctgaaaccaaatgatgctgtgatgacagcttgtatccaggagctttgcaaaagagggaaacacgaagaagcagctgaaatttggttcctagtattgggtaaaggtttgggtgtcaatattgcaacatccaatgcgttgattcatgggctttgccaaggtaacaacatgaaagaagctactaaggttctaaaggctatggtggatagcggggttgaattcgatagaatcacatataatataatgattcaattctgctgcaaagccagtaaaatggaggaagcaatacaacttcgtgatgacatgatcaaaagagggtttaagccagacctcttcacgtttaatactttcctacgcgcttactgtaatttgggtaaggtggaagacatccttcacttgctggatcagatgaaaagtgagggtcttaagccagatattgtgacatatggtaccataatagatggttactgcaaagcgaaggatgtgcataaggcgaataaatatttgattgaattgattaaaaatgggttaagaccgaatgcagtcatctataatgctcttattggtggttatggtaggaatggtagcatttctgatgcaattggtgttcttgacactatgaagcataatggcatacaaccaacaccaataacttacaacagccttatgtattggatgtgtcatgctggtcttgttgaagaggccaaagaaattttcgcgcaatgtatactaaagaacattgagcttggtgtaattggctacacaattataatacaaggtttttgcaaaataggaaaaattgatgaagctgtgatgtactttaaggaaatgcattacagggatatacgtccaaataagatgacctacaccactttgatgtatgcctattgcaaatgtggcaacaaagaagaagctttcaagctttttgacgagatggtgagctcaggcattgttcctgatactgtttcttacaatacactaatttcagggtgttgtgaggtggattcattggataagattgtagaaagtcccgctgaaatgtcctcatgagttttggaacaaggtggttgtttgtcaacgtttttgataatggataactacaccctggagccagagaagctgtgtctagtgttgaattatgtgtaaccaaggaagatgtaagaaaggagactcaaactttgagcttgatatatcaccctaatgtcatcaggtcttagcgctcatttgttgtgggtcaaaacctttgggtagtagtgctgttcatgctagaaggttcatgtttgcaccaaatgaaggttggatatctgatggttttgaggagccagttattgcctctattctaaaggaaacactcaaagctctagactacctccataggcaaggacatattttcaccatgatgtgaaggcaggatatctttattgccatcccggtgtagtcaagcttggggactttggtgtctctgcttgcatgtttgataggaggcaaggggctatgaatacatttgttggaacactgtgctggaattaggatggctccagaagttctccagcttcaaactggatataatttcaagtatatgcatatcatcaacatcaagttggaacttttactctgcccagagattaggtgatcaccagattctggttggttccagtttgaggtttctgggaaaacttccctattatcttttttacttataatatagcttatattttactgaaataacaaaaataaaaaaacctgcatgcggggtaaggccgcccccacaacattacattaagaagatcttctcacgtaggtcgacacccctctccccccgcgaacccttgcccacccatacacacagtggcagaggacgtagaaaaatttaggtatagctctacattgtataatatttagcatgcaaccaattaaattgtagaataaaaatacacaacatatatagaactagaacattatttaaaatgagaataaattgctaagaaacacgtgcacggcaaataacacataatataacgttataccgataattttactggatacgtcttggagacataggtaattgtatttgctcattcttttctgaaatgccttcttatataatacttaaaagacgagttctaacttatatgatttgtgattgttatcacatttcttaattaaatgcatttccaattaggtatggcttgggctatatccagccatagtgggtcctctgcccctgcatacacagcgacaccatagccgatgtgaaaacaactgcgactgaagccagatcattagacctgtgctttgacatgggacagaaaaggggattttttaaccacatcctaaaatttgctccaacggggagtcgaactcaggagtcaggacctaaggaatgctactcagactaactaaccaactcatctagaatgatcatgtttttaacacgttgaccttttttatgtgtacttttacttttcatattagttgctattgtaagcgacatcttctaacaactatcgactctttgtacagagctgatatggtctttggaataactgcactggaggtggcacatggacatgctccctttttgaagtaccctcctatgaagctaaaggattcagctagctttgaagagaatgccttcttcagaaatcagaacaagaaacacttttcatgggtgagtgttaataaggggtcagtgcatgaaactttgatattgaggatctaaaaagccagccatcactgatttgcaatgatgatgcacctgaaatagaagaacatgatgacactgctagaataactgacttcgataaagtttgtttgagtcctttgtctttattttaaaaatgccttcgagtcctttgtctttattttaagaaatgcattagtcatgtgtactaggaataatgacataaatatgatgtaagcttcacagagtgatagaagaaatcatatataagatcatcatctgtcactaggtgagtacccgtgcgttgcaacggggacatataataacataataacttatatataaaatgtgtcttatattgttataagaaaatgtttcataattcatttgtaatcctagtcatacataaattttgttattttaatttagctgtttcactactacattacaaccaccagtatcatgcagacttcgatatatgccacgatttgcatggtctcatcattgaagagcacgtgccacacct

SEQ ID NO: 31835 - DNA, 3764 bp, Zea Mays
tgcctaccaagtcacctctttgcccggttggccgccgcgcccagtggccccctcctagcctaccgctccccgatccaatctgtgccgtccgttctcccgccgcaaccttcgtcttgtcctcaaggccggcggcggccactgcccgccttacaccatgaaaccaccacggctctttcccctcctccgccgccacctctcatccgccgccgacgccaccgccgacgccgcggagctttccagcgcgctatccgtggcgccctcctcagatgcgaaacgcgatcttgccatcctgctccgccgccttggcggccgcggtctcgcctccgccctctcgtcccttccggctccgcttcccgcctcctccgccctgcgcctccttcagcatattctctccgacacccacgcgtccgcctcccgccacgccgaggacctcctgtctcctcgcgtctctacgctcctcctaccatcgctcgtcgccgatggcgcctcgctaccgtccgcgcgccgcctcatctcacgcctcctcttcttcaaccctctttctgtcgccgcagcggctatcgcggactccgactgcactgccacagcggaccttctcgtccgcgcctgcctcaactcgcctgcccccggatctctgtcctgtgccgccgatgcctttctcgagctttccacacgtggtgcatcaccgtccatcaagacatgcaatatccttgtcgaagccctaggttgtggtggccaactggacctggcccgcaaggtgttcggagaaatgcgggatggcaacgctgttgctcctgatgtgtacacatacacggtgatgattaaggcactctgcagggctggagagattgatgctgcttttgtgatgcttgcggagttggaacggtctggtatccagccgacggttgtcacttacaacgtgctaatggatgcattgtgcaggagtgggagggtggaagaggcctttcagttgaaggggagaatggttgaaggcaggctgagaccaagcattgtcacatttggcatcctgatcaatggtcttgcaaggggccaacggtttggtgaggttgatgcagtgctgcaggagatggagggttttgggatcacccccaatgaggttatttacaatcagctgatcggttggcattgtagggaaggacattgctcagaggcgcttaggctgtttgatgaaatggtctcaaaggggataaagcagacagtggtgacttacaacttgattgcgaaggctctgtgcaaggaaggagaaatggaacatgctgagcagatattggatgagatgttgttggctggaatgacggttcattgcagcttgtttaatagtgtggttgcatggcatcttcgcggaactggaagactggatgtggtgctaaggcttataagagaaatggttgcgagatttctgaaaccaaatgatgctgtgatgacagcttgtatccaggagctttgcaaaagagggaaacacgaagaagcagctgaaatttggttcctagtattgggtaaaggtttgggtgtcaatattgcaacatccaatgcgttgattcatgggctttgccaaggtaacaacatgaaagaagctactaaggttctaaaggctatggtggatagcggggttgaattcgatagaatcacatataatataatgattcaattctgctgcaaagccagtaaaatggaggaagcaatacaacttcgtgatgacatgatcaaaagagggtttaagccagacctcttcacgtttaatactttcctacgcgcttactgtaatttgggtaaggtggaagacatccttcacttgctggatcagatgaaaagtgagggtcttaagccagatattgtgacatatggtaccataatagatggttactgcaaagcgaaggatgtgcataaggcgaataaatatttgattgaattgattaaaaatgggttaagaccgaatgcagtcatctataatgctcttattggtggttatggtaggaatggtagcatttctgatgcaattggtgttcttgacactatgaagcataatggcatacaaccaacaccaataacttacaacagccttatgtattggatgtgtcatgctggtcttgttgaagaggccaaagaaattttcgcgcaatgtatactaaagaacattgagcttggtgtaattggctacacaattataatacaaggtttttgcaaaataggaaaaattgatgaagctgtgatgtactttaaggaaatgcattacagggatatacgtccaaataagatgacctacaccactttgatgtatgcctattgcaaatgtggcaacaaagaagaagctttcaagctttttgacgagatggtgagctcaggcattgttcctgatactgtttcttacaatacactaatttcagggtgttgtgaggtggattcattggataagattgtagaaagtcccgctgaaatgtcctcatgagttttggaacaaggtggttgtttgtcaacgtttttgataatggataactacaccctggagccagagaagctgtgtctagtgttgaattatgtgtaaccaaggtcttagcgctcatttgttgtgggtcaaaacctttgggtagtagtgctgttcatgctagaaggttcatgtttgcaccaaatgaaggttggatatctgatggttttgaggagccagttattgcctctattctaaaggaaacactcaaagctctagactacctccataggcaggatatctttattgccatcccggtgtagtcaagcttggggactttggtgtctctgcttgcatgtttgataggaggcaaggggctatgaatacatttgttggaacactgtgctggaattaggatggctccagaagttctccagcttcaaactggatataatttcaagtatatggtgattctacacgcacatgcttagttctgcttgacaatttgcatttctcgataaacctgagatcgagcaaacactatgttggaatttagttttacttttttgtgcttaaatatgagtgcagcatatcatcaacatcaagttggaacttttactctgcccagagattagagctgatatggtctttggaataactgcactggaggtggcacatggacatgctccctttttgaagtaccctcctatgaagctaaaggattcagctagctttgaagagaatgccttcttcagaaatcagaacaagaaacacttttcatgggtgagtgttaataaggggtcagtgcatgaaactttgatattgaggatctaaaaagccagccatcactgatttgcaatgatgatgcacctgaaatagaagaacatgatgacactgctagaataactgacttcgataaagtttgtttgagtcctttgtctttattttaaaaatgccttcgagtcctttgtctttattttaagaaatgcattagtcatgtgtactaggaataatgacataaatatgatgtaagcttcacagagtgatagaagaaatcatatataagatcatcatctgtcactaggtgagtacccgtgcgttgcaacggggacatataataacataataacttatatataaaatgtgtcttatattgttataagaaaatgtttcataattcatttgtaatcctagtcatacataaattttgttattttaatttagctgtttcactactacattacaaccaccagtatcatgcagacttcgatatatgccacgatttgcatggtctcatcattgaagagcacgtgccacacct

SEQ ID NO: 31836 - DNA, 4619 bp, Zea Mays
tgcctaccaagtcacctctttgcccggttggccgccgcgcccagtggccccctcctagcctaccgctccccgatccaatctgtgccgtccgttctcccgccgcaaccttcgtcttgtcctcaaggccggcggcggccactgcccgccttacaccatgaaaccaccacggctctttcccctcctccgccgccacctctcatccgccgccgacgccaccgccgacgccgcggagctttccagcgcgctatccgtggcgccctcctcagatgcgaaacgcgatcttgccatcctgctccgccgccttggcggccgcggtctcgcctccgccctctcgtcccttccggctccgcttcccgcctcctccgccctgcgcctccttcagcatattctctccgacacccacgcgtccgcctcccgccacgccgaggacctcctgtctcctcgcgtctctacgctcctcctaccatcgctcgtcgccgatggcgcctcgctaccgtccgcgcgccgcctcatctcacgcctcctcttcttcaaccctctttctgtcgccgcagcggctatcgcggactccgactgcactgccacagcggaccttctcgtccgcgcctgcctcaactcgcctgcccccggatctctgtcctgtgccgccgatgcctttctcgagctttccacacgtggtgcatcaccgtccatcaagacatgcaatatccttgtcgaagccctaggttgtggtggccaactggacctggcccgcaaggtgttcggagaaatgcgggatggcaacgctgttgctcctgatgtgtacacatacacggtgatgattaaggcactctgcagggctggagagattgatgctgcttttgtgatgcttgcggagttggaacggtctggtatccagccgacggttgtcacttacaacgtgctaatggatgcattgtgcaggagtgggagggtggaagaggcctttcagttgaaggggagaatggttgaaggcaggctgagaccaagcattgtcacatttggcatcctgatcaatggtcttgcaaggggccaacggtttggtgaggttgatgcagtgctgcaggagatggagggttttgggatcacccccaatgaggttatttacaatcagctgatcggttggcattgtagggaaggacattgctcagaggcgcttaggctgtttgatgaaatggtctcaaaggggataaagcagacagtggtgacttacaacttgattgcgaaggctctgtgcaaggaaggagaaatggaacatgctgagcagatattggatgagatgttgttggctggaatgacggttcattgcagcttgtttaatagtgtggttgcatggcatcttcgcggaactggaagactggatgtggtgctaaggcttataagagaaatggttgcgagatttctgaaaccaaatgatgctgtgatgacagcttgtatccaggagctttgcaaaagagggaaacacgaagaagcagctgaaatttggttcctagtattgggtaaaggtttgggtgtcaatattgcaacatccaatgcgttgattcatgggctttgccaaggtaacaacatgaaagaagctactaaggttctaaaggctatggtggatagcggggttgaattcgatagaatcacatataatataatgattcaattctgctgcaaagccagtaaaatggaggaagcaatacaacttcgtgatgacatgatcaaaagagggtttaagccagacctcttcacgtttaatactttcctacgcgcttactgtaatttgggtaaggtggaagacatccttcacttgctggatcagatgaaaagtgagggtcttaagccagatattgtgacatatggtaccataatagatggttactgcaaagcgaaggatgtgcataaggcgaataaatatttgattgaattgattaaaaatgggttaagaccgaatgcagtcatctataatgctcttattggtggttatggtaggaatggtagcatttctgatgcaattggtgttcttgacactatgaagcataatggcatacaaccaacaccaataacttacaacagccttatgtattggatgtgtcatgctggtcttgttgaagaggccaaagaaattttcgcgcaatgtatactaaagaacattgagcttggtgtaattggctacacaattataatacaaggtttttgcaaaataggaaaaattgatgaagctgtgatgtactttaaggaaatgcattacagggatatacgtccaaataagatgacctacaccactttgatgtatgcctattgcaaatgtggcaacaaagaagaagctttcaagctttttgacgagatggtgagctcaggcattgttcctgatactgtttcttacaatacactaatttcagggtgttgtgaggtggattcattggataagattgtagaaagtcccgctgaaatgtcctcatgagttttggaacaaggtggttgtttgtcaacgtttttgataatggataactacaccctggagccagagaagctgtgtctagtgttgaattatgtgtaaccaaggaagatgtaagaaaggagactcaaactttgagcttgatatatcaccctaatgtcatcaggtcttagcgctcatttgttgtgggtcaaaacctttgggtagtagtgctgttcatgctagaaggttcatgtttgcaccaaatgaaggttggatatctgatggttttgaggagccagttattgcctctattctaaaggaaacactcaaagctctagactacctccataggcaaggacatattttcaccatgatgtgaaggcaggatatctttattgccatcccggtgtagtcaagcttggggactttggtgtctctgcttgcatgtttgataggaggcaaggggctatgaatacatttgttggaacactgtgctggaattaggatggctccagaagttctccagcttcaaactggatataatttcaacatatcatcaacatcaagttggaacttttactctgcccagagattaggtgatcaccagattctggttggttccagtttgaggtttctgggaaaacttccctattatcttttttacttataatatagcttatattttactgaaataacaaaaataaaaaaacctgcatgcggggtaaggccgcccccacaacattacattaagaagatcttctcacgtaggtcgacacccctctccccccgcgaacccttgcccacccatacacacagtggcagaggacgtagaaaaatttaggtatagctctacattgtataatatttagcatgcaaccaattaaattgtagaataaaaatacacaacatatatagaactagaacattatttaaaatgagaataaattgctaagaaacacgtgcacggcaaataacacataatataacgttataccgataattttactggatacgtcttggagacataggtaattgtatttgctcattcttttctgaaatgccttcttatataatacttaaaagacgagttctaacttatatgatttgtgattgttatcacatttcttaattaaatgcatttccaattaggtatggcttgggctatatccagccatagtgggtcctctgcccctgcatacacagcgacaccatagccgatgtgaaaacaactgcgactgaagccagatcattagacctgtgctttgacatgggacagaaaaggggattttttaaccacatcctaaaatttgctccaacggggagtcgaactcaggagtcaggacctaaggaatgctactcagactaactaaccaactcatctagaatgatcatgtttttaacacgttgaccttttttatgtgtacttttacttttcatattagttgctattgtaagcgacatcttctaacaactatcgactctttgtacagagctgatatggtctttggaataactgcactggaggtggcacatggacatgctccctttttgaagtaccctcctatgaagctaaaggattcagctagctttgaagagaatgccttcttcagaaatcagaacaagaaacacttttcatgggtgagtgttaataaggggtcagtgcatgaaactttgatattgaggatctaaaaagccagccatcactgatttgcaatgatgatgcacctgaaatagaagaacatgatgacactgctagaataactgacttcgataaagtttgtttgagtcctttgtctttattttaaaaatgccttcgagtcctttgtctttattttaagaaatgcattagtcatgtgtactaggaataatgacataaatatgatgtaagcttcacagagtgatagaagaaatcatatataagatcatcatctgtcactaggtgagtacccgtgcgttgcaacggggacatataataacataataacttatatataaaatgtgtcttatattgttataagaaaatgtttcataattcatttgtaatcctagtcatacataaattttgttattttaatttagctgtttcactactacattacaaccaccagtatcatgcagacttcgatatatgccacgatttgcatggtctcatcattgaagagcacgtgccacacct

SEQ ID NO: 31837 - DNA, 4680 bp, Zea Mays
tgcctaccaagtcacctctttgcccggttggccgccgcgcccagtggccccctcctagcctaccgctccccgatccaatctgtgccgtccgttctcccgccgcaaccttcgtcttgtcctcaaggccggcggcggccactgcccgccttacaccatgaaaccaccacggctctttcccctcctccgccgccacctctcatccgccgccgacgccaccgccgacgccgcggagctttccagcgcgctatccgtggcgccctcctcagatgcgaaacgcgatcttgccatcctgctccgccgccttggcggccgcggtctcgcctccgccctctcgtcccttccggctccgcttcccgcctcctccgccctgcgcctccttcagcatattctctccgacacccacgcgtccgcctcccgccacgccgaggacctcctgtctcctcgcgtctctacgctcctcctaccatcgctcgtcgccgatggcgcctcgctaccgtccgcgcgccgcctcatctcacgcctcctcttcttcaaccctctttctgtcgccgcagcggctatcgcggactccgactgcactgccacagcggaccttctcgtccgcgcctgcctcaactcgcctgcccccggatctctgtcctgtgccgccgatgcctttctcgagctttccacacgtggtgcatcaccgtccatcaagacatgcaatatccttgtcgaagccctaggttgtggtggccaactggacctggcccgcaaggtgttcggagaaatgcgggatggcaacgctgttgctcctgatgtgtacacatacacggtgatgattaaggcactctgcagggctggagagattgatgctgcttttgtgatgcttgcggagttggaacggtctggtatccagccgacggttgtcacttacaacgtgctaatggatgcattgtgcaggagtgggagggtggaagaggcctttcagttgaaggggagaatggttgaaggcaggctgagaccaagcattgtcacatttggcatcctgatcaatggtcttgcaaggggccaacggtttggtgaggttgatgcagtgctgcaggagatggagggttttgggatcacccccaatgaggttatttacaatcagctgatcggttggcattgtagggaaggacattgctcagaggcgcttaggctgtttgatgaaatggtctcaaaggggataaagcagacagtggtgacttacaacttgattgcgaaggctctgtgcaaggaaggagaaatggaacatgctgagcagatattggatgagatgttgttggctggaatgacggttcattgcagcttgtttaatagtgtggttgcatggcatcttcgcggaactggaagactggatgtggtgctaaggcttataagagaaatggttgcgagatttctgaaaccaaatgatgctgtgatgacagcttgtatccaggagctttgcaaaagagggaaacacgaagaagcagctgaaatttggttcctagtattgggtaaaggtttgggtgtcaatattgcaacatccaatgcgttgattcatgggctttgccaaggtaacaacatgaaagaagctactaaggttctaaaggctatggtggatagcggggttgaattcgatagaatcacatataatataatgattcaattctgctgcaaagccagtaaaatggaggaagcaatacaacttcgtgatgacatgatcaaaagagggtttaagccagacctcttcacgtttaatactttcctacgcgcttactgtaatttgggtaaggtggaagacatccttcacttgctggatcagatgaaaagtgagggtcttaagccagatattgtgacatatggtaccataatagatggttactgcaaagcgaaggatgtgcataaggcgaataaatatttgattgaattgattaaaaatgggttaagaccgaatgcagtcatctataatgctcttattggtggttatggtaggaatggtagcatttctgatgcaattggtgttcttgacactatgaagcataatggcatacaaccaacaccaataacttacaacagccttatgtattggatgtgtcatgctggtcttgttgaagaggccaaagaaattttcgcgcaatgtatactaaagaacattgagcttggtgtaattggctacacaattataatacaaggtttttgcaaaataggaaaaattgatgaagctgtgatgtactttaaggaaatgcattacagggatatacgtccaaataagatgacctacaccactttgatgtatgcctattgcaaatgtggcaacaaagaagaagctttcaagctttttgacgagatggtgagctcaggcattgttcctgatactgtttcttacaatacactaatttcagggtgttgtgaggtggattcattggataagattgtagaaagtcccgctgaaatgtcctcatgagttttggaacaaggtggttgtttgtcaacgtttttgataatggataactacaccctggagccagagaagctgtgtctagtgttgaattatgtgtaaccaaggaagatgtaagaaaggagactcaaactttgagcttgatatatcaccctaatgtcatcaggtcttagcgctcatttgttgtgggtcaaaacctttgggtagtagtgctgttcatgctagaaggttcatgtttgcaccaaatgaaggttggatatctgatggttttgaggagccagttattgcctctattctaaaggaaacactcaaagctctagactacctccataggcaaggacatattttcaccatgatgtgaaggttagctctgtaggatttgttcatgatcagttttggcacagctttttatcaacatatcattgttgcaggcaggatatctttattgccatcccggtgtagtcaagcttggggactttggtgtctctgcttgcatgtttgataggaggcaaggggctatgaatacatttgttggaacactgtgctggaattaggatggctccagaagttctccagcttcaaactggatataatttcaagtatatgcatatcatcaacatcaagttggaacttttactctgcccagagattagagctgatatggtctttggaataactgcactggaggtggcacatggacatgctccctttttgaagtaccctcctatgaaggtaatgggtcatttggtctttgtaaattaagattttaaatcctttgtccttcttgctcttatggaatagagcaaggtaataatagtttccagggagcgtggatggttgatgattaattgcatcggttttattttattttgaaatttttatgaagtggcttatttcaaagttagattgcaagcatatgtggtcttaatcattttgctatgggcacactagaaaaagagagaaatcctcgaatttctcccaagggcacacattcttgtgaatacttatttagacttgctgattgacaccagcttgctgaactattataggcgtcagatagttttatccatggagttaactatctaactttacaaactttctggcaataactatttccataaagttcacctaatcacgtgtgtgaattcagtgttaactggtgatttccttggtggctcgggttcttctcatgacgctccaaaatgctctccaagttgaatgctttctgattatagttttctgccacaatctttctattctagaattctgtttcagtcattatttatacagagtctggtctttaggttagattaccgtggttgcacttctaatgaaattttttcacttgtaaagttgtaatcagtctttcagggaaatgattgcaatgtgcttggtgaaagatcaaacaaaggccaacagccgataaaattaattaagcattttttcaagaattcacaacctccaaagctaactgttaagagctttttaactgatttgccccctcattgggatcgtgtaaaagcactccatttttgtttccatatacttctttcgtatttctgtttacataatgtttgtgatagtttttcttagttaatgactctatttccagctaaaggattcagctagctttgaagagaatgccttcttcagaaatcagaacaagaaacacttttcatgggtgagtgttaataaggggtcagtgcatgaaactttgatattgaggatctaaaaagccagccatcactgatttgcaatgatgatgcacctgaaatagaagaacatgatgacactgctagaataactgacttcgataaagtttgtttgagtcctttgtctttattttaaaaatgccttcgagtcctttgtctttattttaagaaatgcattagtcatgtgtactaggaataatgacataaatatgatgtaagcttcacagagtgatagaagaaatcatatataagatcatcatctgtcactaggtgagtacccgtgcgttgcaacggggacatataataacataataacttatatataaaatgtgtcttatattgttataagaaaatgtttcataattcatttgtaatcctagtcatacataaattttgttattttaatttagctgtttcactactacattacaaccaccagtatcatgcagacttcgatatatgccacgatttgcatggtctcatcattgaagagcacgtgccacacct

SEQ ID NO: 31838 - DNA, 3725 bp, Zea Mays
tgcctaccaagtcacctctttgcccggttggccgccgcgcccagtggccccctcctagcctaccgctccccgatccaatctgtgccgtccgttctcccgccgcaaccttcgtcttgtcctcaaggccggcggcggccactgcccgccttacaccatgaaaccaccacggctctttcccctcctccgccgccacctctcatccgccgccgacgccaccgccgacgccgcggagctttccagcgcgctatccgtggcgccctcctcagatgcgaaacgcgatcttgccatcctgctccgccgccttggcggccgcggtctcgcctccgccctctcgtcccttccggctccgcttcccgcctcctccgccctgcgcctccttcagcatattctctccgacacccacgcgtccgcctcccgccacgccgaggacctcctgtctcctcgcgtctctacgctcctcctaccatcgctcgtcgccgatggcgcctcgctaccgtccgcgcgccgcctcatctcacgcctcctcttcttcaaccctctttctgtcgccgcagcggctatcgcggactccgactgcactgccacagcggaccttctcgtccgcgcctgcctcaactcgcctgcccccggatctctgtcctgtgccgccgatgcctttctcgagctttccacacgtggtgcatcaccgtccatcaagacatgcaatatccttgtcgaagccctaggttgtggtggccaactggacctggcccgcaaggtgttcggagaaatgcgggatggcaacgctgttgctcctgatgtgtacacatacacggtgatgattaaggcactctgcagggctggagagattgatgctgcttttgtgatgcttgcggagttggaacggtctggtatccagccgacggttgtcacttacaacgtgctaatggatgcattgtgcaggagtgggagggtggaagaggcctttcagttgaaggggagaatggttgaaggcaggctgagaccaagcattgtcacatttggcatcctgatcaatggtcttgcaaggggccaacggtttggtgaggttgatgcagtgctgcaggagatggagggttttgggatcacccccaatgaggttatttacaatcagctgatcggttggcattgtagggaaggacattgctcagaggcgcttaggctgtttgatgaaatggtctcaaaggggataaagcagacagtggtgacttacaacttgattgcgaaggctctgtgcaaggaaggagaaatggaacatgctgagcagatattggatgagatgttgttggctggaatgacggttcattgcagcttgtttaatagtgtggttgcatggcatcttcgcggaactggaagactggatgtggtgctaaggcttataagagaaatggttgcgagatttctgaaaccaaatgatgctgtgatgacagcttgtatccaggagctttgcaaaagagggaaacacgaagaagcagctgaaatttggttcctagtattgggtaaaggtttgggtgtcaatattgcaacatccaatgcgttgattcatgggctttgccaaggtaacaacatgaaagaagctactaaggttctaaaggctatggtggatagcggggttgaattcgatagaatcacatataatataatgattcaattctgctgcaaagccagtaaaatggaggaagcaatacaacttcgtgatgacatgatcaaaagagggtttaagccagacctcttcacgtttaatactttcctacgcgcttactgtaatttgggtaaggtggaagacatccttcacttgctggatcagatgaaaagtgagggtcttaagccagatattgtgacatatggtaccataatagatggttactgcaaagcgaaggatgtgcataaggcgaataaatatttgattgaattgattaaaaatgggttaagaccgaatgcagtcatctataatgctcttattggtggttatggtaggaatggtagcatttctgatgcaattggtgttcttgacactatgaagcataatggcatacaaccaacaccaataacttacaacagccttatgtattggatgtgtcatgctggtcttgttgaagaggccaaagaaattttcgcgcaatgtatactaaagaacattgagcttggtgtaattggctacacaattataatacaaggtttttgcaaaataggaaaaattgatgaagctgtgatgtactttaaggaaatgcattacagggatatacgtccaaataagatgacctacaccactttgatgtatgcctattgcaaatgtggcaacaaagaagaagctttcaagctttttgacgagatggtgagctcaggcattgttcctgatactgtttcttacaatacactaatttcagggtgttgtgaggtggattcattggataagattgtagaaagtcccgctgaaatgtcctcatgagttttggaacaaggtggttgtttgtcaacgtttttgataatggataactacaccctggagccagagaagctgtgtctagtgttgaattatgtgtaaccaaggaagatgtaagaaaggagactcaaactttgagcttgatatatcaccctaatgtcatcaggtcttagcgctcatttgttgtgggtcaaaacctttgggtagtagtgctgttcatgctagaaggttcatgtttgcaccaaatgaaggttggatatctgatggttttgaggagccagttattgcctctattctaaaggaaacactcaaagctctagactacctccataggcaaggacatattttcaccatgatgtgaaggcaggatatctttattgccatcccggtgtagtcaagcttggggactttggtgtctctgcttgcatgtttgataggaggcaaggggctatgaatacatttgttggaacactgtgctggaattaggatggctccagaagttctccagcttcaaactggatataatttcaacatatcatcaacatcaagttggaacttttactctgcccagagattagagctgatatggtctttggaataactgcactggaggtggcacatggacatgctccctttttgaagtaccctcctatgaagctaaaggattcagctagctttgaagagaatgccttcttcagaaatcagaacaagaaacacttttcatgggtgagtgttaataaggggtcagtgcatgaaactttgatattgaggatctaaaaagccagccatcactgatttgcaatgatgatgcacctgaaatagaagaacatgatgacactgctagaataactgacttcgataaagtttgtttgagtcctttgtctttattttaaaaatgccttcgagtcctttgtctttattttaagaaatgcattagtcatgtgtactaggaataatgacataaatatgatgtaagcttcacagagtgatagaagaaatcatatataagatcatcatctgtcactaggtgagtacccgtgcgttgcaacggggacatataataacataataacttatatataaaatgtgtcttatattgttataagaaaatgtttcataattcatttgtaatcctagtcatacataaattttgttattttaatttagctgtttcactactacattacaaccaccagtatcatgcagacttcgatatatgccacgatttgcatggtctcatcattgaagagcacgtgccacacct

SEQ ID NO: 31839 - DNA, 3626 bp, Zea Mays
tgcctaccaagtcacctctttgcccggttggccgccgcgcccagtggccccctcctagcctaccgctccccgatccaatctgtgccgtccgttctcccgccgcaaccttcgtcttgtcctcaaggccggcggcggccactgcccgccttacaccatgaaaccaccacggctctttcccctcctccgccgccacctctcatccgccgccgacgccaccgccgacgccgcggagctttccagcgcgctatccgtggcgccctcctcagatgcgaaacgcgatcttgccatcctgctccgccgccttggcggccgcggtctcgcctccgccctctcgtcccttccggctccgcttcccgcctcctccgccctgcgcctccttcagcatattctctccgacacccacgcgtccgcctcccgccacgccgaggacctcctgtctcctcgcgtctctacgctcctcctaccatcgctcgtcgccgatggcgcctcgctaccgtccgcgcgccgcctcatctcacgcctcctcttcttcaaccctctttctgtcgccgcagcggctatcgcggactccgactgcactgccacagcggaccttctcgtccgcgcctgcctcaactcgcctgcccccggatctctgtcctgtgccgccgatgcctttctcgagctttccacacgtggtgcatcaccgtccatcaagacatgcaatatccttgtcgaagccctaggttgtggtggccaactggacctggcccgcaaggtgttcggagaaatgcgggatggcaacgctgttgctcctgatgtgtacacatacacggtgatgattaaggcactctgcagggctggagagattgatgctgcttttgtgatgcttgcggagttggaacggtctggtatccagccgacggttgtcacttacaacgtgctaatggatgcattgtgcaggagtgggagggtggaagaggcctttcagttgaaggggagaatggttgaaggcaggctgagaccaagcattgtcacatttggcatcctgatcaatggtcttgcaaggggccaacggtttggtgaggttgatgcagtgctgcaggagatggagggttttgggatcacccccaatgaggttatttacaatcagctgatcggttggcattgtagggaaggacattgctcagaggcgcttaggctgtttgatgaaatggtctcaaaggggataaagcagacagtggtgacttacaacttgattgcgaaggctctgtgcaaggaaggagaaatggaacatgctgagcagatattggatgagatgttgttggctggaatgacggttcattgcagcttgtttaatagtgtggttgcatggcatcttcgcggaactggaagactggatgtggtgctaaggcttataagagaaatggttgcgagatttctgaaaccaaatgatgctgtgatgacagcttgtatccaggagctttgcaaaagagggaaacacgaagaagcagctgaaatttggttcctagtattgggtaaaggtttgggtgtcaatattgcaacatccaatgcgttgattcatgggctttgccaaggtaacaacatgaaagaagctactaaggttctaaaggctatggtggatagcggggttgaattcgatagaatcacatataatataatgattcaattctgctgcaaagccagtaaaatggaggaagcaatacaacttcgtgatgacatgatcaaaagagggtttaagccagacctcttcacgtttaatactttcctacgcgcttactgtaatttgggtaaggtggaagacatccttcacttgctggatcagatgaaaagtgagggtcttaagccagatattgtgacatatggtaccataatagatggttactgcaaagcgaaggatgtgcataaggcgaataaatatttgattgaattgattaaaaatgggttaagaccgaatgcagtcatctataatgctcttattggtggttatggtaggaatggtagcatttctgatgcaattggtgttcttgacactatgaagcataatggcatacaaccaacaccaataacttacaacagccttatgtattggatgtgtcatgctggtcttgttgaagaggccaaagaaattttcgcgcaatgtatactaaagaacattgagcttggtgtaattggctacacaattataatacaaggtttttgcaaaataggaaaaattgatgaagctgtgatgtactttaaggaaatgcattacagggatatacgtccaaataagatgacctacaccactttgatgtatgcctattgcaaatgtggcaacaaagaagaagctttcaagctttttgacgagatggtgagctcaggcattgttcctgatactgtttcttacaatacactaatttcagggtgttgtgaggtggattcattggataagattgtagaaagtcccgctgaaatgtcctcatgagttttggaacaaggtggttgtttgtcaacgtttttgataatggataactacaccctggagccagagaagctgtgtctagtgttgaattatgtgtaaccaaggaagatgtaagaaaggagactcaaactttgagcttgatatatcaccctaatgtcatcaggtcttagcgctcatttgttgtgggtcaaaacctttgggtagtagtgctgttcatgctagaaggttcatgtttgcaccaaatgaaggttggatatctgatggttttgaggagccagttattgcctctattctaaaggaaacactcaaagctctagactacctccataggcaaggacatattttcaccatgatgtgaaggcaggatatctttattgccatcccggtgtagtcaagcttggggactttggtgtctctgcttgcatgtttgataggaggcaaggggctatgaatacatttgttggaacactgtgctgagctgatatggtctttggaataactgcactggaggtggcacatggacatgctccctttttgaagtaccctcctatgaagctaaaggattcagctagctttgaagagaatgccttcttcagaaatcagaacaagaaacacttttcatgggtgagtgttaataaggggtcagtgcatgaaactttgatattgaggatctaaaaagccagccatcactgatttgcaatgatgatgcacctgaaatagaagaacatgatgacactgctagaataactgacttcgataaagtttgtttgagtcctttgtctttattttaaaaatgccttcgagtcctttgtctttattttaagaaatgcattagtcatgtgtactaggaataatgacataaatatgatgtaagcttcacagagtgatagaagaaatcatatataagatcatcatctgtcactaggtgagtacccgtgcgttgcaacggggacatataataacataataacttatatataaaatgtgtcttatattgttataagaaaatgtttcataattcatttgtaatcctagtcatacataaattttgttattttaatttagctgtttcactactacattacaaccaccagtatcatgcagacttcgatatatgccacgatttgcatggtctcatcattgaagagcacgtgccacacct

SEQ ID NO: 31840 - DNA, 3678 bp, Zea Mays
tgcctaccaagtcacctctttgcccggttggccgccgcgcccagtggccccctcctagcctaccgctccccgatccaatctgtgccgtccgttctcccgccgcaaccttcgtcttgtcctcaaggccggcggcggccactgcccgccttacaccatgaaaccaccacggctctttcccctcctccgccgccacctctcatccgccgccgacgccaccgccgacgccgcggagctttccagcgcgctatccgtggcgccctcctcagatgcgaaacgcgatcttgccatcctgctccgccgccttggcggccgcggtctcgcctccgccctctcgtcccttccggctccgcttcccgcctcctccgccctgcgcctccttcagcatattctctccgacacccacgcgtccgcctcccgccacgccgaggacctcctgtctcctcgcgtctctacgctcctcctaccatcgctcgtcgccgatggcgcctcgctaccgtccgcgcgccgcctcatctcacgcctcctcttcttcaaccctctttctgtcgccgcagcggctatcgcggactccgactgcactgccacagcggaccttctcgtccgcgcctgcctcaactcgcctgcccccggatctctgtcctgtgccgccgatgcctttctcgagctttccacacgtggtgcatcaccgtccatcaagacatgcaatatccttgtcgaagccctaggttgtggtggccaactggacctggcccgcaaggtgttcggagaaatgcgggatggcaacgctgttgctcctgatgtgtacacatacacggtgatgattaaggcactctgcagggctggagagattgatgctgcttttgtgatgcttgcggagttggaacggtctggtatccagccgacggttgtcacttacaacgtgctaatggatgcattgtgcaggagtgggagggtggaagaggcctttcagttgaaggggagaatggttgaaggcaggctgagaccaagcattgtcacatttggcatcctgatcaatggtcttgcaaggggccaacggtttggtgaggttgatgcagtgctgcaggagatggagggttttgggatcacccccaatgaggttatttacaatcagctgatcggttggcattgtagggaaggacattgctcagaggcgcttaggctgtttgatgaaatggtctcaaaggggataaagcagacagtggtgacttacaacttgattgcgaaggctctgtgcaaggaaggagaaatggaacatgctgagcagatattggatgagatgttgttggctggaatgacggttcattgcagcttgtttaatagtgtggttgcatggcatcttcgcggaactggaagactggatgtggtgctaaggcttataagagaaatggttgcgagatttctgaaaccaaatgatgctgtgatgacagcttgtatccaggagctttgcaaaagagggaaacacgaagaagcagctgaaatttggttcctagtattgggtaaaggtttgggtgtcaatattgcaacatccaatgcgttgattcatgggctttgccaaggtaacaacatgaaagaagctactaaggttctaaaggctatggtggatagcggggttgaattcgatagaatcacatataatataatgattcaattctgctgcaaagccagtaaaatggaggaagcaatacaacttcgtgatgacatgatcaaaagagggtttaagccagacctcttcacgtttaatactttcctacgcgcttactgtaatttgggtaaggtggaagacatccttcacttgctggatcagatgaaaagtgagggtcttaagccagatattgtgacatatggtaccataatagatggttactgcaaagcgaaggatgtgcataaggcgaataaatatttgattgaattgattaaaaatgggttaagaccgaatgcagtcatctataatgctcttattggtggttatggtaggaatggtagcatttctgatgcaattggtgttcttgacactatgaagcataatggcatacaaccaacaccaataacttacaacagccttatgtattggatgtgtcatgctggtcttgttgaagaggccaaagaaattttcgcgcaatgtatactaaagaacattgagcttggtgtaattggctacacaattataatacaaggtttttgcaaaataggaaaaattgatgaagctgtgatgtactttaaggaaatgcattacagggatatacgtccaaataagatgacctacaccactttgatgtatgcctattgcaaatgtggcaacaaagaagaagctttcaagctttttgacgagatggtgagctcaggcattgttcctgatactgtttcttacaatacactaatttcagggtgttgtgaggtggattcattggataagattgtagaaagtcccgctgaaatgtcctcatgagttttggaacaaggtggttgtttgtcaacgtttttgataatggataactacaccctggagccagagaagctgtgtctagtgttgaattatgtgtaaccaaggaagatgtaagaaaggagactcaaactttgagcttgatatatcaccctaatgtcatcaggtcttagcgctcatttgttgtgggtcaaaacctttgggtagtagtgctgttcatgctagaaggttcatgtttgcaccaaatgaaggttggatatctgatggttttgaggagccagttattgcctctattctaaaggaaacactcaaagctctagactacctccataggcaaggacatattttcaccatgatgtgaaggcaggatatctttattgccatcccggtgtagtcaagcttggggactttggtgtctctgcttgcatgtttgataggaggcaaggggctatgaatacatttgttggaacactgtgctggaattaggatggctccagaagttctccagcttcaaactggatataatttcaaagctgatatggtctttggaataactgcactggaggtggcacatggacatgctccctttttgaagtaccctcctatgaagctaaaggattcagctagctttgaagagaatgccttcttcagaaatcagaacaagaaacacttttcatgggtgagtgttaataaggggtcagtgcatgaaactttgatattgaggatctaaaaagccagccatcactgatttgcaatgatgatgcacctgaaatagaagaacatgatgacactgctagaataactgacttcgataaagtttgtttgagtcctttgtctttattttaaaaatgccttcgagtcctttgtctttattttaagaaatgcattagtcatgtgtactaggaataatgacataaatatgatgtaagcttcacagagtgatagaagaaatcatatataagatcatcatctgtcactaggtgagtacccgtgcgttgcaacggggacatataataacataataacttatatataaaatgtgtcttatattgttataagaaaatgtttcataattcatttgtaatcctagtcatacataaattttgttattttaatttagctgtttcactactacattacaaccaccagtatcatgcagacttcgatatatgccacgatttgcatggtctcatcattgaagagcacgtgccacacct

SEQ ID NO: 31841 - DNA, 3749 bp, Zea Mays
tgcctaccaagtcacctctttgcccggttggccgccgcgcccagtggccccctcctagcctaccgctccccgatccaatctgtgccgtccgttctcccgccgcaaccttcgtcttgtcctcaaggccggcggcggccactgcccgccttacaccatgaaaccaccacggctctttcccctcctccgccgccacctctcatccgccgccgacgccaccgccgacgccgcggagctttccagcgcgctatccgtggcgccctcctcagatgcgaaacgcgatcttgccatcctgctccgccgccttggcggccgcggtctcgcctccgccctctcgtcccttccggctccgcttcccgcctcctccgccctgcgcctccttcagcatattctctccgacacccacgcgtccgcctcccgccacgccgaggacctcctgtctcctcgcgtctctacgctcctcctaccatcgctcgtcgccgatggcgcctcgctaccgtccgcgcgccgcctcatctcacgcctcctcttcttcaaccctctttctgtcgccgcagcggctatcgcggactccgactgcactgccacagcggaccttctcgtccgcgcctgcctcaactcgcctgcccccggatctctgtcctgtgccgccgatgcctttctcgagctttccacacgtggtgcatcaccgtccatcaagacatgcaatatccttgtcgaagccctaggttgtggtggccaactggacctggcccgcaaggtgttcggagaaatgcgggatggcaacgctgttgctcctgatgtgtacacatacacggtgatgattaaggcactctgcagggctggagagattgatgctgcttttgtgatgcttgcggagttggaacggtctggtatccagccgacggttgtcacttacaacgtgctaatggatgcattgtgcaggagtgggagggtggaagaggcctttcagttgaaggggagaatggttgaaggcaggctgagaccaagcattgtcacatttggcatcctgatcaatggtcttgcaaggggccaacggtttggtgaggttgatgcagtgctgcaggagatggagggttttgggatcacccccaatgaggttatttacaatcagctgatcggttggcattgtagggaaggacattgctcagaggcgcttaggctgtttgatgaaatggtctcaaaggggataaagcagacagtggtgacttacaacttgattgcgaaggctctgtgcaaggaaggagaaatggaacatgctgagcagatattggatgagatgttgttggctggaatgacggttcattgcagcttgtttaatagtgtggttgcatggcatcttcgcggaactggaagactggatgtggtgctaaggcttataagagaaatggttgcgagatttctgaaaccaaatgatgctgtgatgacagcttgtatccaggagctttgcaaaagagggaaacacgaagaagcagctgaaatttggttcctagtattgggtaaaggtttgggtgtcaatattgcaacatccaatgcgttgattcatgggctttgccaaggtaacaacatgaaagaagctactaaggttctaaaggctatggtggatagcggggttgaattcgatagaatcacatataatataatgattcaattctgctgcaaagccagtaaaatggaggaagcaatacaacttcgtgatgacatgatcaaaagagggtttaagccagacctcttcacgtttaatactttcctacgcgcttactgtaatttgggtaaggtggaagacatccttcacttgctggatcagatgaaaagtgagggtcttaagccagatattgtgacatatggtaccataatagatggttactgcaaagcgaaggatgtgcataaggcgaataaatatttgattgaattgattaaaaatgggttaagaccgaatgcagtcatctataatgctcttattggtggttatggtaggaatggtagcatttctgatgcaattggtgttcttgacactatgaagcataatggcatacaaccaacaccaataacttacaacagccttatgtattggatgtgtcatgctggtcttgttgaagaggccaaagaaattttcgcgcaatgtatactaaagaacattgagcttggtgtaattggctacacaattataatacaaggtttttgcaaaataggaaaaattgatgaagctgtgatgtactttaaggaaatgcattacagggatatacgtccaaataagatgacctacaccactttgatgtatgcctattgcaaatgtggcaacaaagaagaagctttcaagctttttgacgagatggtgagctcaggcattgttcctgatactgtttcttacaatacactaatttcagggtgttgtgaggtggattcattggataagattgtagaaagtcccgctgaaatgtcctcatgagttttggaacaaggtggttgtttgtcaacgtttttgataatggataactacaccctggagccagagaagctgtgtctagtgttgaattatgtgtaaccaaggaagatgtaagaaaggagactcaaactttgagcttgatatatcaccctaatgtcatcaggtcttagcgctcatttgttgtgggtcaaaacctttgggtagtagtgctgttcatgctagaaggttcatgtttgcaccaaatgaaggttggatatctgatggttttgaggagccagttattgcctctattctaaaggaaacactcaaagctctagactacctccataggcaaggacatattttcaccatgatgtgaaggcaggatatctttattgccatcccggtgtagtcaagcttggggactttggtgtctctgcttgcatgtttgataggaggcaaggggctatgaatacatttgttggaacactgtgctggaattaggatggctccagaagttctccagcttcaaactggatataatttcaagtatatgcatatcatcaacatcaagttggaacttttactctgcccagagattaggtgatcaccagattctgagctgatatggtctttggaataactgcactggaggtggcacatggacatgctccctttttgaagtaccctcctatgaagctaaaggattcagctagctttgaagagaatgccttcttcagaaatcagaacaagaaacacttttcatgggtgagtgttaataaggggtcagtgcatgaaactttgatattgaggatctaaaaagccagccatcactgatttgcaatgatgatgcacctgaaatagaagaacatgatgacactgctagaataactgacttcgataaagtttgtttgagtcctttgtctttattttaaaaatgccttcgagtcctttgtctttattttaagaaatgcattagtcatgtgtactaggaataatgacataaatatgatgtaagcttcacagagtgatagaagaaatcatatataagatcatcatctgtcactaggtgagtacccgtgcgttgcaacggggacatataataacataataacttatatataaaatgtgtcttatattgttataagaaaatgtttcataattcatttgtaatcctagtcatacataaattttgttattttaatttagctgtttcactactacattacaaccaccagtatcatgcagacttcgatatatgccacgatttgcatggtctcatcattgaagagcacgtgccacacct

SEQ ID NO: 31842 - DNA, 3685 bp, Zea Mays
tgcctaccaagtcacctctttgcccggttggccgccgcgcccagtggccccctcctagcctaccgctccccgatccaatctgtgccgtccgttctcccgccgcaaccttcgtcttgtcctcaaggccggcggcggccactgcccgccttacaccatgaaaccaccacggctctttcccctcctccgccgccacctctcatccgccgccgacgccaccgccgacgccgcggagctttccagcgcgctatccgtggcgccctcctcagatgcgaaacgcgatcttgccatcctgctccgccgccttggcggccgcggtctcgcctccgccctctcgtcccttccggctccgcttcccgcctcctccgccctgcgcctccttcagcatattctctccgacacccacgcgtccgcctcccgccacgccgaggacctcctgtctcctcgcgtctctacgctcctcctaccatcgctcgtcgccgatggcgcctcgctaccgtccgcgcgccgcctcatctcacgcctcctcttcttcaaccctctttctgtcgccgcagcggctatcgcggactccgactgcactgccacagcggaccttctcgtccgcgcctgcctcaactcgcctgcccccggatctctgtcctgtgccgccgatgcctttctcgagctttccacacgtggtgcatcaccgtccatcaagacatgcaatatccttgtcgaagccctaggttgtggtggccaactggacctggcccgcaaggtgttcggagaaatgcgggatggcaacgctgttgctcctgatgtgtacacatacacggtgatgattaaggcactctgcagggctggagagattgatgctgcttttgtgatgcttgcggagttggaacggtctggtatccagccgacggttgtcacttacaacgtgctaatggatgcattgtgcaggagtgggagggtggaagaggcctttcagttgaaggggagaatggttgaaggcaggctgagaccaagcattgtcacatttggcatcctgatcaatggtcttgcaaggggccaacggtttggtgaggttgatgcagtgctgcaggagatggagggttttgggatcacccccaatgaggttatttacaatcagctgatcggttggcattgtagggaaggacattgctcagaggcgcttaggctgtttgatgaaatggtctcaaaggggataaagcagacagtggtgacttacaacttgattgcgaaggctctgtgcaaggaaggagaaatggaacatgctgagcagatattggatgagatgttgttggctggaatgacggttcattgcagcttgtttaatagtgtggttgcatggcatcttcgcggaactggaagactggatgtggtgctaaggcttataagagaaatggttgcgagatttctgaaaccaaatgatgctgtgatgacagcttgtatccaggagctttgcaaaagagggaaacacgaagaagcagctgaaatttggttcctagtattgggtaaaggtttgggtgtcaatattgcaacatccaatgcgttgattcatgggctttgccaaggtaacaacatgaaagaagctactaaggttctaaaggctatggtggatagcggggttgaattcgatagaatcacatataatataatgattcaattctgctgcaaagccagtaaaatggaggaagcaatacaacttcgtgatgacatgatcaaaagagggtttaagccagacctcttcacgtttaatactttcctacgcgcttactgtaatttgggtaaggtggaagacatccttcacttgctggatcagatgaaaagtgagggtcttaagccagatattgtgacatatggtaccataatagatggttactgcaaagcgaaggatgtgcataaggcgaataaatatttgattgaattgattaaaaatgggttaagaccgaatgcagtcatctataatgctcttattggtggttatggtaggaatggtagcatttctgatgcaattggtgttcttgacactatgaagcataatggcatacaaccaacaccaataacttacaacagccttatgtattggatgtgtcatgctggtcttgttgaagaggccaaagaaattttcgcgcaatgtatactaaagaacattgagcttggtgtaattggctacacaattataatacaaggtttttgcaaaataggaaaaattgatgaagctgtgatgtactttaaggaaatgcattacagggatatacgtccaaataagatgacctacaccactttgatgtatgcctattgcaaatgtggcaacaaagaagaagctttcaagctttttgacgagatggtgagctcaggcattgttcctgatactgtttcttacaatacactaatttcagggtgttgtgaggtggattcattggataagattgtagaaagtcccgctgaaatgtcctcatgagttttggaacaaggtggttgtttgtcaacgtttttgataatggataactacaccctggagccagagaagctgtgtctagtgttgaattatgtgtaaccaaggaagatgtaagaaaggagactcaaactttgagcttgatatatcaccctaatgtcatcaggtcttagcgctcatttgttgtgggtcaaaacctttgggtagtagtgctgttcatgctagaaggttcatgtttgcaccaaatgaaggttggatatctgatggttttgaggagccagttattgcctctattctaaaggaaacactcaaagctctagactacctccataggcaaggacatattttcaccatgatgtgaaggcaggatatctttattgccatcccggtgtagtcaagcttggggactttggtgtctctgcttgcatgtttgataggaggcaaggggctatgaatacatttgttggaacactgtgctggaattaggatggctccagaagttctccagcttcaaactggatataatttcaagtatatgagctgatatggtctttggaataactgcactggaggtggcacatggacatgctccctttttgaagtaccctcctatgaagctaaaggattcagctagctttgaagagaatgccttcttcagaaatcagaacaagaaacacttttcatgggtgagtgttaataaggggtcagtgcatgaaactttgatattgaggatctaaaaagccagccatcactgatttgcaatgatgatgcacctgaaatagaagaacatgatgacactgctagaataactgacttcgataaagtttgtttgagtcctttgtctttattttaaaaatgccttcgagtcctttgtctttattttaagaaatgcattagtcatgtgtactaggaataatgacataaatatgatgtaagcttcacagagtgatagaagaaatcatatataagatcatcatctgtcactaggtgagtacccgtgcgttgcaacggggacatataataacataataacttatatataaaatgtgtcttatattgttataagaaaatgtttcataattcatttgtaatcctagtcatacataaattttgttattttaatttagctgtttcactactacattacaaccaccagtatcatgcagacttcgatatatgccacgatttgcatggtctcatcattgaagagcacgtgccacacct

SEQ ID NO: 31843 - DNA, 1928 bp, Zea Mays
cggaccctcaactacgggcctacggcaccagctactcgccagtccgcgactgacacctcatcatcgcccacacacgaacacgagcctgccgccgatcccgtcccgtccccgtgaggccgtgatccccctccacgtctcacgctccactcgctgtctcgctcccagtaccagcagtacagccgtgagcttgtgccgtgccgtcggccgtcccgtgcagactaccagcgagcgatccaccgcaagggaatccaatcaaatcccccagcaagtcagccccgccccgcgccgacgcctctccccgatcccgatctgtgtgcctggctgcctgcaacctccgtgggatggaggcggcgcggcagcagcaggaggagtgcccgtgcggcggggccgaggccgctgaccagttcgagcggctccacgacgcggtgctgctcgacgtcctcaatcgcatcggcgacgtcaaggcgctcggccgctgcgccctcgtctcgcgccgcttccatgcgctcgtgccgctcgtcgactccgtcttcgtccgcgtcgactgcgtcatccctgacgacccgccgccctcgtcctcctcttccgccgcaccaggcacctcgccgcggcaggcgccagccccggccgcgcgcgggcgcggcgcgctcgcgcacatcgcgcgcgtcctgctcggcggcatcgccaggcccatccacgcgctcggccagatcctctcccccgccgccgcggccgtctcccggcgctccgaggcactgcccgcttccccgcgcgcgcccgtcgcggacgtctctcaccactccccctccgaggtgctccgctccttcaaggagctgcggcgccttcacatcgagctgcccacgggcgagctcggcattgacgacggtgtgctccttaagtggaaggccgacttcggctccaccctcgtcagctgcgtcatcctcggcgcctcgtcgatctcgtccaagccgccgacagggtacactcaggcggaatcggaaactgctgcggccgccactcccgataccagtcgggagactgaagagccggggagcctacctgattctctttatacaaatggagggctcaagcttcgcgttgtctggaccatcagctccctgattgccgcgtcggcgaggcattacttgctgcagccgattatctgtaatcacgaattgctggagagcttggacctgacagatgctgacgggcaaggggtgctcaccatggacaagaggcagctgcaggaactgcgggtgcggcccgtctttccgtcagggagctcgcaccgcaccctcatgccggctctcagtatgcgtctgcactacgcaccgctcattgagctgcctgggggaacgctgctgaagggtgcgacactagtggcgatcaaaccaagcgaagatgccttgagggagggccaaggggccggggctgcaggtcctgttggtacatgctggatttcagaggcctttgaggagccatatcggactgcggcaaaggtgcttctcaagagaagggcatattgtcttgaaatgaactcgttctgagcacctagggggtttacttccacagagttctacccttctgacaggatggtgggaagtgggacgccgttcagctaatacaggggaatttattattcagagcagaaattggacgaagatacatctatttccccatctgttgtatctgatttcggtgaaatggtgacttcgtgtacctgtaactttagggctataattacagatatgtatttgtgctggactactacacgcggaatggaatgttatttgggccgatttccgcagtagtgtgaactgttccaaaagactttgggggcctcatctgacctatttagagctaaagacaaactattgtgtccacaactaactctctccgtcccaaatttaaattcggtttaccttttt

SEQ ID NO: 31844 - DNA, 1376 bp, Zea Mays
ccccagcaagtcagccccgccccgcgccgacgcctctccccgatcccgatctgtgtgcctggctgcctgcaacctccgtgggatggaggcggcgcggcagcagcaggaggagtgcccgtgcggcggggccgaggccgctgaccagttcgagcggctccacgacgcggtgctgctcgacgtcctcaatcgcatcggcgacgtcaaggcgctcggccgctgcgccctcgtctcgcgccgcttccatgcgctcgtgccgctcgtcgactccgtcttcgtccgcgtcgactgcgtcatccctgacgacccgccgccctcgtcctcctcttccgccgcaccaggcacctcgccgcggcaggcgccagccccggccgcgcgcgggcgcggcgcgctcgcgcacatcgcgcgcgtcctgctcggcggcatcgccaggcccatccacgcgctcggccagatcctctcccccgccgccgcggccgtctcccggcgctccgaggcactgcccgcttccccgcgcgcgcccgtcgcggacgtctctcaccactccccctccgaggtgctccgctccttcaaggagctgcggcgccttcacatcgagctgcccacgggcgagctcggcattgacgacggtgtgctccttaagtggaaggccgacttcggctccaccctcgtcagctgcgtcatcctcggcgcctcgtcgatctcgtccaagccgccgacagggtacactcaggcggaatcggaaactgctgcggccgccactcccgataccagtcgggagactgaagagccggggagcctacctgattctctttatacaaatggagggctcaagcttcgcgttgtctggaccatcagctccctgattgccgcgtcggcgaggcattacttgctgcagccgattatctgtaatcacgaattgctggagagcttggacctgacagatgctgacgggcaaggggtgctcaccatggacaagaggcagctgcaggaactgcgggtgcggcccgtctttccgtcagggagctcgcaccgcaccctcatgccggctctcagtatgcgtctgcactacgcaccgctcattgagctgcctgggggaacgctgctgaagggtgcgacactagtggcgatcaaaccaagcgaagatgccttgagggagggccaaggggccggggctgcaggtcctgttggtacatgctggatttcagaggcctttgaggagccatatcggactgcggcaaaggtgcttctcaagagaagggcatattgtcttgaaatgaactcgttctgagcacctagggggtttacttccacagagttctacccttctgacaggcagctggagctaccttccatcgtattgagcaagtagagttttg

SEQ ID NO: 31845 - DNA, 1481 bp, Zea Mays
agccccgccactcgtcgcgcccccacagcagtccacggcccgagctctcccgatgataaaccgcggctcccagcttcggatctcgctacccgcacacccaccatcagcacgctcccggactctgatggcgctgagccccacgcccacggccgttgctgcaccgccgccggagccgggccccgagcccgcgccgtccgctgagctgccgctgccggacgccatcgcggccgcgctgccgccggacccgtacgagcagctggaggtggcgcgcaagatcacggccgtggccgtggcgtcccgggcctcgcgcctcgagctggaggccgcgcggctacggcagaggctggccgacagggaccgcctcgccgccgagctcgccgacagggccgccaagctcgagcaggcgctccgcgacgccgacgcgcggctccgcagcgcactcgacgacaacctggccaaggagcgggactcgctcgcgcagacgtccaagaagctggccagggacctcgccaagctggaaaccttcaagcggcacctgatgcagtcgctgggcgatgataattcccaaactcatcatcaggaaacagtagacataagaacctacgagcaatcggtggcaaaagcgaattcctggaaagacgggctagagaagaacagccatcctgtatcctctctatccgacgagtccgtcgaagccgacagcgtaaatcaggaagtgacgacgaggccatttgagcagaaactgaccatcacgcacatcactccacgcctcacctcggatcctgcgccgaagctgagaaccgccgcgacatccccgagaaggtactccacggcggtgtcgcccaaactggcgtccggcgccacctcgccgcgattggagggccacatggcgatgtcgccatggctaccctcgagcaagatgtcctctgcagccaactcgccacctcgtggacagtctatctcaggacgcggtacaagagtagatggcaaggagttctttcgtcaagcaagacaccgcctgtcatacgaacaatttgcggcttttctttccaatatcaaggagctcaacgcccataggcaatctcgagaggagaccctgaggaaggcggacgagatcttcggtgcagaaaacatggacctcttcaggtcgttccaagggctgcttagccgcagcctatcgtagtaaaaaggaaaagaagcttgcccattctatcaattactactccttgttgcggttgttcatgattcatatggacagggccgacagcaggtatacgctttgtgtataataaataaaaaaacgacgtggaccgtactaagacgtgtgccagtataaggctgtccatctaaatttcatcctttaaagaaatattttttttgacctttacagtataatttaaaaaaatttattctcgatatcttgaccatttccagcaatattctctaaatttcgtcatttatattttatccttatttttttc

SEQ ID NO: 31846 - DNA, 3530 bp, Zea Mays
agaaaagaaaagcagggtcgtgacaggacggggggaagagagacctccactcacggactcagcccccgccggaaagcactgagcttccgagcggcccgccgcgaggaacgcgtgacctcgccgcgcgctgttgcggctgggcgggcggcgcattcaggatctgctagggttccccgccggtggggtcctggccatggcgagcccgcgctcggccggcggtgacgaggcgatctggatgaagctgcgcgaggccgggttcgacgaggacgctgtcaggcgccgcgacaaggcggccctcatcggctacatctcgcggctcgagtccgagatctatgaatatcagcacaatcttgggcttattttattggagcggaaggagttgacgtccaaatacgaacaactcaaagcttcttttgaagccactgagatcatactcaagcgagagcgagcttcgcagcagtctgctttatctgaaacaagaaagagggaagaaaacctaaaaaaaaatctagccattcagaaggagtgcatatcaaatgcacttcatgatatgcgcggggaaacagctgaaataaaagtttcatatgaagcaaaactggctgaatcccttcaaatgatggagacggcacagaaaaagtttgatgaagcagaagagaaacttctcactgcaaaatcattagaagcagactgcattcgaactcgcaacacctctctgagaagactgcaagacattgaagatcgcgaagatcagctaagaagataccaaacatcttttgaacttgagaatgcatcgaaagagaaagagattaacctcctgaggaaatcgttggatgataccaaaaaaattttgcatgaaaaggagcaatgtttactgaaagaacaagtacttcttaatcagagggatgacagcatccttgagagacttgcgtacataactagctcagagaaaaggttggaggaggaaaagttaaatctcgaagatgaaagaaaggttcttttggaagagaaaaataagctggatctgaacatgcaggcaattatatccagggaggaagctataattcagaaggaatccatacttgacaaacgtgaaagtgaactattgattctccaagagaccattgcaagcaaagaaagggctgaaatagaaaggctccgtcaagaggaagaaattgccttggtgaggaggaggcaggaatttgacactgacatggaaattaagctcacttcttttgaggaagagattgatgcaaggaaagccttgctcgatcaaagggaaaccaccatcaatgagaaggaggatgcagtggcgcaaagggaacagaatctcaaccttaggtttgctgagttagcgaacaaggaagaatctttggtgaagaaatcagatgagttaagggaggaagagaaaaggctctcctctgagagagagacactgcacattgatctgcaaaaagaaaaggaggaaattcataacatgaaattggatttagagaaggaaaaatctttctttgaggaggagaagcgtgaagcgattcaagctcaggagaatctagcaataacccaaaatgagcgagaagatttacaaagtttgcaggtgaaacttaaagatgaaattgatagtctgagagcccaaaaggttgacctaatggctgatgcagaaaggctattatcagaaaaagaaaggtttgagattgaatgggagttgatcgatgagaagaaggaggaactacaaaaggaggcagccaggattgctgaagaacgaagagtaatagatgagcatctcaagagcgaatttgatattatcaaacaagaaaaggaagatctccgtgttcagttaaaaattagtacagaatcccttgctcatgaacatgctgaattcatgaataagatgcagcaagagcatgctagttggcttagcaggatacaattagaaagagaagatctgaagaaagatattgatatccagagaaccgagttactgaattctgcaaaggctaggcagatggaaatagattcatatttgagggaaaaagaagaggagtttgaacagaaaaaatccaaggaacttgaatacatcaattctgaaaaggaaactatcagctcaaaactagaacatgtcaggcttgaattgcaaaaacttgaggaggagaggaaaaggtctatgctggagcgagagagaagagaggaagagctgtctgaaacaaagaagactatagacgcgcttaatgagcaacgcgagaagttacaagagcaaagaaaactgcttcattcagaccgaaaatcaattacacagcaaatgcagctgcttaatgagttagaagagctgaagattgaatctgagaacaggcaactgtctttgagacagtgtgggaaatcaaagcatgctggtgtggaaaacctggaagacaacggtgttcacctgtctcctgatgaggatcaaaatgctagtccaaaacaaactactgtaaagaaattggaagtgtccccttcagtctccacaccaatttcttgggttaaaaaatgtgctcaggtgatattcaaacgctctccagagaagagtgctgatcccaacaatgatatacctccaaagttgggaaatgtcaatgactgtacctccttagctactgcctattcagatggattgtttgcttgtcacctggaaaatggtgctgagaaagtaccacaagctatcgacggtctgaaagttgggaaaaagaggcttaataatgcactctctcatggtgactccgaaatttcacagccaaaacgcaagcagcaaaagagcgctactcagattttgagagtgattggaggagaaattgattccaactgcagcccatcagttctagaagaaaaatgttcaaagaatgaacatgatgcagtcccagttggtttgtgtgggaagggaccacaaaatccccaagcagagcattcagaggatatttcagtgtctgcatctgaaccgtcgaacggacctggtgttgtggactctgaggacaaggatggagcagatgaggagtctgacgatgaaggcgaggacgaggaggaagagaagacgtcatcggcgaagaagctgtggcgtttcctcatcacatgatttatttatctttgtcgtacgataaaaaatagcacggctaactgtaggttctatatgatggtaggaggccacttaggcatccaaagctctactagtttcattggctttgtcatggcgtgtcctctggtgtgtagtagaggtggaagaaggtactggtttggttgtgtgcttcgggtgttgtgagtagcgcggtggctttggaaggcgctgtggactgtctctcccccacctactaccacccatgccttttttttcttcctgtttatcttgtccgcaggaagacgtgtgtaaagtgattgacagtttccgggttggtgtgaaaatgagcctgcgtggttgctaccatggtccaagtgttagtgctcgcgtttgtgttgcttgtttgagctgtaacagtggttgctaccatgattcaagtttgattcaaaccttg

SEQ ID NO: 31847 - DNA, 3531 bp, Zea Mays
agaaaagcagggtcgtgacaggacggggggaagagagacctccactcacggactcagcccccgccggaaagcactgagcttccgagcggcccgccgcgaggaacgcgtgacctcgccgcgcgctgttgcggctgggcgggcggcgcattcaggatctgctagggttccccgccggtggggtcctggccatggcgagcccgcgctcggccggcggtgacgaggcgatctggatgaagctgcgcgaggccgggttcgacgaggacgctgtcaggcgccgcgacaaggcggccctcatcggctacatctcgcggctcgagtccgagatctatgaatatcagcacaatcttgggcttattttattggagcggaaggagttgacgtccaaatacgaacaactcaaagcttcttttgaagccactgagatcatactcaagcgagagcgagcttcgcagcagtctgctttatctgaaacaagaaagagggaagaaaacctaaaaaaaaatctagccattcagaaggagtgcatatcaaatcttgaaaaggcacttcatgatatgcgcggggaaacagctgaaataaaagtttcatatgaagcaaaactggctgaatcccttcaaatgatggagacggcacagaaaaagtttgatgaagcagaagagaaacttctcactgcaaaatcattagaagcagactgcattcgaactcgcaacacctctctgagaagactgcaagacattgaagatcgcgaagatcagctaagaagataccaaacatcttttgaacttgagaatgcatcgaaagagaaagagattaacctcctgaggaaatcgttggatgataccaaaaaaattttgcatgaaaaggagcaatgtttactgaaagaacaagtacttcttaatcagagggatgacagcatccttgagagacttgcgtacataactagctcagagaaaaggttggaggaggaaaagttaaatctcgaagatgaaagaaaggttcttttggaagagaaaaataagctggatctgaacatgcaggcaattatatccagggaggaagctataattcagaaggaatccatacttgacaaacgtgaaagtgaactattgattctccaagagaccattgcaagcaaagaaagggctgaaatagaaaggctccgtcaagaggaagaaattgccttggtgaggaggaggcaggaatttgacactgacatggaaattaagctcacttcttttgaggaagagattgatgcaaggaaagccttgctcgatcaaagggaaaccaccatcaatgagaaggaggatgcagtggcgcaaagggaacagaatctcaaccttaggtttgctgagttagcgaacaaggaagaatctttggtgaagaaatcagatgagttaagggaggaagagaaaaggctctcctctgagagagagacactgcacattgatctgcaaaaagaaaaggaggaaattcataacatgaaattggatttagagaaggaaaaatctttctttgaggaggagaagcgtgaagcgattcaagctcaggagaatctagcaataacccaaaatgagcgagaagatttacaaagtttgcaggtgaaacttaaagatgaaattgatagtctgagagcccaaaaggttgacctaatggctgatgcagaaaggctattatcagaaaaagaaaggtttgagattgaatgggagttgatcgatgagaagaaggaggaactacaaaaggaggcagccaggattgctgaagaacgaagagtaatagatgagcatctcaagagcgaatttgatattatcaaacaagaaaaggaagatctccgtgttcagttaaaaattagtacagaatcccttgctcatgaacatgctgaattcatgaataagatgcagcaagagcatgctagttggcttagcaggatacaattagaaagagaagatctgaagaaagatattgatatccagagaaccgagttactgaattctgcaaaggctaggcagatggaaatagattcatatttgagggaaaaagaagaggagtttgaacagaaaaaatccaaggaacttgaatacatcaattctgaaaaggaaactatcagctcaaaactagaacatgtcaggcttgaattgcaaaaacttgaggaggagaggaaaaggtctatgctggagcgagagagaagagaggaagagctgtctgaaacaaagaagactatagacgcgcttaatgagcaacgcgagaagttacaagagcaaagaaaactgcttcattcagaccgaaaatcaattacacagcaaatgcagctgcttaatgagttagaagagctgaagattgaatctgagaacaggcaactgtctttgagacagtgtgggaaatcaaagcatgctggtgtggaaaacctggaagacaacggtgttcacctgtctcctgatgaggatcaaaatgctagtccaaaacaaactactgtaaagaaattggaagtgtccccttcagtctccacaccaatttcttgggttaaaaaatgtgctcaggtgatattcaaacgctctccagagaagagtgctgatcccaacaatgatatacctccaaagttgggaaatgtcaatgactgtacctccttagctactgcctattcagatggattgtttgcttgtcacctggaaaatggtgctgagaaagtaccacaagctatcgacggtctgaaagttgggaaaaagaggcttaataatgcactctctcatggtgactccgaaatttcacagccaaaacgcaagcagcaaaagagcgctactcagattttgagagtgattggaggagaaattgattccaactgcccatcagttctagaagaaaaatgttcaaagaatgaacatgatgcagtcccagttggtttgtgtgggaagggaccacaaaatccccaagcagagcattcagaggatatttcagtgtctgcatctgaaccgtcgaacggacctggtgttgtggactctgaggacaaggatggagcagatgaggagtctgacgatgaaggcgaggacgaggaggaagagaagacgtcatcggcgaagaagctgtggcgtttcctcatcacatgatttatttatctttgtcgtacgataaaaaatagcacggctaactgtaggttctatatgatggtaggaggccacttaggcatccaaagctctactagtttcattggctttgtcatggcgtgtcctctggtgtgtagtagaggtggaagaaggtactggtttggttgtgtgcttcgggtgttgtgagtagcgcggtggctttggaaggcgctgtggactgtctctcccccacctactaccacccatgccttttttttcttcctgtttatcttgtccgcaggaagacgtgtgtaaagtgattgacagtttccgggttggtgtgaaaatgagcctgcgtggttgctaccatggtccaagtgttagtgctcgcgtttgtgttgcttgtttgagctgtaacagtggttgctaccatgattcaagtttgattcaaaccttg

SEQ ID NO: 31848 - DNA, 3146 bp, Zea Mays
gcactatattgtttaactggctgtttctgcttattttgttaggcatctttaagatctatgaatatcagcacaatcttgggcttattttattggagcggaaggagttgacgtccaaatacgaacaactcaaagcttcttttgaagccactgagatcatactcaagcgagagcgagcttcgcagcagtctgctttatctgaaacaagaaagagggaagaaaacctaaaaaaaaatctagccattcagaaggagtgcatatcaaatcttgaaaaggcacttcatgatatgcgcggggaaacagctgaaataaaagtttcatatgaagcaaaactggctgaatcccttcaaatgatggagacggcacagaaaaagtttgatgaagcagaagagaaacttctcactgcaaaatcattagaagcagactgcattcgaactcgcaacacctctctgagaagactgcaagacattgaagatcgcgaagatcagctaagaagataccaaacatcttttgaacttgagaatgcatcgaaagagaaagagattaacctcctgaggaaatcgttggatgataccaaaaaaattttgcatgaaaaggagcaatgtttactgaaagaacaagtacttcttaatcagagggatgacagcatccttgagagacttgcgtacataactagctcagagaaaaggttggaggaggaaaagttaaatctcgaagatgaaagaaaggttcttttggaagagaaaaataagctggatctgaacatgcaggcaattatatccagggaggaagctataattcagaaggaatccatacttgacaaacgtgaaagtgaactattgattctccaagagaccattgcaagcaaagaaagggctgaaatagaaaggctccgtcaagaggaagaaattgccttggtgaggaggaggcaggaatttgacactgacatggaaattaagctcacttcttttgaggaagagattgatgcaaggaaagccttgctcgatcaaagggaaaccaccatcaatgagaaggaggatgcagtggcgcaaagggaacagaatctcaaccttaggtttgctgagttagcgaacaaggaagaatctttggtgaagaaatcagatgagttaagggaggaagagaaaaggctctcctctgagagagagacactgcacattgatctgcaaaaagaaaaggaggaaattcataacatgaaattggatttagagaaggaaaaatctttctttgaggaggagaagcgtgaagcgattcaagctcaggagaatctagcaataacccaaaatgagcgagaagatttacaaagtttgcaggtgaaacttaaagatgaaattgatagtctgagagcccaaaaggttgacctaatggctgatgcagaaaggctattatcagaaaaagaaaggtttgagattgaatgggagttgatcgatgagaagaaggaggaactacaaaaggaggcagccaggattgctgaagaacgaagagtaatagatgagcatctcaagagcgaatttgatattatcaaacaagaaaaggaagatctccgtgttcagttaaaaattagtacagaatcccttgctcatgaacatgctgaattcatgaataagatgcagcaagagcatgctagttggcttagcaggatacaattagaaagagaagatctgaagaaagatattgatatccagagaaccgagttactgaattctgcaaaggctaggcagatggaaatagattcatatttgagggaaaaagaagaggagtttgaacagaaaaaatccaaggaacttgaatacatcaattctgaaaaggaaactatcagctcaaaactagaacatgtcaggcttgaattgcaaaaacttgaggaggagaggaaaaggtctatgctggagcgagagagaagagaggaagagctgtctgaaacaaagaagactatagacgcgcttaatgagcaacgcgagaagttacaagagcaaagaaaactgcttcattcagaccgaaaatcaattacacagcaaatgcagctgcttaatgagttagaagagctgaagattgaatctgagaacaggcaactgtctttgagacagtgtgggaaatcaaagcatgctggtgtggaaaacctggaagacaacggtgttcacctgtctcctgatgaggatcaaaatgctagtccaaaacaaactactgtaaagaaattggaagtgtccccttcagtctccacaccaatttcttgggttaaaaaatgtgctcaggtgatattcaaacgctctccagagaagagtgctgatcccaacaatgatatacctccaaagttgggaaatgtcaatgactgtacctccttagctactgcctattcagatggattgtttgcttgtcacctggaaaatggtgctgagaaagtaccacaagctatcgacggtctgaaagttgggaaaaagaggcttaataatgcactctctcatggtgactccgaaatttcacagccaaaacgcaagcagcaaaagagcgctactcagattttgagagtgattggaggagaaattgattccaactgtctgcatctgaaccgtcgaacggacctggtgttgtggactctgaggacaaggatggagcagatgaggagtctgacgatgaaggcgaggacgaggaggaagagaagacgtcatcggcgaagaagctgtggcgtttcctcatcacatgatttatttatctttgtcgtacgataaaaaatagcacggctaactgtaggttctatatgatggtaggaggccacttaggcatccaaagctctactagtttcattggctttgtcatggcgtgtcctctggtgtgtagtagaggtggaagaaggtactggtttggttgtgtgcttcgggtgttgtgagtagcgcggtggctttggaaggcgctgtggactgtctctcccccacctactaccacccatgccttttttttcttcctgtttatcttgtccgcaggaagacgtgtgtaaagtgattgacagtttccgggttggtgtgaaaatgagcctgcgtggttgctaccatggtccaagtgttagtgctcgcgtttgtgttgcttgtttgagctgtaacagtggttgctaccatgattcaagtttgattcaaaccttg

SEQ ID NO: 31849 - DNA, 3232 bp, Zea Mays
attttgttaggcatctttaagatctatgaatatcagcacaatcttgggcttattttattggagcggaaggagttgacgtccaaatacgaacaactcaaagcttcttttgaagccactgagatcatactcaagcgagagcgagcttcgcagcagtctgctttatctgaaacaagaaagagggaagaaaacctaaaaaaaaatctagccattcagaaggagtgcatatcaaatcttgaaaaggcacttcatgatatgcgcggggaaacagctgaaataaaagtttcatatgaagcaaaactggctgaatcccttcaaatgatggagacggcacagaaaaagtttgatgaagcagaagagaaacttctcactgcaaaatcattagaagcagactgcattcgaactcgcaacacctctctgagaagactgcaagacattgaagatcgcgaagatcagctaagaagataccaaacatcttttgaacttgagaatgcatcgaaagagaaagagattaacctcctgaggaaatcgttggatgataccaaaaaaattttgcatgaaaaggagcaatgtttactgaaagaacaagtacttcttaatcagagggatgacagcatccttgagagacttgcgtacataactagctcagagaaaaggttggaggaggaaaagttaaatctcgaagatgaaagaaaggttcttttggaagagaaaaataagctggatctgaacatgcaggcaattatatccagggaggaagctataattcagaaggaatccatacttgacaaacgtgaaagtgaactattgattctccaagagaccattgcaagcaaagaaagggctgaaatagaaaggctccgtcaagaggaagaaattgccttggtgaggaggaggcaggaatttgacactgacatggaaattaagctcacttcttttgaggaagagattgatgcaaggaaagccttgctcgatcaaagggaaaccaccatcaatgagaaggaggatgcagtggcgcaaagggaacagaatctcaaccttaggtttgctgagttagcgaacaaggaagaatctttggtgaagaaatcagatgagttaagggaggaagagaaaaggctctcctctgagagagagacactgcacattgatctgcaaaaagaaaaggaggaaattcataacatgaaattggatttagagaaggaaaaatctttctttgaggaggagaagcgtgaagcgattcaagctcaggagaatctagcaataacccaaaatgagcgagaagatttacaaagtttgcaggtgaaacttaaagatgaaattgatagtctgagagcccaaaaggttgacctaatggctgatgcagaaaggctattatcagaaaaagaaaggtttgagattgaatgggagttgatcgatgagaagaaggaggaactacaaaaggaggcagccaggattgctgaagaacgaagagtaatagatgagcatctcaagagcgaatttgatattatcaaacaagaaaaggaagatctccgtgttcagttaaaaattagtacagaatcccttgctcatgaacatgctgaattcatgaataagatgcagcaagagcatgctagttggcttagcaggatacaattagaaagagaagatctgaagaaagatattgatatccagagaaccgagttactgaattctgcaaaggctaggcagatggaaatagattcatatttgagggaaaaagaagaggagtttgaacagaaaaaatccaaggaacttgaatacatcaattctgaaaaggaaactatcagctcaaaactagaacatgtcaggcttgaattgcaaaaacttgaggaggagaggaaaaggtctatgctggagcgagagagaagagaggaagagctgtctgaaacaaagaagactatagacgcgcttaatgagcaacgcgagaagttacaagagcaaagaaaactgcttcattcagaccgaaaatcaattacacagcaaatgcagctgcttaatgagttagaagagctgaagattgaatctgagaacaggcaactgtctttgagacagtgtgggaaatcaaagcatgctggtgtggaaaacctggaagacaacggtgttcacctgtctcctgatgaggatcaaaatgctagtccaaaacaaactactgtaaagaaattggaagtgtccccttcagtctccacaccaatttcttgggttaaaaaatgtgctcaggtgatattcaaacgctctccagagaagagtgctgatcccaacaatgatatacctccaaagttgggaaatgtcaatgactgtacctccttagctactgcctattcagatggattgtttgcttgtcacctggaaaatggtgctgagaaagtaccacaagctatcgacggtctgaaagttgggaaaaagaggcttaataatgcactctctcatggtgactccgaaatttcacagccaaaacgcaagcagcaaaagagcgctactcagattttgagagtgattggaggagaaattgattccaactgcagcccatcagttctagaagaaaaatgttcaaagaatgaacatgatgcagtcccagttggtttgtgtgggaagggaccacaaaatccccaagcagagcattcagaggatatttcagtgtctgcatctgaaccgtcgaacggacctggtgttgtggactctgaggacaaggatggagcagatgaggagtctgacgatgaaggcgaggacgaggaggaagagaagacgtcatcggcgaagaagctgtggcgtttcctcatcacatgatttatttatctttgtcgtacgataaaaaatagcacggctaactgtaggttctatatgatggtaggaggccacttaggcatccaaagctctactagtttcattggctttgtcatggcgtgtcctctggtgtgtagtagaggtggaagaaggtactggtttggttgtgtgcttcgggtgttgtgagtagcgcggtggctttggaaggcgctgtggactgtctctcccccacctactaccacccatgccttttttttcttcctgtttatcttgtccgcaggaagacgtgtgtaaagtgattgacagtttccgggttggtgtgaaaatgagcctgcgtggttgctaccatggtccaagtgttagtgctcgcgtttgtgttgcttgtttgagctgtaacagtggttgctaccatgattcaagtttgattcaaaccttg

SEQ ID NO: 31850 - DNA, 3305 bp, Zea Mays
cgcggacaggacccccgccgcgacgtggtgagcagtgagctccttcttcctagctctgctgctacctgctctccctctcggctcggcctctcctcgtgcgcgcgcgcgctcccgcattcctggggtcctgtccggccggcctcctccctacctcaccagcatttccctccctagtcccagctcgtattaatctttggccccccttctctttgtgcgagtgtgcctcgtcattcacctcggccacaggcggtctcattgatgaggtgaggagctgtgctcagggggagcctaaaagcggcggcgtctacgcttgccgcgaggtgccaatggtgcagtggtggggccgtgaggcgtcgggtggccgggggacgtcggtggtggtgaagatggagagcccggaatggaccatcccggcggaatcggaggtggcggcggggggcaaggccggccgcggcaagaacgcccgccagatcacgtgggtgctactgctcaaggcgcaccgcaccgcggggaagctcacgggcgccgcctccgccgtgctttccatcgccggcgccgcgtggaggcgggtggcggcggggcggaccgacgaagacgaagacgaagacgccggcgccgcgccgcccggggagagccccgcgctgcgcagcaggttctacggcttcctccgcgcctccctcgtcctgtccgtgctcctcctcgccgccgacgtcgccgcacacctccagggctggcacctcgccgtcgacgtccccgacctgctcgccgtcgagggcctcttcgccgccgggtacgcgtcctgggcgcgcgtccgtctcgagtacctcgcgccggcgctgcagttcctggcgaacgcgtgcgtcgtgctcttcttggtccagagcgccgaccgccttatcctctgcctgggttgcctctggatcaagcacaggggcatcaggcctgtccccaaggctggtggcaaagggtcagacgacgtcgaggccggcaccgggaacttccccatggtgctcgtgcagattccaatgcgcaacgagaaggaggtgtaccagcaatctattggtgctgtttgcggtctggactggccaaggccaaacttcttggtgcaggtgctagacgattctgatgacgctgccacttcaacacttattaaagaggaggtggagaagtggcaacgggaaggcgttcgcatattgtaccgacaccggttaattcgtgatggctacaaggctggaaatctcaagtcagccatgaactgcagctatgtaaaggattatgagtttgttgttatctttgatgctgattttcaaccccagccagacttcctgaagcgaactgtgccccatttcaagggcaatgaggacgttgggttagttcaggcaaggtggtcttttgtgaacaaggatgagaacttgctaactaggctgcaaaacataaacctttgcttccactttgaggtggagcagcaggttaatgggatcttcctcaatttctttggattcaatggaacggcaggagtgtggagaataaaggcactcgaggattcaggtggatggatggagaggacaacagtggaggacatggatattgctgtccgagcacacctcaagggttggaagtttctgttccttaacgatgttgagtgccagtgtgaattgccggagtcatatgaggcatatcgaaagcagcaacaccgatggcattctggtcccatgcagttatttagactctgctttgtggatattatcaagtcgaagatcggattctggaagaaagttcaacctcatatttcttttctttctcctccgcaagctcattctgcccttctattccttcacccttttctgcatcatccttcccatgacgatgtttattcccgaagccgagctccctgcctgggtcgtgtgctacatcccggcgaccatgtccctgctgaacatcctcccagccccgaaatcgttcccgtttatcgtgccctatctcctgttcgagaacaccatgtcggtaaccaagttcaacgccatggtctccggcctgttccagctcgggagcgcccacgagtgggtcgtcaccaagaaatcaggccgttcttccgagggcgatctcgtcgtcgagaagcagcctagacagcaaagggcagggtccgcatccaaccttggttcccttgcaaaggagccttcctccagtctcagaaaggactcccaaaggaagaaacacaataggatatacaggaaggagctggcgctctccttccttctcttaacagcagctgctcggagcctgatatcggtgcaaggaatacacttctacttccttctgttccaaggggattgcgctaaggggaacccagaaaaagggaagaagatgttctgcatgagtgcatcagtagaatgcctacgggctctgtttgtgaatgcaagagcgcaaatcacatgcggctcacgaacggtaatcttccagcccacttgtccagcagtgatggtggagagagacagggtatcaggggaactggggaaggggtttaggaacaacccatctccattcaccaacggcgcctccaactccgagcgccgcctctgcctcgaaaactcttactcgcggagctgcagccaggggggcgaccggtgtgtgaaccgctgccgctatggctgctgcttccgttccgccaacatcttcatccggcggctgggacttcacctgtaaccttgaagtcgattatgggtctgaagaaaatgcatccatagtctacagaacgttagcagttgacaaggagttgcagcctgacaaggtgaagagggagatgactctatcaggcagcaagctggccgtccacttcgcagccgtggaggcccgcttcctgcgagcatcgttcagctcatttgtggatcttatgggactcgtgacgaagctcgtcgaagaatatggtgtggccaatgcagggcattcttgaatcttgatgaacaatctcatacacggcattgcggagttgattttagttcgcctgtgagcaatttggagttttggacagtctttaccagtggaactgctcttgatctgtgtcaagctagtgtagtatttgcccttgattggtcaaatcctattcggaacggttaattcttttcggcaatgccgttgtgaaatgtatagatgatgaataggtaaaaattatctatatatcctcagttaggctttctccacgagtaatgagtggtcttggtctggtctctggttgtggcctctccggatgatgctatatgtcatctcccatctccgttatcgtgtttctcggtaaaaaaaacgttacg

SEQ ID NO: 31851 - DNA, 3528 bp, Zea Mays
tttgtgcgagtgtgcctcgtcattcacctcggccacaggcggtctcattgatgaggtgaggagctgtgctcagggggagcctaaaagcggcggcgtctacgcttgccgcgaggtgccaatggtgcagtggtggggccgtgaggcgtcgggtggccgggggacgtcggtggtggtgaagatggagagcccggaatggaccatcccggcggaatcggaggtggcggcggggggcaaggccggccgcggcaagaacgcccgccagatcacgtgggtgctactgctcaaggcgcaccgcaccgcggggaagctcacgggcgccgcctccgccgtgctttccatcgccggcgccgcgtggaggcgggtggcggcggggcggaccgacgaagacgaagacgaagacgccggcgccgcgccgcccggggagagccccgcgctgcgcagcaggttctacggcttcctccgcgcctccctcgtcctgtccgtgctcctcctcgccgccgacgtcgccgcacacctccagggctggcacctcgccgtcgacgtccccgacctgctcgccgtcgagggcctcttcgccgccgggtacgcgtcctgggcgcgcgtccgtctcgagtacctcgcgccggcgctgcagttcctggcgaacgcgtgcgtcgtgctcttcttggtccagagcgccgaccgccttatcctctgcctgggttgcctctggatcaagcacaggggcatcaggcctgtccccaaggctggtggcaaagggtcagacgacgtcgaggccggcaccgggaacttccccatggtgctcgtgcagattccaatgcgcaacgagaaggaggtgtaccagcaatctattggtgctgtttgcggtctggactggccaaggccaaacttcttggtgcaggtgctagacgattctgatgacgctgccacttcaacacttattaaagaggaggtggagaagtggcaacgggaaggcgttcgcatattgtaccgacaccggttaattcgtgatggctacaaggctggaaatctcaagtcagccatgaactgcagctatgtaaaggattatgagtttgttgttatctttgatgctgattttcaaccccagccagacttcctgaagcgaactgtgccccatttcaagggcaatgaggacgttgggttagttcaggcaaggtggtcttttgtgaacaaggatgagaacttgctaactaggctgcaaaacataaacctttgcttccactttgaggtggagcagcaggttaatgggatcttcctcaatttctttggattcaatggaacggcaggagtgtggagaataaaggcactcgaggattcaggtggatggatggagaggacaacagtggaggacatggatattgctgtccgagcacacctcaagggttggaagtttctgttccttaacgatgttgagtgccagtgtgaattgccggagtcatatgaggcatatcgaaagcagcaacaccgatggcattctggtcccatgcagttatttagactctgctttgtggatattatcaagtcgaagatcggattctggaagaaagttcaacctcatatttcttttctttctcctccgcaagctcattctgcccttctattccttcacccttttctgcatcatccttcccatgacgatgtttattcccgaagccgagctccctgcctgggtcgtgtgctacatcccggcgaccatgtccctgctgaacatcctcccagccccgaaatcgttcccgtttatcgtgccctatctcctgttcgagaacaccatgtcggtaaccaagttcaacgccatggtctccggcctgttccagctcgggagcgcccacgagtgggtcgtcaccaagaaatcaggccgttcttccgagggcgatctcgtcgtcgagaagcagcctagacagcaaagggcagggtccgcatccaaccttggttcccttgcaaaggagccttcctccagtctcagaaaggactcccaaaggaagaaacacaataggatatacaggaaggagctggcgctctccttccttctcttaacagcagctgctcggagcctgatatcggtgcaaggaatacacttctacttccttctgttccaaggggtatcgtttttggtcgttgggctcgatctgatcggcgagcaagttgagtgacgggaatacaagggagagtaatggcggtatttgtttttgctgcgagcggtggcaatgcgaacagggagcacttcaggtaaaggcaggcacggtatatgattcaacgcaaacacgagaagatttggttccggattaagaggggttatagatggttagggatacttgaaacggtgtactgtggattgtagatatatggcttgagactgtggactggggtctgattcttttgtaagaaaatctttcagtggggtcattttgctttcttgacagtttaccttcaaagggggatactgtttgggatccatgtaatttggccagttagtacgaatgcatactgaatgatacttgttcgtttcttgaattctaacatgtggataaaggattgcgctaaggggaacccagaaaaagggaagaagatgttctgcatgagtgcatcagtagaatgcctacgggctctgtttgtgaatgcaagagcgcaaatcacatgcggctcacgaacggtaatcttccagcccacttgtccagcagtgatggtggagagagacagggtatcaggggaactggggaaggggtttaggaacaacccatctccattcaccaacggcgcctccaactccgagcgccgcctctgcctcgaaaactcttactcgcggagctgcagccaggggggcgaccggtgtgtgaaccgctgccgctatggctgctgcttccgttccgccaacatcttcatccggcggctgggacttcacctgtaaccttgaagtcgattatgggtctgaagaaaatgcatccatagtctacagaacgttagcagttgacaaggagttgcagcctgacaaggtgaagagggagatgactctatcaggcagcaagctggccgtccacttcgcagccgtggaggcccgcttcctgcgagcatcgttcagctcatttgtggatcttatgggactcgtgacgaagctcgtcgaagaatatggtgtggccaatgcagggcattcttgaatcttgatgaacaatctcatacacggcattgcggagttgattttagttcgcctgtgagcaatttggagttttggacagtctttaccagtggaactgctcttgatctgtgtcaagctagtgtagtatttgcccttgattggtcaaatcctattcggaacggttaattcttttcggcaatgccgttgtgaaatgtatagatgatgaataggtaaaaattatctatatatcctcagttaggctttctccacgagtaatgagtggtcttggtctggtctctggttgtggcctctccggatgatgctatatgtcatctcccatctccgttatcgtgtttctcggtaaaaaaaacgttacg

SEQ ID NO: 31852 - DNA, 1274 bp, Zea Mays
ccgtctcctagtcctaacccaccaccaacgcaataatctacagcagcggaggaaagcactacagctcttgagcaacaatggcgccgccgatgaaggtgtacgggtgggccgtgtcgccgtggatggcgcgcgcgctggtgtgtctggaggaggccggcgccgactacgagatcgtccccatgagcaggtgtggcggcgaccaccgccggccggagcacctcgccaaaaacccgttcggtgaaatcccagttttagaggacggtgacctcacgctctaccaatcacgcgccatcgcacggtacgtcctccgcaagctcaagccagagctcctccgcgaaggcgacctcgaggggtcggcgatggtggacgcgtggatggaggtggaagcccaccacatggagccggccctgtggcccatcatccgccacagcatcatcggccagtacgtcggccgcgaccgcgaccaccaggccgtcatcgacgagaacctcgacaggctgaggaaggtgctgccggcgtacgaggcgaggctgtccgtctgcaagtacctggccggggacgtaatcagcgccgccgacctctgccacttcggcttcatgcgctacttcatggccacggagtacgccggcttggtgcacgcgtacccgcacgtcaaggcctggtgggacgccctgctggcgaggccctcggtgcagaaggtcatggcaggcatgccgccggattttgggtacgccagcgggaacataccataggctagagaggtgggcgtccgtcactccagatctgaggtctctgaacctcaacgtttccgataaacatgcatgctttatctactgtttaaaaaccaaacttgattggtgcaggggtattttggttttctcttataatttatttattgtgttttgaatacttttagtcactaaaaccaacaagatagacaataaaatttagtctactaactaaactttagtcactaggctaaagaaaccaaacatgttttaaattagggtcattgctgatgtggtttctcgttttttaccatataatgtactacatccgttctcgaattttttgtcgaccactagtttatttttaactaaaacacgacaaataaaaaagaacgaagaaaataccaatttcgtaaatagttttttataaaaatcatttcttccttttatacggtagaggtgaagccaaaagaaaaagcttccctagctttgactcatgctatttttgaagaaaaaaactcctactatatatataaaaaataggat

SEQ ID NO: 31853 - DNA, 1709 bp, Zea Mays
cgtctcctagtcctaacccaccaccaacgcaataatctacagcagcggaggaaagcactacagctcttggtcgagcaagcaacaatggcgccgccgatgaaggtgtacgggtgggccgtgtcgccgtggatggcgcgcgcgctggtgtgtctggaggaggccggcgccgactacgagatcgtccccatgagcaggtgtggcggcgaccaccgccggccggagcacctcgccaaaaacgtacgtggctagctctctccgccgtcgcatcgtcgactgacattccgacccttaactttgagtttccagcagcaactttaatttgcccagttaactgttcgctaacgttagtttagcgagcaggataataagtagagaacatatctaatgcacatgaaagattgatacacatggtgcatatattaaatcatcaccactcattttagatctaacgtctctagttgtttggtatattttgctaaggacaccctccaacgtggtggtgtgtagtggtggaaggtgttatttgtaaattgaatgatcaactagagacattagatttaaaatgagtgatggtgaattaatatgtgcaccatgtgcaccaatcctccatgtgcaccagatatgtcctctaataagtaatagctcttcgatgttctgcgctgcagccgttcggtgaaatcccagttttagaggacggtgacctcacgctctaccaatcacgcgccatcgcacggtacgtcctccgcaagctcaagccagagctcctccgcgaaggcgacctcgaggggtcggcgatggtggacgcgtggatggaggtggaagcccaccacatggagccggccctgtggcccatcatccgccacagcatcatcggccagtacgtcggccgcgaccgcgaccaccaggccgtcatcgacgagaacctcgacaggctgaggaaggtgctgccggcgtacgaggcgaggctgtccgtctgcaagtacctggccggggacgtaatcagcgccgccgacctctgccacttcggcttcatgcgctacttcatggccacggagtacgccggcttggtgcacgcgtacccgcacgtcaaggcctggtgggacgccctgctggcgaggccctcggtgcagaaggtcatggcaggcatgccgccggattttgggtacgccagcgggaacataccataggctagagaggtgggcgtccgtcactccagatctgaggtctctgaacctcaacgtttccgataaacatgcatgctttatctactgtttaaaaaccaaacttgattggtgcaggggtattttggttttctcttataatttatttattgtgttttgaatacttttagtcactaaaaccaacaagatagacaataaaatttagtctactaactaaactttagtcactaggctaaagaaaccaaacatgttttaaattagggtcattgctgatgtggtttctcgttttttaccatataatgtactacatccgttctcgaattttttgtcgaccactagtttatttttaactaaaacacgacaaataaaaaagaacgaagaaaataccaatttcgtaaatagttttttataaaaatcatttcttccttttatacggtagaggtgaagccaaaagaaaaagcttccctagctttgactcatgctatttttgaagaaaaaaactcctactatatatataaaaaataggat

SEQ ID NO: 31854 - DNA, 1323 bp, Zea Mays
cagattcattaacatgcctatcctaccactataaaggtacacaaagcttccgaagggaagaagctcttgagaagatactgcaatgatggctcctctgtctcctagactggtagtgcccgtagacgtgaagaagctgccgcgggagcaaaaggtccctctccacaaccgctggcacccggatatccctcctgttgctgatgtaaccgaaggggaattgttccgcgttgagatggtcgattggagtggagggcgggttagggatgataactctgcagatgatctgaaattcatggatttcacaattgctcattatcttagtgggcccctaagaatagttgattctgaaggggttccagcttcaccaggtgatcttctcgcggtagaaatctgcaaccttggcccacttcctggcgacgagtggggttacaccgcaatacttgaaagggagaatggaggtggattcttaactgaccacttccctagcgcaagaaaagccatctggtatttcgaaggaatttacgcatgctccccgcagataccaggtgttcgttttccaggattgactcatcctggtgttgtgggaactgcaccgtcacttgagctcctaaatatatggaatgaaagagagaaaagtttgtctgagacaagcctagagactattaaactgtgtgaagttctacaccagaggccccttgctcatttaccgacccctgaaaattgcttacttgggaaggtccaagaagggactgctgaatggcacataattgcaaacgaagcggccagaactattgctggaagggaaaatggcgggaattgcgacataaagaacctaagcagaggctccagaatttatctaccagtgtttgtcgaaggagcaaacctcagcactggtgacatgcacttctcccagggggacggcgagatttcgctgtgtggagcaattgaaatgagcgggttccttgagctcaagtgtgagatcataagaggtgggatgaaggaatacttgactccagttggtccaacaccactccatgtgagccccatctttgagataggtcctgtggagccacgtttctcggagtggttagtgtttgagggcatcagcgtagatgagtctgggaagcaacattttcttgacgcatctgtggcctacaagcgtgcagttctgaacgccattgagtacctttccaagttcgggtactctaaggagcaggaacagtctggattggggtaaaaaccccgtggaccaaatccgcttggatgaaatcccggcccacacgatagcagcgttcgtttaatcccgctcgggcctcgaccccggcc

SEQ ID NO: 31855 - DNA, 1677 bp, Zea Mays
cagattcattaacatgcctatcctaccactataaaggtacacaaagcttccgaagggaagaagctcttgagaagatactgcaatgatggctcctctgtctcctagactggtagtgcccgtagacgtgaagaagctgccgcgggagcaaaaggtccctctccacaaccgctggcacccggatatccctcctgttgctgatgtaaccgaaggggaattgttccgcgttgagatggtcgattggagtggagggcgggttagggatgataactctgcagatgatctgaaattcatggatttcacaattgctcattatcttagtgggcccctaagaatagttgattctgaaggggttccagcttcaccaggtgatcttctcgcggtagaaatctgcaaccttggcccacttcctggcgacgagtggggttacaccgcaatacttgaaagggagaatggaggtggattcttaactgaccacttccctagcgcaagaaaagccatctggtatttcgaaggaatttacgcatgctccccgcagataccaggtgttcgttttccaggattgactcatcctggtgttgtgggaactgcaccgtcacttgagctcctaaatatatggaatgaaagagagaaaagtttgtctgagacaagcctagagactattaaactgtgtgaagttctacaccagaggccccttgctcatttaccgacccctgaaaattgcttacttgggaaggtccaagaagggactgctgaatggcacataattgcaaacgaagcggccagaactattgctggaagggaaaatggcgggaattgcgacataaagaacctaagcagaggctccagaatttatctaccagtgtttgtcgaaggagcaaacctcagcactggtgacatgcacttctcccagggggacggcgagatttcgctgtgtggagcaattgaaatgagcgggttccttgagctcaagtgtgagatcataagaggtgggatgaaggaatacttgactccagttggtccaacaccactccatgtgagccccatctttgagataggtcctgtggagccacgtttctcggagtggttagtgtttgagggcatcagcgtagatgagtctgggaagcaacattttcttgacgcatctgtggcctacaagcgtgcagttctgaacgccattgagtacctttccaagttcgggtactctaaggagcaggatataaagccaaaacgcgtgaaggggagaccacttggaggaccacagttgagaagacttccagatcttctaagctgctcaaatcatggacgccttcctgccacccaagacagaagtggtacaagcgcgccctagtatatggaaacagatgcagtatcaatcgacatgcaactgtgccaaggctataatcaagaatgcgtttgtctttttttttttattttcttcgtctaataaaaattacgataaagcttttgccgttctttagaaaaaaataatcaagaattatcctcgattcatcaggttgtcatcgtgaatgagagtgagccttttggttttataccagccaggctctttttaaatggtactgcataaattctcaaatatttatcgtccgctagtttatttttaaactaaaccgtaataaagaaaaaagaacggagggagtatatgcatgcagaccatga

SEQ ID NO: 31856 - DNA, 1433 bp, Zea Mays
cagattcattaacatgcctatcctaccactataaaggtacacaaagcttccgaagggaagaagctcttgagaagatactgcaatgatggctcctctgtctcctagactggtagtgcccgtagacgtgaagaagctgccgcgggagcaaaaggtccctctccacaaccgctggcacccggatatccctcctgttgctgatgtaaccgaaggggaattgttccgcgttgagatggtcgattggagtggagggcgggttagggatgataactctgcagatgatctgaaattcatggatttcacaattgctcattatcttagtgggcccctaagaatagttgattctgaaggggttccagcttcaccaggtgatcttctcgcggtagaaatctgcaaccttggcccacttcctggcgacgagtggggttacaccgcaatacttgaaagggagaatggaggtggattcttaactgaccacttccctagcgcaagaaaagccatctggtatttcgaaggaatttacgcatgctccccgcagataccaggtgttcgttttccaggattgactcatcctggtgttgtgggaactgcaccgtcacttgagctcctaaatatatggaatgaaagagagaaaagtttgtctgagacaagcctagagactattaaactgtgtgaagttctacaccagaggccccttgctcatttaccgacccctgaaaattgcttacttgggaaggtccaagaagggactgctgaatggcacataattgcaaacgaagcggccagaactattgctggaagggaaaatggcgggaattgcgacataaagaacctaagcagaggctccagaatttatctaccagtgtttgtcgaaggagcaaacctcagcactggtgacatgcacttctcccagggggacggcgagatttcgctgtgtggagcaattgaaatgagcgggttccttgagctcaagatataaagccaaaacgcgtgaaggggagaccacttggaggaccacagttgagaagacttccagatcttctaagctgctcaaatcatggacgccttcctgccacccaagacagaagtggtacaagcgcgccctagtatatggaaacagatgcagtatcaatcgacatgcaactgtgccaaggctataatcaagaatgcgtttgtctttttttttttattttcttcgtctaataaaaattacgataaagcttttgccgttctttagaaaaaaataatcaagaattatcctcgattcatcaggttgtcatcgtgaatgagagtgagccttttggttttataccagccaggctctttttaaatggtactgcataaattctcaaatatttatcgtccgctagtttatttttaaactaaaccgtaataaagaaaaaagaacggagggagtatatgcatgcagaccatga

SEQ ID NO: 31857 - DNA, 1497 bp, Zea Mays
cagattcattaacatgcctatcctaccactataaaggtacacaaagcttccgaagggaagaagctcttgagaagatactgcaatgatggctcctctgtctcctagactggtagtgcccgtagacgtgaagaagctgccgcgggagcaaaaggtccctctccacaaccgctggcacccggatatccctcctgttgctgatgtaaccgaaggggaattgttccgcgttgagatggtcgattggagtggagggcgggttagggatgataactctgcagatgatctgaaattcatggatttcacaattgctcattatcttagtgggcccctaagaatagttgattctgaaggggttccagcttcaccaggtgatcttctcgcggtagaaatctgcaaccttggcccacttcctggcgacgagtggggttacaccgcaatacttgaaagggagaatggaggtggattcttaactgaccacttccctagcgcaagaaaagccatctggtatttcgaaggaatttacgcatgctccccgcagataccaggtgttcgttttccaggattgactcatcctggtgttgtgggaactgcaccgtcacttgagctcctaaatatatggaatgaaagagagaaaagtttgtctgagacaagcctagagactattaaactgtgtgaagttctacaccagaggccccttgctcatttaccgacccctgaaaattgcttacttgggaaggtccaagaagggactgctgaatggcacataattgcaaacgaagcggccagaactattgctggaagggaaaatggcgggaattgcgacataaagaacctaagcagaggctccagaatttatctaccagtgtttgtcgaaggagcaaacctcagcactggtgacatgcacttctcccagggggacggcgagatttcgctgtgtggagcaattgaaatgagcgggttccttgagctcaagtgtgagatcataagaggtgggatgaaggaatacttgactccagttggtccaacaccactccatgatataaagccaaaacgcgtgaaggggagaccacttggaggaccacagttgagaagacttccagatcttctaagctgctcaaatcatggacgccttcctgccacccaagacagaagtggtacaagcgcgccctagtatatggaaacagatgcagtatcaatcgacatgcaactgtgccaaggctataatcaagaatgcgtttgtctttttttttttattttcttcgtctaataaaaattacgataaagcttttgccgttctttagaaaaaaataatcaagaattatcctcgattcatcaggttgtcatcgtgaatgagagtgagccttttggttttataccagccaggctctttttaaatggtactgcataaattctcaaatatttatcgtccgctagtttatttttaaactaaaccgtaataaagaaaaaagaacggagggagtatatgcatgcagaccatga

SEQ ID NO: 31858 - DNA, 2139 bp, Zea Mays
cagattcattaacatgcctatcctaccactataaaggtacacaaagcttccgaagggaagaagctcttgagaagatactgcaatgatggctcctctgtctcctagactggtagtgcccgtagacgtgaagaagctgccgcgggagcaaaaggtccctctccacaaccgctggcacccggatatccctcctgttgctgatgtaaccgaaggggaattgttccgcgttgagatggtcgattggagtggagggcgggttagggatgataactctgcagatgatctgaaattcatggatttcacaattgctcattatcttagtgggcccctaagaatagttgattctgaaggggttccagcttcaccaggtgatcttctcgcggtagaaatctgcaaccttggcccacttcctggcgacgagtggggttacaccgcaatacttgaaagggagaatggaggtggattcttaactgaccacttccctagcgcaagaaaagccatctggtatttcgaaggaatttacgcatgctccccgcagataccaggtgttcgttttccaggattgactcatcctggtgttgtgggaactgcaccgtcacttgagctcctaaatatatggaatgaaagagagaaaagtttgtctgagacaagcctagagactattaaactgtgtgaagttctacaccagaggccccttgctcatttaccgacccctgaaaattgcttacttgggaaggtccaagaagggactgctgaatggcacataattgcaaacgaagcggccagaactattgctggaagggaaaatggcgggaattgcgacataaagaacctaagcagaggctccagaatttatctaccagtgtttgtcgaaggagcaaacctcagcactggtgacatgcacttctcccagggggacggcgagatttcgctgtgtggagcaattgaaatgagcgggttccttgagctcaagtgtgagatcataagaggtgggatgaaggaatacttgactccagttggtccaacaccactccatgtgagccccatctttgagataggtcctgtggagccacgtttctcggagtggttagtgtttgagggcatcagcgtagatgagtctgggaagcaacattttcttgacgcatctgtggcctacaagcgtgcagttctgaacgccattgagtacctttccaagttcgggtactctaaggagcaggtgtatcttttactatcatgctgcccatgcgagggtaggatatctggaatagtggactctcctaatgctgtaacaactcttgccatccctacagcgatatttgatcaggtatgctgccaagagtccagcccatcgcaattttctttggtcttttttactgtcatatgcactgtatcgttgctgctccttttaagtgtaaagtgttcatcaacagattagttaaacagttttcctttagtctgatactctgatgtttgatccaagtgtctgatatatgctgctggtacttcatgtgttatgtctgaagaaacaaaagttactgcctgcatatcgtgaactcatgagcaggccgtacaaacaaaccacacaattttgatgctgattaacgtgagctgggcaaggttcagggttcaccaagactagatttatatcaccctctccattttattgaaagtatcttatgatataaagccaaaacgcgtgaaggggagaccacttggaggaccacagttgagaagacttccagatcttctaagctgctcaaatcatggacgccttcctgccacccaagacagaagtggtacaagcgcgccctagtatatggaaacagatgcagtatcaatcgacatgcaactgtgccaaggctataatcaagaatgcgtttgtctttttttttttattttcttcgtctaataaaaattacgataaagcttttgccgttctttagaaaaaaataatcaagaattatcctcgattcatcaggttgtcatcgtgaatgagagtgagccttttggttttataccagccaggctctttttaaatggtactgcataaattctcaaatatttatcgtccgctagtttatttttaaactaaaccgtaataaagaaaaaagaacggagggagtatatgcatgcagaccatga

SEQ ID NO: 31859 - DNA, 2495 bp, Zea Mays
cagattcattaacatgcctatcctaccactataaaggtacacaaagcttccgaagggaagaagctcttgagaagatactgcaatgatggctcctctgtctcctagactggtagtgcccgtagacgtgaagaagctgccgcgggagcaaaaggtccctctccacaaccgctggcacccggatatccctcctgttgctgatgtaaccgaaggggaattgttccgcgttgagatggtcgattggagtggagggcgggttagggatgataactctgcagatgatctgaaattcatggatttcacaattgctcattatcttagtgggcccctaagaatagttgattctgaaggggttccagcttcaccaggtgatcttctcgcggtagaaatctgcaaccttggcccacttcctggcgacgagtggggttacaccgcaatacttgaaagggagaatggaggtggattcttaactgaccacttccctagcgcaagaaaagccatctggtatttcgaaggaatttacgcatgctccccgcagataccaggtgttcgttttccaggattgactcatcctggtgttgtgggaactgcaccgtcacttgagctcctaaatatatggaatgaaagagagaaaagtttgtctgagacaagcctagagactattaaactgtgtgaagttctacaccagaggccccttgctcatttaccgacccctgaaaattgcttacttgggaaggtccaagaagggactgctgaatggcacataattgcaaacgaagcggccagaactattgctggaagggaaaatggcgggaattgcgacataaagaacctaagcagaggctccagaatttatctaccagtgtttgtcgaaggagcaaacctcagcactggtgacatgcacttctcccagggggacggcgagatttcgctgtgtggagcaattgaaatgagcgggttccttgagctcaagtgtgagatcataagaggtgggatgaaggaatacttgactccagttggtccaacaccactccatgtgagccccatctttgagataggtcctgtggagccacgtttctcggagtggttagtgtttgagggcatcagcgtagatgagtctgggaagcaacattttcttgacgcatctgtggcctacaagcgtgcagttctgaacgccattgagtacctttccaagttcgggtactctaaggagcaggtgtatcttttactatcatgctgcccatgcgagggtaggatatctggaatagtggactctcctaatgctgtaacaactcttgccatccctacagcgatatttgatcaggtatgctgccaagagtccagcccatcgcaattttctttggtcttttttactgtcatatgcactgtatcgttgctgctccttttaagtgtaaagtgttcatcaacagattagttaaacagttttcctttagtctgatactctgatgtttgatccaagtgtctgatatatgctgctggtacttcatgtgttatgtctgaagaaacaaaagttactgcctgcatatcgtgaactcatgagcaggccgtacaaacaaaccacacaattttgatgctgattaacgtgagctgggcaaggttcagggttcaccaagactagatttatatcaccctctccattttattgaaagtatcttatgtgagtaagcctggttcatttgatcagcggcatgcatcacctaactgtttcttgtgataatgtgatccggtcaatataaaagcgacccaaatattatagaatatacttttccgctgacagttactattaggcaaagtgtaagaacaacttgtatgaagaagtgacaatgaccagcggtcagcggagaagaaacatgttattattttcagcacaaggctataggcagattgaaattgcttacttcgatactaaaaaaaatatattgatctgtaccagtttgtttttgggcctttgggcattttgatcgtcgttcccttttaaaactaaaatgcataacatttcgatttccaacgtaggatataaagccaaaacgcgtgaaggggagaccacttggaggaccacagttgagaagacttccagatcttctaagctgctcaaatcatggacgccttcctgccacccaagacagaagtggtacaagcgcgccctagtatatggaaacagatgcagtatcaatcgacatgcaactgtgccaaggctataatcaagaatgcgtttgtctttttttttttattttcttcgtctaataaaaattacgataaagcttttgccgttctttagaaaaaaataatcaagaattatcctcgattcatcaggttgtcatcgtgaatgagagtgagccttttggttttataccagccaggctctttttaaatggtactgcataaattctcaaatatttatcgtccgctagtttatttttaaactaaaccgtaataaagaaaaaagaacggagggagtatatgcatgcagaccatga

SEQ ID NO: 31860 - DNA, 552 bp, Zea Mays
tgacaccggctggccagcgtccacgaggggaatggcaattgactgaccgacgctatccctatggtgtttgcttctcatccatactcaggatataaagccaaaacgcgtgaaggggagaccacttggaggaccacagttgagaagacttccagatcttctaagctgctcaaatcatggacgccttcctgccacccaagacagaagtggtacaagcgcgccctagtatatggaaacagatgcagtatcaatcgacatgcaactgtgccaaggctataatcaagaatgcgtttgtctttttttttttattttcttcgtctaataaaaattacgataaagcttttgccgttctttagaaaaaaataatcaagaattatcctcgattcatcaggttgtcatcgtgaatgagagtgagccttttggttttataccagccaggctctttttaaatggtactgcataaattctcaaatatttatcgtccgctagtttatttttaaactaaaccgtaataaagaaaaaagaacggagggagtatatgcatgcagaccatga

SEQ ID NO: 31861 - DNA, 614 bp, Zea Mays
ccgacgctatccctatggtgtttgcttctcatccatactcaggtgtatcttttactatcatgctgcccatgcgagggtaggatatctggaatagtggactctcctaatgctgtaacaactcttgccatccctacagcgatatttgatcaggatataaagccaaaacgcgtgaaggggagaccacttggaggaccacagttgagaagacttccagatcttctaagctgctcaaatcatggacgccttcctgccacccaagacagaagtggtacaagcgcgccctagtatatggaaacagatgcagtatcaatcgacatgcaactgtgccaaggctataatcaagaatgcgtttgtctttttttttttattttcttcgtctaataaaaattacgataaagcttttgccgttctttagaaaaaaataatcaagaattatcctcgattcatcaggttgtcatcgtgaatgagagtgagccttttggttttataccagccaggctctttttaaatggtactgcataaattctcaaatatttatcgtccgctagtttatttttaaactaaaccgtaataaagaaaaaagaacggagggagtatatgcatgcagaccatga

SEQ ID NO: 31862 - DNA, 3289 bp, Zea Mays
cttggatgttcgtgcatagacccaatatgtgaagttgcttggtgcaaaaagtgattttctggatatcgcataggtttgctaagagtaatctgatagtttcattgttgcatagatgtcataggatagcagagaccccaaactcaattaacaaataagcattgttatttatagtatgaaacaactatcagagaacgcttaattcaccatacccgtccaggtttaagcataccactggctagttctaggtttctagcttcaagaacaagaacccaatgtgcaatttgttgtgatcgagtcagcctgaccgcgaatatactagtatactaattggtctcacctcttcttgtactcattggtggccatcgccttgcatgattaaagagaaattggatcattaggtaccttgttttgaacaaagctgacaaattaaagtgtctgatttttttttcagtttatatatcaagcttttgactagccttaggcaattgcctcatcggtccacgtaaacttgtttcttaggcatatttggaatctactcccatgttattgtaaggtagctcacaaaaatcaattgtttaagaaccacatgccctcacaacttcacttgttttctggagcatctgtttgactaaaacacataaaacgaaactgaaaaaatacaggagagcagtcccaaatagagccttacaaaattagtgtggcaaaatatccaacatatatcattcaagaaacgataatagagatgcctctttttttacaaaagtgacataattcacaaccatctctatcatgttctctatcgggacccactaacataattgcctctgaaaatatgttttcaaagatggctgggatttccaagccttttgaaaatatgcacccaaccactgaggttcaagtccttgacttgaagtcgagtgtgtatataccagcatgctgatatggcttgtcactcaaatttagctcatatcgtaatttagtatgtgtagtgaattaatacatagaggttgtacttgtaggaggacacaatccgatggacctgaattagcaccggtaaagaaccgatcaaatttttttatttagttccaactatagttgaaattgtcacagtttatctacatgtcttttagttctggcacttttgtcaatgttgttctaatgcactatgtgataatggagggacatctgattttttaagttcagaagctcggtgccaaaagcagacaccttcatttgttttcttgttcttcggtagtagttttgttctttggatttttgtcggctgtctgagctttgacgtgaggtttgcaaaccctttactttgtctgcaaaatgttaaggaaacaagcatgttaagaatccttctgattacaaatttaagctattttgcaaaatgttaaagcaacaagcatatttagaatccttctgatttcaaatttaagctattctgcaaaatgttaaggcaacaagcatatttagaatccttctgattacaaatttaagctattctgaatcaaatgacagcaaacgcagatctgctatgagaataaggaataaactaaaactggagctgtgatatcgacaacaataaaattgtttagtgttttaacaaacaatttatatataactaagagaaagggacatttgtatttgcggcagatttagctgtaagtctgtaacccatcccatcttcagggaaaatcagtctttcgttcttgtttctatatttttttttagaaatgtgattggatttgaaaaaagtcagaactaaaaatgtttttataattgggatcaaatttaaaagagcctagacttgaaatagaatcagaatatgtggatatatagaaacgagacatgatttaatattctcaattactcatatgtaaaggcacacggtaatttaggatcaaggtatcattggtttccctaacagagaccagtagctctaaaccccagaaaagaggaagcttagtttgtttttttactcttgattcagtcaggtggcatatactaaattgtagatttggttctaccatgagatacttgttttagtcagtatgttgattatttttaaagcaaaacactgaatattcacctcgcttaaatagctttatatctttgaagtaaaggggtcaagtgcatgcatgaagtagttgtagtcttcagaggaggaatgtcttctctatttatattgtctaagtgtcattctaattagtgtattgaagaccttttctcactggttgttacgtgcttgttctatcaaaaagatagatgcatcattatctggatccatgatctcgtcatgtttagtttacaggagatgtagtgtttagcaacttatcagttttaacaaaccatgagattgttgtgtttgttgtttgaaaagacgttgtaataaggttgccttcgccgtaacaaaaatttagactgggttgagcttttagattatcccacagcgcagccgttatcagttctggacgccttttggttacgtggccattcagaacacaaagtgcatgtctccctggattaaccgaacaatattttggagttagggattacagccttgaaggggattatacccccaaggggttcaagtgataggaggggattaacttaatccctccctggaacgtatccctctctggaatgaatccctgtgaaccgaacaagccctgagtggtatcttaacctcgggggttggggattttatacaggtgtatcttttactatcatgctgcccatgcgagggtaggatatctggaatagtggactctcctaatgctgtaacaactcttgccatccctacagcgatatttgatcaggatataaagccaaaacgcgtgaaggggagaccacttggaggaccacagttgagaagacttccagatcttctaagctgctcaaatcatggacgccttcctgccacccaagacagaagtggtacaagcgcgccctagtatatggaaacagatgcagtatcaatcgacatgcaactgtgccaaggctataatcaagaatgcgtttgtctttttttttttattttcttcgtctaataaaaattacgataaagcttttgccgttctttagaaaaaaataatcaagaattatcctcgattcatcaggttgtcatcgtgaatgagagtgagccttttggttttataccagccaggctctttttaaatggtactgcataaattctcaaatatttatcgtccgctagtttatttttaaactaaaccgtaataaagaaaaaagaacggagggagtatatgcatgcagaccatga

SEQ ID NO: 31863 - DNA, 360 bp, Zea Mays
tgagaaactgctccatgctaaaatgtttacaaagacgctccatgctaaaattcagtatttctacacagttggtgacattgatgcttgatgagaattagttcatcaaatgatcatctgatgatcttgtggtcaccgagtgtcctctttccattcaataaaatgttgtgtgtaacctgcatgcaaactatatagactgttaaactatatagactgttatacagagttgttccgagcacaaaatgatcaactttagttcatctaagtatatgagagcagtaaaacttcactaggataaaatataactggggcataaaattgggagactaaaaattaatccttgtagataaagttggttctgac

SEQ ID NO: 31864 - DNA, 1127 bp, Zea Mays
gttgctttttgcacaaaggcttactgtcttatggaagagagggttgatcgaagtgaaatattgacattggatagcattagacaagttttgattagactagaagacagcatcatatttggccttttggagagagcacagttttgttacaatgctgatacatatgatagcaatgctttccacatggatggttttggcggctctttggttgaatatatggttagagaaactgaaaagctccatgcacaggttgggagatacaagagcccagatgagcaccctttctttcctgaggatctgcctgagccccggttgccacctatgcagtacccaagggttttgcatcccattgctgattctatcaatatcaacaaagagatttggaaaatgtattttgatgaacttcttccaagattggtgaaaaaaggaagtgatggtaatgctggatccagtgctctttgtgacacgacctgcttgcaggcgctctccaaaaggatccactatgggaagtttgtggcagaggctaagtttcaggagtccccggaagcttacatgccagccataatagctcaggaccgtgatcaactcatgcaccttctcacatatgaaacggtggagcgtgctatcgaacatagggtggaagccaaagccaagatcttcgggcaagaggtgaacatcggtgtggaggacaacggcagcccaccggtgtacaagatcgttccgagcttggtcgccgagctgtacagctacagaatcatgccgctaaccaaagaggttcaaatcgcgtatttgcttaggaggctggattgagtatgtttatgtagatgtaaattgccagatcagaactcctggcgttaagccagaacattggtaaataccggttttggtgtcaggatgcaaaatgtaccatgtgtggaattgtgccaacaaacaagcataatatcatgtggagttgtcgagtagtcgcgcctcgtgcgtactgccaatggacaatgtttgtagactgtatggaatgatgggtcacttcctttggcgggtgcccttttgaaagggagtaaaattctctcattgtcgttgaaatttatacagatccgctcaagtgccatcgaaattttcaacttactttgatt

SEQ ID NO: 31865 - DNA, 749 bp, Zea Mays
tagaaggactaatctttaatccctggaaccaaacagacccttagttctttgggtgcacatccacttttgttccagacttccagtcaactaggtgtccaggcgctctccaaaaggatccactatgggaagtttgtggcagaggctaagtttcaggagtccccggaagcttacatgccagccataatagctcaggaccgtgatcaactcatgcaccttctcacatatgaaacggtggagcgtgctatcgaacatagggtggaagccaaagccaagatcttcgggcaagaggtgaacatcggtgtggaggacaacggcagcccaccggtgtacaagatcgttccgagcttggtcgccgagctgtacagctacagaatcatgccgctaaccaaagaggttcaaatcgcgtatttgcttaggaggctggattgagtatgtttatgtagatgtaaattgccagatcagaactcctggcgttaagccagaacattggtaaataccggttttggtgtcaggatgcaaaatgtaccatgtgtggaattgtgccaacaaacaagcataatatcatgtggagttgtcgagtagtcgcgcctcgtgcgtactgccaatggacaatgtttgtagactgtatggaatgatgggtcacttcctttggcgggtgcccttttgaaagggagtaaaattctctcattgtcgttgaaatttatacagatccgctcaagtgccatcgaaattttcaacttactttgatt

SEQ ID NO: 31866 - DNA, 885 bp, Zea Mays
ggccgcggccggccaccgggtagtggtttcacaagcaccgaaatgcatttaatatgagaatatccagcacaaaaatcaattgaacgttttgagaacgaaaataacacccgccgatactataccataaataaagttcaagaaatccacccctgcccgccgccgcctcttccttccggccggtcttcgtttcgacatccaggaaatggctaccgcggcgcgcctcctcctcgtcgtggtgcttctctccgcggcgataccgatcccgtccttcgcgacaagcttcgtcgtcggcgacaagaggcatcgctgggctcccaacgtcaactatacagactgggcggaccgtcaccagttccacgtcggcgactggctcggtgaacgagacggcatacgcggcgtgcgacgccagcagccccatcctcagctacagccgcggccacaacttcgtcttccggctcaaccacacgggccggttctacttcatctgcagccgcggctactgctggagtggcatgaaggtctccgtgctcgtccagccgccgccgccgcccccgtcgctgccgccggcgtcccactcccacgcgtcaagcgccagtgcgcgtgtgcggccggcggccgggctttggtgtgcggctctctctaccttgctgggctgggcggtgctcacgccgccgctgtcgtttcgggtctggagttctggacgtccaggcgcgcacacgagtctaaactctaaagctgtttgctaatgtactacccatttcttcttttttagtatggaaataagagttccggctttagcataaagatgtgtgccaatacatgacgattattgcaccagagagcagttgcttgaataattaaactaacttaaagaaaacaaaatat

SEQ ID NO: 31867 - DNA, 384 bp, Zea Mays
ggccggccaccgggtagtggtttcacaagcaccgaaatgcatttaatatgagaatatccagcacaaaaatcaattgaacgttttgagaacgaaaataacacccgccgatactataccataaataaagttcaagaaatccacccctgcccgccgccgcctcttccttccggccggtcttcgtttcgacatccaggaaatggctaccgcggcgcgcctcctcctcgtcgtggtgcttctctccgcggcgataccgatcccgtccttcgcgacaagcttcgtcgtcggcgacaagaggcatcgctgggctcccaacgtcaactatacagactgggcggaccgtcaccagttccacgtcggcgactggctcgacgcgttaatttgcac

SEQ ID NO: 31868 - DNA, 1314 bp, Zea Mays
atggagtaccagagacaacaagctgagtaccaaaagaagaaggacgagtattatgcaagcctccagacccataatcaagttcttctctcgcaactggcacaacaagcgggtgtcccgatgccgacatatgggatgccgcctccggactttgcactgccgatgccaatgttgtcgcctccacctccgcctctgtcacaatttcctatgggatttcaaacaccacccgcttcagttgccgcacctggagatgggtctggtcaatatgacgcatcgtatttttgggtgaacaaccttttcaacacccatagtccagctggaggaagtggctataactcaaaccaaccaggtgatggatatgagtgatagttcatcaaatgcgtttgatttgaaactatgtgactattcatgtcaaagactatgtgtcgaactatgtcagtttttaatttgaaactatatgttgatgtaaaaaaattgttgcaactatttggaactatatgtttgtgaatatgaggtgatgttaaatttgtgaatgtgaatacttatgtgaattgatgtttgtgaatgtaattgtgaatgtgaatatgtggttgtatatgcaatctgtgtacatgtgtatgcaatctgtgattttttctgtaaatgtcagaaatttataaaaacaatattttttgcaattgctgaaattcgttatgtccgacggcttagtttaggccatcggacataagaccctgttatatccgacgacctacactaagccgtcggacataagagttgtgggtcccgtccgtggtcgttaaaacggttaccgagaactatctccgacggtctgacgtggccgtcggagttacgttatgtccgacggtcgctgtcgaacataacgctattttcgatttattatgtccgacggctaaagactgtcggagataacgcaaaaccatcgaaaatagtctatttccgacggtttcgtgcttatgtccgacggctttgaccgtcagagattttatgttttactgtagtgaaatataatgtaagggcctttctctttggcaaactagaatgcatcctggacaattgcttcatcaccaataaacatctgaaccagcaagaacaccgttactatcctacttgaaaatataaactatgctcaagataacatcagaatagaaaatattttccatggtaatgcaatgtctccaatgtatcttcaatgaaaatggaccaaatttcaatgttagtcatgcaataagactaatattttagttaaacaactaaaccatgcaacgtatcatagagacaaggaattatatacaaaat

SEQ ID NO: 31869 - DNA, 3915 bp, Zea Mays
aaaagtctgtcgcagttcttgtacgcgggaacggtattgggccgcttccttttgagtctcaaatttgctacttaaaagaatgagctctaaactgttaagatgaattttattagaatacggctcctgttggagctatttttttggagccctaaattacaaattgtttatgagtttatagttactattggagacttgtagggtgcgtttggttagagagtcaaatagaatagactggctctattccagtgtttaagaatggagccgttctattccgcgtttggcaaaaagaatagagtcattccaatttttgtttggttgaagagtaaaatagagtgaagccgttccgtttttgtttggttcgagagccatataggtgtagagggaagaaaaggaaggagagcgctcacgttcgagagagcgctcgcattcgatcgtttttatggaacaggagcgttccaactacttatagtaaattttcatatggagatccaggagccgctccactcttattttgttgaaaaccaaacattcaaaaaattggaatgaagctattatattcttccccgttcctcaaccaaacacacccgtagttgctctaacgagcgtggggacggccctactgccggaatttgatcggcatgggctgggccagctctacaagcccattgtgttgtgacggcaatggtcgcgtagcttttgccgtttggtgcggcccacgttctcgcccaacagaaacccgagccccatcgccatttccagcgtcttgtctcgctgtaccggccgatctccccattctcccctcttcgccggtcccaccaccgcgccgatcctgatggcctccgccgcctcatcggccgtcggcgctggcaaatcgctgttccaggggctccgcaggttcctcaagaagccgtgggagatcacaggcccctgcgcctctcccgagtaccgcagcgcgctgcctggcgcgctcgagtaccgcgtcaagtgcccggccaccgtgcgcgacgaccgcgacaaggccatcgtgcccacatccgatccggagacagtctacgatatcaagtacttcacccgcgaccgccgccggagccgcccgcccgtgcggcgcaccctactccgcaagcccgatctcgagagctacatggccaccaagcagttcgaccccaccaatgacttccccgtaccatacgtcaacaccaccgtcgaggaggatgacaacactgtcggcggtggctaccagaagtgactcaggaaagcttgctggttaatttggtaggtatcctttgattggacttcatcagaagcggcactattttcattccagctattaaatatccccttttcttttgttcctagtggaagttttttggatgtaaaagatgacggtgtcaaataatatggcacctgtggagctcacaggatgcacatatcttgtaaattgtattctaaaactgtctacctgataccattgttactgtttaatgcaaaatttaaggtttctattccaatgtgcacatcaccaattagttaggaacttatgctgatttgacaaaagaacaaaattttgaactttttgtacgattaaaacattatgtgtgacttgcgatcctcatacttgtatgtagcgatgtgaagtcaattttacgtgctcgtgcgttgtgggtacgtcgatgtgattatatgatagagctggagtgcttgcatgtgaatatgtgatctattggttgagccttatcatgggcgattcgatggatctaggcaactcggcttatctttttttttatatagaaaaactaagaccactttggatggctaaataaagaggcgctaattgcaggaattttttttatcgacacacattgtagtcattagcacattatctggtcaatggggcaaatttgagctaattttaaccagctaattattagcccatctggtcataagtgaccttatgcccttattatccatgcgtgaagccattctctttgctttcgtctctactctactctcgtgccagcggttgctttgcgcctatgcctgcaagaaggttaccaagtatgtatccacgagctaggtttgttttccattgttcctaggccattgttcttatgccatgttggccatatttgtttctctcctaaattatatataagttagattatgataaaagagtagtagagtaacatatcataaataatctgaaataagctatttaggtagcttatttcagtttatttatgatattttacccttctaccgttccaccagaatcacaactaggtttgttttccattattcttagtctggttgtgctcttgattttggctgtgacggccggtgacatacgactacgcatacagaacattataggtcacaaattcacaaacaattaaatttctctgtgattcgattgttatgcacacagaacattattgttcctcgaccttacatccattaggttggtggacgacactgatgttagggtgtgtcctatacacgagatggttaacgggaattaggttagagttaattctaaccgtccatccgcacccttaatcgggaggctatcctaaccgttggatgcaggccccggtcacacgtctccatataaacagattaaggggaccaatgggtttagccaacgctaatcgctcgaccacaaaccctaatcgacatccacacagaggtttccatcacctagacaatgcgtagtgactggaagagttgtgatccatgacgacgagccccgtgattgtcccaacgggcacgggatccgagcctccacctacatgcgccactggaggaggagatccaccatctatcggtgacaggaatccccaacctcatcctggacagaacacgcaaggaggtggaggccacagaggaggcgagtctacggtgtaagacgtcaccgccattgcagccgtgcccataaacaacaacaatgatgatatgcctacatataccttttagcagattagatctactcatcattgaggttttcctactcatattggtattctagggtcttaagaattgatcctaggcaccacatgacctaacaatggtatcaaagccacctaagtaacctagatctcctaattcgtatgatttgagatcaaataagggattctcaggtcaagtgattaacctcagttttacctcattggttaatcacctcgagaatagacaaaaccgagaagatagagaaagtcaggaatatgtttgtgatctctggttaaggtttttctaaccctaagttcttggatttaggccatagtaagagacacaaaggtctcaaccatgaacccatgaacaaaccgagtaagagggaaacaaagcaaagggatttcagtttattgaaaccctaatccccaaaatccgagtcatagtgactgcatagggctcatgatccatggatccgcgtccaaggcaacagaaaagagagtaaaagaacacaagaaatagattagggatagaacctaactgtttcccccataaccgagcagataaagtgcataaagggcattgtccaagcacataggttagttttggaccgaatccttcaatagatcaatgcatggggcccggatctacgcgtttcacctcaagaacacgattccaaccatataagatatccatttcatacattcattcacacagaaaagagaatcaagttattgagggctaaatccgggtgtaaatcaatagagacggttgagaggctgtcggttcttaccatgccgccgatagggacagtcgctggagcaccgaccgacggcagcacgccctcccaaggggacaaatagcagagatagtcggccggagtaagcaaagaaatggggaggcgaggtgaattttagagagacaaagaaataagacaaatagcagagatagtgaagcgatggccgatag

SEQ ID NO: 31870 - DNA, 3520 bp, Zea Mays
cccacgttctcgcccaacagaaacccgagccccatcgccatttccagcgtcttgtctcgctgtaccggccgatctccccattctcccctcttcgccggtcccaccaccgcgccgatcctgatggcctccgccgcctcatcggccgtcggcgctggcaaatcgctgttccaggggctccgcaggttcctcaagaagccgtgggagatcacaggcccctgcgcctctcccgagtaccgcagcgcgctgcctggcgcgctcgagtaccgcgtcaagtgcccggccaccgtgcgcgacgaccgcgacaaggccatcgtgcccacatccgatccggagacagtctacgatatcaagtacttcacccgcgaccgccgccggagccgcccgcccgtgcggcgcaccctactccgcaagcccgatctcgagagctacatggccaccaagcagttcgaccccaccaatgacttccccgtaccatacgtcaacaccaccgtcgaggaggatgacaacactgtcggcggtggctaccagaagtgactcagaaacagaagcagcactgcagactgcatactgccgactgcagagcatatccaagtaaagagcagagacagtgcacatccaagaggagagaagcccaagggagaggaagagatgcttacatacctgtcccacgatcttgcgatgctgggctgaagaagatgggaaccagcagagaagagggaggaccagaggaggcacaaatcagggtcgcaaaccagtggagaagaggaagggaggctcaaattgtcaaagaggcattaattgatggaacagaagaggcagagtggcaagattctagtggcgcaatgccaagaaccaggaaagcttgctggttaatttggtaggtatcctttgattggacttcatcagaagcggcactattttcattccagctattaaatatccccttttcttttgttcctagtggaagttttttggatgtaaaagatgacggtgtcaaataatatggcacctgtggagctcacaggatgcacatatcttgtaaattgtattctaaaactgtctacctgataccattgttactgtttaatgcaaaatttaaggtttctattccaatgtgcacatcaccaattagttaggaacttatgctgatttgacaaaagaacaaaattttgaactttttgtacgattaaaacattatgtgtgacttgcgatcctcatacttgtatgtagcgatgtgaagtcaattttacgtgctcgtgcgttgtgggtacgtcgatgtgattatatgatagagctggagtgcttgcatgtgaatatgtgatctattggttgagccttatcatgggcgattcgatggatctaggcaactcggcttatctttttttttatatagaaaaactaagaccactttggatggctaaataaagaggcgctaattgcaggaattttttttatcgacacacattgtagtcattagcacattatctggtcaatggggcaaatttgagctaattttaaccagctaattattagcccatctggtcataagtgaccttatgcccttattatccatgcgtgaagccattctctttgctttcgtctctactctactctcgtgccagcggttgctttgcgcctatgcctgcaagaaggttaccaagtatgtatccacgagctaggtttgttttccattgttcctaggccattgttcttatgccatgttggccatatttgtttctctcctaaattatatataagttagattatgataaaagagtagtagagtaacatatcataaataatctgaaataagctatttaggtagcttatttcagtttatttatgatattttacccttctaccgttccaccagaatcacaactaggtttgttttccattattcttagtctggttgtgctcttgattttggctgtgacggccggtgacatacgactacgcatacagaacattataggtcacaaattcacaaacaattaaatttctctgtgattcgattgttatgcacacagaacattattgttcctcgaccttacatccattaggttggtggacgacactgatgttagggtgtgtcctatacacgagatggttaacgggaattaggttagagttaattctaaccgtccatccgcacccttaatcgggaggctatcctaaccgttggatgcaggccccggtcacacgtctccatataaacagattaaggggaccaatgggtttagccaacgctaatcgctcgaccacaaaccctaatcgacatccacacagaggtttccatcacctagacaatgcgtagtgactggaagagttgtgatccatgacgacgagccccgtgattgtcccaacgggcacgggatccgagcctccacctacatgcgccactggaggaggagatccaccatctatcggtgacaggaatccccaacctcatcctggacagaacacgcaaggaggtggaggccacagaggaggcgagtctacggtgtaagacgtcaccgccattgcagccgtgcccataaacaacaacaatgatgatatgcctacatataccttttagcagattagatctactcatcattgaggttttcctactcatattggtattctagggtcttaagaattgatcctaggcaccacatgacctaacaatggtatcaaagccacctaagtaacctagatctcctaattcgtatgatttgagatcaaataagggattctcaggtcaagtgattaacctcagttttacctcattggttaatcacctcgagaatagacaaaaccgagaagatagagaaagtcaggaatatgtttgtgatctctggttaaggtttttctaaccctaagttcttggatttaggccatagtaagagacacaaaggtctcaaccatgaacccatgaacaaaccgagtaagagggaaacaaagcaaagggatttcagtttattgaaaccctaatccccaaaatccgagtcatagtgactgcatagggctcatgatccatggatccgcgtccaaggcaacagaaaagagagtaaaagaacacaagaaatagattagggatagaacctaactgtttcccccataaccgagcagataaagtgcataaagggcattgtccaagcacataggttagttttggaccgaatccttcaatagatcaatgcatggggcccggatctacgcgtttcacctcaagaacacgattccaaccatataagatatccatttcatacattcattcacacagaaaagagaatcaagttattgagggctaaatccgggtgtaaatcaatagagacggttgagaggctgtcggttcttaccatgccgccgatagggacagtcgctggagcaccgaccgacggcagcacgccctcccaaggggacaaatagcagagatagtcggccggagtaagcaaagaaatggggaggcgaggtgaattttagagagacaaagaaataagacaaatagcagagatagtgaagcgatggccgatag

SEQ ID NO: 31871 - DNA, 5394 bp, Zea Mays
cccacgttctcgcccaacagaaacccgagccccatcgccatttccagcgtcttgtctcgctgtaccggccgatctccccattctcccctcttcgccggtcccaccaccgcgccgatcctgatggcctccgccgcctcatcggccgtcggcgctggcaaatcgctgttccaggggctccgcaggttcctcaagaagccgtgggagatcacaggcccctgcgcctctcccgagtaccgcagcgcgctgcctggcgcgctcgagtaccgcgtcaagtgcccggccaccgtgcgcgacgaccgcgacaaggccatcgtgcccacatccgatccggagacagtctacgatatcaagtacttcacccgcgaccgccgccggagccgcccgcccgtgcggcgcaccctactccgcaagcccgatctcgagagctacatggccaccaagcagttcgaccccaccaatgacttccccgtaccatacgtcaacaccaccgtcgaggaggatgacaacactgtcggcggtggctaccagaagtgactcagaaacagaagcagcactgcagactgcatactgccgactgcagagcatatccaagtaaagagcagagacagtgcacatccaagaggagagaagcccaagggagaggaagagatgcttacatacctgtcccacgatcttgcgatgctgggctgaagaagatgggaaccagcagagaagagggaggaccagaggaggcacaaatcagggtcgcaaaccagtggagaagaggaagggaggctcaaattgtcaaagaggcattaattgatggaacagaagaggcagagtggcaagattctagtggcgcaatgccaagaaccaggtgtgcaccctcttccgtttccatgccctgtcaattggcgtatggagaggtgggttatggccttgtggagcctgtgggtgcgcggatccagttggtctccttcgcacacaaatctcccacatttgcgcccattttccgtgcatgcagctcctctcttgtgcccacacctaatcccctgcgcccaagctcgtgcggtgttcgcatcaggtcacttgtgccttaaacagcaccaaattgtgcctaggcaatttcttttgtcgcaaggcggatgccataccccaattggtcgtggcgaggctgatgatcagcgtgaaaactatactggatgcctaggtgacgactttatggccctgtttggcacaacttattttcagcttcttcacaaatttaagcagaggttctgccaaacagacagcttctgcaacagcttatcagttcagctgcttctcagaatacactaaaagcagccaacaagcagaagctgcttttcaccagcttctcagataagctgctttttcaaccagcaccagctgtgccaaacagggcctatatctgttggttaatgcttaaaatataatttctgcaggtgtagggtttcactagattaggcattttgttcataaatgtttcactttattgttgtcattctctgagaaacctctattattgtggcttatatttggttttgagatttgatactggttaatatacttctagatgaatataaacaagctagataactggttccaaatgttagaatgttagtaatttatcttttgaattaagtaaagtggaatgggataaagtagatttggaatccatgcggattgtgggaacaagaagtggacatgataaaaatgtggtatgactttatacaatctcacatctggagtcctgcttcttgcaagcaggctactgaatttatgctgtttagtgagatcaatgaagcttaggttcataggcgtattccactctgcttggaaattgtgcatttcacattagctaacatattactttttatgaaaacacccaataagtcactttggttttgggacccaaccactacctccacattttgctgcaaagttcaaccacgcacgctctctatgccgattctttaacatggagccgttaatgtagtttttatgaaagttgattacttacaaagtaaaaaaagggcagacccaacatgtgtgcggtctgacgaaggaataaaccgaggcaagctttcccccgcaaatatggagaggctgctttgaacccatgacgtggttactttgtgagacaactctgactactgcaataggcatgccttataaaagtgcaaacctaacatgttttagaacttgtaccaaatgaatcactcacgaaaacttaagcctggccaaacctattgttgctatatgtaaaatttctctgccgcaatatcataaataagcctaatccaagtattggaacaaacttgacttgatgtgtgacttgtagtggctccatgtaggtgagaacaggcagaattagtaagcgcatgtgtagtgggttggtttcgaaaggtgtagagtagtggggtgggcatttacaataagtgtttttatgttgtggtatctcaacatccaagtaacatatgggtagattttagattttctttcatgtttatgtcttgtttggtgattttgctacctcactttcaaaatgttcgggtctgtggcgtttgctttgcttttcatgccactgcattatctcatttgctttcatgaaatatattgtgattttttcaaatgccaccattttatatttgggccttcaactataactagctccagacttgaagtaaaagtcatatttgattatcgccttcatatgtggttacattgcaggaaagcttgctggttaatttggtaggtatcctttgattggacttcatcagaagcggcactattttcattccagctattaaatatccccttttcttttgttcctagtggaagttttttggatgtaaaagatgacggtgtcaaataatatggcacctgtggagctcacaggatgcacatatcttgtaaattgtattctaaaactgtctacctgataccattgttactgtttaatgcaaaatttaaggtttctattccaatgtgcacatcaccaattagttaggaacttatgctgatttgacaaaagaacaaaattttgaactttttgtacgattaaaacattatgtgtgacttgcgatcctcatacttgtatgtagcgatgtgaagtcaattttacgtgctcgtgcgttgtgggtacgtcgatgtgattatatgatagagctggagtgcttgcatgtgaatatgtgatctattggttgagccttatcatgggcgattcgatggatctaggcaactcggcttatctttttttttatatagaaaaactaagaccactttggatggctaaataaagaggcgctaattgcaggaattttttttatcgacacacattgtagtcattagcacattatctggtcaatggggcaaatttgagctaattttaaccagctaattattagcccatctggtcataagtgaccttatgcccttattatccatgcgtgaagccattctctttgctttcgtctctactctactctcgtgccagcggttgctttgcgcctatgcctgcaagaaggttaccaagtatgtatccacgagctaggtttgttttccattgttcctaggccattgttcttatgccatgttggccatatttgtttctctcctaaattatatataagttagattatgataaaagagtagtagagtaacatatcataaataatctgaaataagctatttaggtagcttatttcagtttatttatgatattttacccttctaccgttccaccagaatcacaactaggtttgttttccattattcttagtctggttgtgctcttgattttggctgtgacggccggtgacatacgactacgcatacagaacattataggtcacaaattcacaaacaattaaatttctctgtgattcgattgttatgcacacagaacattattgttcctcgaccttacatccattaggttggtggacgacactgatgttagggtgtgtcctatacacgagatggttaacgggaattaggttagagttaattctaaccgtccatccgcacccttaatcgggaggctatcctaaccgttggatgcaggccccggtcacacgtctccatataaacagattaaggggaccaatgggtttagccaacgctaatcgctcgaccacaaaccctaatcgacatccacacagaggtttccatcacctagacaatgcgtagtgactggaagagttgtgatccatgacgacgagccccgtgattgtcccaacgggcacgggatccgagcctccacctacatgcgccactggaggaggagatccaccatctatcggtgacaggaatccccaacctcatcctggacagaacacgcaaggaggtggaggccacagaggaggcgagtctacggtgtaagacgtcaccgccattgcagccgtgcccataaacaacaacaatgatgatatgcctacatataccttttagcagattagatctactcatcattgaggttttcctactcatattggtattctagggtcttaagaattgatcctaggcaccacatgacctaacaatggtatcaaagccacctaagtaacctagatctcctaattcgtatgatttgagatcaaataagggattctcaggtcaagtgattaacctcagttttacctcattggttaatcacctcgagaatagacaaaaccgagaagatagagaaagtcaggaatatgtttgtgatctctggttaaggtttttctaaccctaagttcttggatttaggccatagtaagagacacaaaggtctcaaccatgaacccatgaacaaaccgagtaagagggaaacaaagcaaagggatttcagtttattgaaaccctaatccccaaaatccgagtcatagtgactgcatagggctcatgatccatggatccgcgtccaaggcaacagaaaagagagtaaaagaacacaagaaatagattagggatagaacctaactgtttcccccataaccgagcagataaagtgcataaagggcattgtccaagcacataggttagttttggaccgaatccttcaatagatcaatgcatggggcccggatctacgcgtttcacctcaagaacacgattccaaccatataagatatccatttcatacattcattcacacagaaaagagaatcaagttattgagggctaaatccgggtgtaaatcaatagagacggttgagaggctgtcggttcttaccatgccgccgatagggacagtcgctggagcaccgaccgacggcagcacgccctcccaaggggacaaatagcagagatagtcggccggagtaagcaaagaaatggggaggcgaggtgaattttagagagacaaagaaataagacaaatagcagagatagtgaagcgatggccgatag

SEQ ID NO: 31872 - DNA, 1560 bp, Zea Mays
ctttaatttcaaagagagagcagaagaaagaaaccaatccgtgtacggtgtattcatagttttgcctgcaaaagctagcagagatgtggaggctgctcaatcatggaatcatcccttgcacagcggcgcagcgcatcatgtgtatgtgcatctagtgccgctgccagccgctgccagccaccgatccagagctcgctggcgctcacctgcactgtttcataccgctatcttgctgttccatggagagcgaataaagctgcagcgctttccctattccccaatggaacagttgcacacatgaaccgctagccagcagggacaccgcgagatggcgggcgccgtcgggctaacaagacgatgataaggggcggcaaccaccagcaggcggcggacgtcgaggaggagctagcccggaacagcaggcacgccgccgccgtggcgacgtcgcggcaatggtcggcgcagacggagtcgcgcatcgtgcgcgtctcccgcgtcttcggcggcaaggaccgccacagcaaggtgaagaccgtcaagggcctgcgcgaccggcgggtgcgcctctccgtgccgacggcgatccagctctacgacctgcaggaccgcctcggcctcaaccagcctagcaaggtcgtcgactggctgctcaacgccgcgcgccacgagatcgacaagctgccgccgctgcagttcccgccgcaggacctcatggttgggcacctgacgccccacaacatgccgctgatggtgcacgacgagaagttcggacacctcgccgcggccgcggcgctcgcgagcggcggcggcggcggcgccaaggtcagccagcagggcaacgtcgtcgacgtcgacgggaccggagcccaccacttggtggggaggttccccggcggctaccaccggttcatggagctgaacagcgcgttgggcatggtcagtggcgcaatggcgccgccgtataacaacaactacaccggagaggcatggaataacagcggcggcggcgtgcatgacagcggctcgccgcagatcgtcgccgcagccgctcaccactcgccgttcccatcgttgctctccttggctccacgtccgcatcagctggcgttctactcctcggaagctgatcagcagtttcaggtggagaaccttggctcgcaaagcctgtccttgagctcggcgagggcttaccatgatcaggctagctagcggactgcgtactggaacgactcttcgatcgagattaaggtagcaataatgctcactgatcccaaaattcccaagtacaatatactatctagctgtgcaagagtgtgcatgtcagagtttccaagtgccttttaaggatcggatcggaggcagttaagcttgtgatgatttcataattagtagtagacctgaaacagaataaaatgtgcggggcttgatcttgaagcgtacgtgtgtgtgccatacgaatttgttacttctttcaatacacaaaggagtaatattaatctgtatgctggcttgtagaataacaatatatggtttgctaatattacggttttagttataaca

SEQ ID NO: 31873 - DNA, 3163 bp, Zea Mays
acgatgcagccacgttttccagtcgtagcgtgaaaggttttaagggcaaaagccctcggagcgtcactgggagaagagaaacgcccggcggcgcgaagcggagggtgagaatatcggagttcggcgatgtcgaagcggcagggaccgccgaaacaccagaaccgctacgcgtggaagccgaaccttggtcagaagatcaacgaaaccgagcccgggggcaggttccgacctctgtcagaaatcaccggcgtctgtcagcgctgccgggatcaaatcgactggaaacgcagatacggaaaatacaagcccattgttgagccagcaaaatgccagaagtgtaataagcgaaacgtccggcaagcataccataacgtatgcagagattgctccaaggacctcggcatatgtgctaagtgctgcacatgtgttaatgagcttgtcggaagggatgcgaatgaggaggaaagtgaacgcaagtcactagaagaggctgtcagaggtgctagggagagggaacgacgtacacttcttcgtattatgaacaaaggcaaaggtggggagagtgggccgtcagtcccaaagattgctgacagaagtcgagaaggtgatatctttcctgctggatcacttgatgaatacgccgaacaaactagagagcaagaggaagatgactcagatgtagaggctggagattttgtggaagattaagtttggaatgctttatgctgtaaagacgatactttctgtgatgcctatggtaggattgtcgcgcatttccttatgtttgttcgaaagtttggaattggaagatgttaaactgcgttgatttaattaaaaaaaatgcttgtgtctgtattacgtagcaacaggagtttgaaagttggttccggatccatttggatagtaataataagaggaaagtaacatttggaacagttgttcctacggcaacgttgcaaattaccgatatgcaaagcaaagcgttacgcaggtaaagccagatcttgtccgtaggctgccgatccaacagcccttcagccggttcactcggcagctcgctcaacacagcaaaggctgccgttcctttccccggcggcggcaagcattcacacacagggctcccgatccgccatccaagagcgccactctacggtcctcgtcgatttccccggccggctgacgcgtggagcgtccctgtgtcagtattcagccgcaggaagatgacaggaactgatcaaacaattgccgagctggaccgtcgtcggcgctggcccaatggacgctatccggccaatacttagtacacttagcaatcgcgtgtgcagcctatataaagagggggctgaagcttgtagaaggttacggaagatactactaccaaattcgtattagcttcctgtcattgtagaactagtagtactagcttgcttattaatccagttagcatcgggcagctaacaagtggtatcagagttggttgagcgtttccttcggctgatggcgggcgcagcggagtccagtttgtctgctgccacctggcatggaggaacaagcgaagactctggagacgcaatctcgcttgctgcagcagatttgcgatcgcttggatgcacaggaccaccactggcagacgttggagcgggtggtgtcgaccaacgcccagtccatcaccgcgttgacggccaagatgaacaacatcgatgtctcgatggtgcgatcggacctcgccaggtccttctcacttcagatcgatgcacatgtcgccgaaatccaagcaacttcatgggaatgcatcgatgctgttgatggagccttgtccacacgcgtggctgcgctcgaagcaacgaccgacgcaatcacttcgtggaggccttacatcgaacagtccgtgggcgtcgtccattcgaacattgaagggcttcgatcggagcaacagcggtcttccggtcgctgggagcatgagcgtcgagcgccaactccactccaggccgccgtgtttggctcgacgatgggatgtccacctgctgccacaaggaacgtcgaaggcccttggaggcaccacgacgcaaacccagcacgggagggaggtttcgggtatcctcatacccataacttcctcccgaccaatggtatggctcctggatcgaacccattcctccagcaattccacatatggtgcatgatgcttttggaagtcatccacattctcaattcgaccgacctctgggtaacatacctaaggttccatttccggggttcgatggggaaaatcctaaactatggcagacacgatgtcaagattatttcaccatgtattctgttgacactagtgtgtggattaggattgctcgcatgcattttacggggtctgcagcacgatggctccaatcggtagaatgtcatttgagtagaatatcttgggaacagtttggtcacatggtcatggatagatttcgcaaggaccagcatgaagttcttattaggcagttgttccatgtcaggcaaaccaccacagtgtctgattatgtcgatcgattttcccagctcatagatcagttgcatgcatacagtcccaattcagatccattgtattacatcatgcgattcttggatggtctctgggatgacattcgttcagttgttatggttcaacgaccacgggatttggatactgcctatgttttggcccaattgcaggaagaggtgggcggtcggcagaaggacgctcgcacatcggatgttgtttattcgaccaagacatttcacaaaggcccactaccgttaccattgcctattcgccaacctcagacgtcgaagcctgaaggatctgcagccgttcaagggagcaagctctccaccatggatgacaagttgacatctctaatggcttatcgcaaggccaaaggattttgctataaatgtggtcttccttatgctcgtggccatcgctgtgcggactcagtacaactgcatgtggtggaggaattatggcaaacattgcagattccagatcagtcagacgatgttgaagctactgaagaactcaactcgatgtgtctgtccaaggctgctgttgatggcggtaatattccaaaaactatgatccaagttgtggcatcccaatggacgagggttgcactcaacccctttcaagtgatccaat

SEQ ID NO: 31874 - DNA, 2595 bp, Zea Mays
acgatgcagccacgttttccagtcgtagcgtgaaaggttttaagggcaaaagccctcggagcgtcactgggagaagagaaacgcccggcggcgcgaagcggagggtgagaatatcggagttcggcgatgtcgaagcggcagggaccgccgaaacaccagaaccgctacgcgtggaagccgaaccttggtcagaagatcaacgaaaccgagcccgggggcaggttccgacctctgtcagaaatcaccggcgtctgtcagcgctgccgggatcaaatcgactggaaacgcagatacggaaaatacaagcccattgttgagccagcaaaatgccagaagtgtaataagcgaaacgtccggcaagcataccataacgtatgcagagattgctccaaggacctcggcatatgtgctaagtgctgcacatgtgttaatgagcttgtcggaagggatgcgaatgaggaggaaagtgaacgcaagtcactagaagaggctgtcagaggtgctagggagagggaacgacgtacacttcttcgtattatgaacaaaggcaaaggtggggagagtgggccgtcagtcccaaagattgctgacagaagtcgagaaggtgatatctttcctgctggatcacttgatgaatacgccgaacaaactagagagcaagaggaagatgactcagatgtagaggctggagattttgtggaagattaagtttggaatgctttatgctgtaaagacgatactttctgtgatgcctatggtaggattgtcgcgcatttccttatgtttgttcgaaagtttggaattggaagatgttaaactgcgttgatttaattaaaaaaaatgcttgtgtctgtattacgtagcaacaggagtttgaaagttggttccggatccatttggatagtaataataagaggaaagtaacatttggaacagttgttcctacggcaacgttgcaaattaccgatatgcaaagcaaagcgttacgcaggtaaagccagatcttgtccgtaggctgccgatccaacagcccttcagccggttcactcggcagctcgctcaacacagcaaaggctgccgttcctttccccggcggcggcaagcattcacacacagggctcccgatccgccatccaagagcgccactctacggtcctcgtcgatttccccggccggctgacgcgtggagcgtccctgtgtcagtattcagccgcaggaagatgacaggaactgatcaaacaattgccgagctggaccgtcgtcggcgctggcccaatggacgctatccggccaatacttagtacacttagcaatcgcgtgtgcagcctatataaagagggggctgaagcttgtagaaggttacggaagatactactaccaaattcgtattagcttcctgtcattgtagaactagtagtactagcttgcttattaatccagttagcatcgggcagctaacaagtggtatcagagttggttgagcgtttccttcggctgatggcgggcgcagcggagtccagtttgtctgctgccacctggcatggaggaacaagcgaagactctggagacgcaatctcgcttgctgcagcagatttgcgatcgcttggatgcacaggaccaccactggcagacgttggagcgggtggtgtcgaccaacgcccagtccatcaccgcgttgacggccaagatgaacaacatcgatgtctcgatggtgcgatcggacctcgccaggtccttctcacttcagatcgatgcacatgtcgccgaaatccaagcaacttcatgggaatgcatcgatgctgttgatggagccttgtccacacgcgtggctgcgctcgaagcaacgaccgacgcaatcacttcgtggaggccttacatcgaacagtccgtgggcgtcgtccattcgaacattgaagggcttcgatcggagcaacagcggtcttccggtcgctgggagcatgagcgtcgagcgccaactccactccaggccgccgtgtttggctcgacgatgggatgtccacctgctgccacaaggaacgtcgaaggcccttggaggcaccacgacgcaaacccagcacgggagggaggtttcgggtatcctcatacccataacttcctcccgaccaatggaagaggtgggcggtcggcagaaggacgctcgcacatcggatgttgtttattcgaccaagacatttcacaaaggcccactaccgttaccattgcctattcgccaacctcagacgtcgaagcctgaaggatctgcagccgttcaagggagcaagctctccaccatggatgacaagttgacatctctaatggcttatcgcaaggccaaaggattttgctataaatgtggtcttccttatgctcgtggccatcgctgtgcggactcagtacaactgcatgtggtggaggaattatggcaaacattgcagattccagatcagtcagacgatgttgaagctactgaagaactcaactcgatgtgtctgtccaaggctgctgttgatggcggtaatattccaaaaactatgatccaagttgtggcatcccaatggacgagggttgcactcaacccctttcaagtgatccaat

SEQ ID NO: 31875 - DNA, 1096 bp, Zea Mays
cacagcccttggccggaggcggcggcagggcgaatctccgcagcctgagattaatcacaggcttcccaccaggccaccaccctttccccactcgacgtcctccctcgccccctcctcctcctgttaggccgagtggcaaacccctagctactacctcgctccagaagctttctttcccctagatctcccatcccatccccatgtccggccgcgctgccgatccggcggccttggcggcgaaggggaagctaggggagctaatgtgggagcaccgggtgcaggcggccgtagcggtggcgctggtggccgcggccgccgtctcgatctccgtcgtggggcccaggctcagcgccctggtgtccttcttctggccgctgctcctctccacgggcttcttcctggtggcggtcgccgtgctgctccggatctcgccgccgcccgcgggcgacgacgacgagtccggcaaggagctcgtcgacttcgtcgcctggtgccgcccggagcacctcgtcccggacgcggcggccgtggaggctccgctggagccggagacctgacggaatgccggaggaggagtcggagaggaggccgacggcagccgagctgtgccatggcgatggcgatggcgatggcggggctccgttgccggggtgaccacttccagtggcacgggtgggggcaaccactgtgtgggcgtgtccaggccggcgcgcggccttggctctgtagcctaggactcctccattccattgtctccctctgctccggtgtaagataccgtggatggattacaataatgaatcatgtcgtaaaaaaaaacagtccgaacgtctttctttgtcaaggcggctgtggatgtggctttgcgctttcgctatcctcagtcagtcagcatcactccgtttgatcatgccaggaaagcgaaagctttccaaggtcttgcattgctccgcccacaaggatgggccggccatcacagatcttgctcagtcagcatcacggatgtccattgaggatggttaagacgagaagcgctgggtttgctcctcctttatacgcagccctactctctccagcggtcagaacgggaacggct

SEQ ID NO: 31876 - DNA, 2410 bp, Zea Mays
cgaaacaggccttactctaactgctgcaagcctcagtgcagttactggcggcagccgttcccgtgtttgtccatgtccatccaatccaactcatgcacttcatcactcctagaggagtgcagaagctgggaattgtacttccactactaaaaaattgctgtagcctccttcgtcttgagcgagcatggagatgtcagccatggaggaagccctccccaaggcgatggagaggaggaagggaggcctcagaaccattccgttcatcatcttaaacgagatattcgagaaggtggccacgttcgggctgtcggccaacatgatcctgtacctcaccgagcggtatctcatgaccaacgcctttgccaccgtcgtcctctacttctggcatgccttctccaacttcctgcccatcttaggcgccgtgctcgccgacgcccgcctcggccggttccgggtcatcaccctcggctcctgcgttagcctcttcgggatgtgcctgctgtggctgacggcgatccttccggtgtacaagaacaccccggagtgcgcgccggggcggccggtagggtgcgcggtgctgccgtggcagctgccgctcctcttcacgtcgttcgcgttcatgtccctcgggtcgggcggcatccggccctgcacgctggcgttcggggccgaccagctggacaagcgggacaacagcgccaataacgtgaggacgctgcagaccttcttcaactggtactacacggtgctgggcctctccatcgtgttcgcgtccaccgtcatcgtgtacatccagcaggccaggggctggggtcgtcggcttcgccgtgcccgtcgtgctcatggtcaccgcgctcacgctgttcctcctgggctcgcccttctacatcaaggcggcggccaacagcagcgtcgtcatcggcttcgtgcaggtgctcgtcgccagctacaataaccgccacgagcccttgccgccggagactgccgactcctcgagcttctacaacaaagcaggctgcaaacctaggactcccacgaacaagctaatgtacttgaaccgggcttgcgtgctcaggaacccgagcaaggagatcagccccgacggggcggcgtgcgatccgtggaggctgtgcacggtgcagcaggtggaggacaccaaggccgtcatccgcgtgcttccgatatggtcgacggggatcatgccgggcgtggtcgtcgggcagcagatgttcccgacgctgcaggcgaagacgatggagcggagggtgggcaagctggagatcccccctgcctccttcggcgtcttcgccatcctgacgctcaccgtctgggttgccgtgtacgaccgcgtgctggtgcggcccctgtcccggctcaccggccacgcgcgcgggctcagcctgcggcagcggatgggcgccggcctggtgctcttcgccgtggccatggccgtggccgcgcacaccgagagcgtccgccgagccgccgcgctcgccgaggggctccgcgactccaacccgctgacgggggagcgcccggtgcgcatgtcggccatgaatctggtgccgcagcactgcctcacggggctcgccgagggcctgaacctgatcgggcagatcgagttctactactccgagttccccaagaccatgtccagcataggggtgtccctgctcgcgctcggcctcgggtttggcgccgtgctgggcagcgccatcgtcggggtcatcgacgcggggacccggagcggcggcagccacgacggctggctgccgagcaacctgaacagggggcactacgactactactacttggtactggcggtgctatgcgccgccaacgtgctgtacttcgcagtgtgtggctgggcatacggcgacgaggggcaaaaccgggtggtggccgccgacgccgcggtggacgacgtcgacgacaaggaggaggagcaaaaggcggtaatcatctaggcttaggccacggtggactttgagcagagcactaggaacagtatagcgttgatctgggatgatctcttgctctagtgtgtacctcgtacatatgctaatcaatatggtgacatttcaagagtagataatcttgaaatgttaatatggacagtaagtactgtcgtgtagcgtgtcaaaaatgccgcatgcattctctcttccgaattaggaggtagagagaacttcagtgatccagtattccagtggtcgcccactcgcccatacgttaacccactttgactttctcattcccctcatccgtctccttcccctcaagttcaatgccactgctagtgctaggtgtcagctgccccagcctattatgaactcatggaatcaggggttaagattattcacaatgattctctttctctctatatcatacatttaaatcttactttttt

SEQ ID NO: 31877 - DNA, 2679 bp, Zea Mays
ttggtcgtgcgtgccaaagtgttgatgaagtgggtcaaaaaagtgtacacaagcagctaactgaatttattctacttataaataaagactatgaatcccattgttccatgcttcaagtcgctgcattgttacccaactatgatgttgatgcaagtacatggacggctcgttcgtctctctccctctctgcaccgatcgccccccatccatacataggtgcggtactgcgctgtagcatgatgcacatgtgggcacaagctagctaataaggacggtcactagtgatgacgaaccatgccaaatgtggggtgcttgcgactaacagcctcctttttttgttgatcttctccgtactcgaaagcgaacggaagcgatgatggcgatgtcatgtgggccggacgaaacagaaaagcctggacgcgatagcgcgctactactaagaggagcgtggttccggcggggcgcggcctggctgtgctcagtacaggtgcagtggtggtgctccgatcgatcctcccgccggccagcatttgcgtttggttcgggctgcaccgccgacatggagcgctctcttgctaccgggacgactgaatcgccacaagaggagtgcttcaagggcaacaagggcgggttcagagccctccccttcatcttctcaaatgagatgctggagaaagttgctggattcgggctcaacaccaacatgatcacgtacctgaccgacaagtaccacctcagcaccgtcagctcccagacgatgctgttcgtgtggagcgcgatctccaacttcacgcccatccccggcgccgtcctcgccgacatgtacctcggccggttcatggccgtcgcgctaggctccgtggcgtgcctgattgggatggtcttcctatggctgagcgccacggtccctggagcgcggccgcctccgtgcagcggcgaccagtgcgcgccgccggggacgaggcacctcgcgtggctgctcgccggcttcgcgttcctgtccctcggcgccggcggcgtccggccgtgctccatggcgttcggcgcggaccagttctccaggcaccccaggcagcgccgggccagcatcctgcaatcctacttcaacgcctactacgcgtccatcggcgtggccttcacggtcgccgtcacggccatcgtctacctgcaggacaacgtcgggtggagcgtcgggttcgccgtcccgatgggcctcatgctgctctccgcggtcagcttcttgctgggatcgagcctatacatcaaggagaagggcgagaggcggatgttcgccgggataggcaccgccgtcgccgcggcgatcaggaaccacggggcgcggttgccggacaagaccgtcgatggcgtgtaccatcacctcaaggactgcaagctcgctgtccccacggacaagctgaggttcttgaacaaggcgtgcttgctccgtgccaccaaggacgacgcgccctgcaacggctcggacgcggcggcggcggcctccgagcggcacggccacgacgggacgaggctgtgcacggtggaccaggtggagcagctcaagtcggcgatccgcgtcctgccgatctggtcctccaccatcttcctcgcccttgccatgaaccagagcttcgccgttaagcaggccgatgctatggaccggcgcgtcggcgcgggcgggttccgcgttcccagcggctccttggccgtcttcaacatggccaccatgtcgctgtggtcggcctgctacgacaggtgggtcgcgccggcactgcagcggtacacgggcaacccgcacgggctcaccatgaagcagcgcatcggtgggggcctgctcctcgccaccgcgtcgacggctgtctccgcggcggtggagggcgagcggaggcggctggcgcagcgcggggtcaccatctcggcgttctggctcgtgccgcagttcgcgcttgtggggctcgccgaggcgttcggcgtcatcggggagatcgagttcttgtacaccgagctgcccaagagcatggccagcttcagcatgtcgctgctgtacatggccttcggagtgggcaacctggccggcgccctcatcgtgaaggtggtgcaggtggcgagcgggcaaggggtgggaacgggctggctcgtcgacaacttgaacgtcggccgctacgactattactactggctgctcacgggctacggcgtggcgaacttcgtgtacttcgcttggtgctgctggttgtatggcgaggaggggaagaacgtggagtgggaagaggaggacaacacggagcagccctagtcctgtatggctgggactcctgtgagccctgtagggctgaaacaatgaacttctggaggttgaatgttcaatgcatgtggtagtataaaacatctagttaactttactagcctattagttactgttgtttagacttgtcagggtcaccagcagaggaggtttattagtcttcctacaagtcaatgcataacatcgatactgcgcagtgtgactagaaacttttctgataaataaatgtgtgtgcagtctaactcaggccgtttcgaagattattggtccatggtaacgaaagcacttattcgctaatcaatataatgagcccgacttgctaaactttaagaaggaaatgaagagataaatacatctatacacatggctaagctcct

SEQ ID NO: 31878 - DNA, 2435 bp, Zea Mays
gtctctctccctctctgcaccgatcgccccccatccatacatagcgaacggaagcgatgatggcgatgtcatgtgggccggacgaaacagaaaagcctggacgcgatagcgcgctactactaagacgggagctactagctgtcggccttgtgttgtgacctacctaccgtctaccggtggtgaatctatttatttagaggagcgtggttccggcggggcgcggcctggctgtgctcagtacaggtgcagtggtggtgctccgatcgatcctcccgccggccagcatttgcgtttggttcgggctgcaccgccgacatggagcgctctcttgctaccgggacgactgaatcgccacaagaggagtgcttcaagggcaacaagggcgggttcagagccctccccttcatcttctcaaatgagatgctggagaaagttgctggattcgggctcaacaccaacatgatcacgtacctgaccgacaagtaccacctcagcaccgtcagctcccagacgatgctgttcgtgtggagcgcgatctccaacttcacgcccatccccggcgccgtcctcgccgacatgtacctcggccggttcatggccgtcgcgctaggctccgtggcgtgcctgattgggatggtcttcctatggctgagcgccacggtccctggagcgcggccgcctccgtgcagcggcgaccagtgcgcgccgccggggacgaggcacctcgcgtggctgctcgccggcttcgcgttcctgtccctcggcgccggcggcgtccggccgtgctccatggcgttcggcgcggaccagttctccaggcaccccaggcagcgccgggccagcatcctgcaatcctacttcaacgcctactacgcgtccatcggcgtggccttcacggtcgccgtcacggccatcgtctacctgcaggacaacgtcgggtggagcgtcgggttcgccgtcccgatgggcctcatgctgctctccgcggtcagcttcttgctgggatcgagcctatacatcaaggagaagggcgagaggcggatgttcgccgggataggcaccgccgtcgccgcggcgatcaggaaccacggggcgcggttgccggacaagaccgtcgatggcgtgtaccatcacctcaaggactgcaagctcgctgtccccacggacaagctgaggttcttgaacaaggcgtgcttgctccgtgccaccaaggacgacgcgccctgcaacggctcggacgcggcggcggcggcctccgagcggcacggccacgacgggacgaggctgtgcacggtggaccaggtggagcagctcaagtcggcgatccgcgtcctgccgatctggtcctccaccatcttcctcgcccttgccatgaaccagagcttcgccgttaagcaggccgatgctatggaccggcgcgtcggcgcgggcgggttccgcgttcccagcggctccttggccgtcttcaacatggccaccatgtcgctgtggtcggcctgctacgacaggtgggtcgcgccggcactgcagcggtacacgggcaacccgcacgggctcaccatgaagcagcgcatcggtgggggcctgctcctcgccaccgcgtcgacggctgtctccgcggcggtggagggcgagcggaggcggctggcgcagcgcggggtcaccatctcggcgttctggctcgtgccgcagttcgcgcttgtggggctcgccgaggcgttcggcgtcatcggggagatcgagttcttgtacaccgagctgcccaagagcatggccagcttcagcatgtcgctgctgtacatggccttcggagtgggcaacctggccggcgccctcatcgtgaaggtggtgcaggtggcgagcgggcaaggggtgggaacgggctggctcgtcgacaacttgaacgtcggccgctacgactattactactggctgctcacgggctacggcgtggcgaacttcgtgtacttcgcttggtgctgctggttgtatggcgaggaggggaagaacgtggagtgggaagaggaggacaacacggagcagccctagtcctgtatggctgggactcctgtgagccctgtagggctgaaacaatgaacttctggaggttgaatgttcaatgcatgtggtagtataaaacatctagttaactttactagcctattagttactgttgtttagacttgtcagggtcaccagcagaggaggtttattagtcttcctacaagtcaatgcataacatcgatactgcgcagtgtgactagaaacttttctgataaataaatgtgtgtgcagtctaactcaggccgtttcgaagattattggtccatggtaacgaaagcacttattcgctaatcaatataatgagcccgacttgctaaactttaagaaggaaatgaagagataaatacatctatacacatggctaagctcct

SEQ ID NO: 31879 - DNA, 1689 bp, Zea Mays
gtcgcccaccgccatcgatctcgagcatgttactcgacatcagcatcaactacaatgtcatctacatcttggactatgtggcctagccaggaatgtgataccaaggggacgcctccccgcgtcgcttctcggtcattccatgtgcatgtctgcgtcatcagttcgtcatcatcacaacagatcgaacgcctcaacctacttcttccatcgttgctccatcccgcatgttctcagttcgtacaatcaattgtgtgatccactcggctctcgtgacgtccattgtcgagtactatgtgcatcttctctaagcaacaaggttgtcgttgcatcacctcgtcaggccacaacaccaccgcccatgtgcccactttgcagttgcatctacaacatcgttccacgtgcatcgacaagtatgttgtgcaatctttgttgtgtcatccgtccacataaggtctttgtcttgttgatcaggtcttcatcgtcaattgagtgctagcagtgagtggggccaccgctgctcatctgccaccacactctgtgtcctgactgctcactctcaaacatccactactgtctgaactacttgccttcgagtttgagttcgctactgcattgcttcttcgtccaacacaaccacattgtaagcatcgttatctagtccccacctacttcatataatctgacgatcgcatgttgcgtcaacgcctactaattccacctgcagggggtaaggcagccctcggcattatattaagaagacattctcacacaagtcgagaaaacccccgaacctctgccccacccatacacatggcacaatagcccatgtgagaacacgaccgtgaccgggatcgggccttagacctatgctttggcgtggggcacgcgaggggattttttttaaccacagcctaaaattcgctcccacatggagtcaaacccaggacctgaggagtgctactcagaccacctaatcaactcagctagaggcactttcacgcatcaacaccttctaatgcactgttccgcgcacagcaaccttcatcaagacctttgttggcccctcatacactgatatatggttggggccctctacctcatacaattgatattggcaacatcagcacatactttcatccccgacatgttggtgggcctagcaaacccgtactacgccttagttcaggcgacttgattacatcgacttcatcatcgaccctcatgttccctctatgtttgcctcgattgcatcatcgcctttcgtctaaaacggtcctaactacatctacctcaccaccatccccttccacgattactgcctcgatgtgtcttcgtcatcaccatggtgcctcttgtgtgcttgcagctccaccaatatggcaacctaaccacaactacatctacctcggttatcttcagcacgacttcttcaaaaattgcccttaagctttgctacatcgacataagcacaaaatgctaccacattgcatgaggactcatcggcttctctagccacaacttacgcagtgcatcacccgttatgactgcgggagaatattagtttgtgagcttcttcagtctcagtgtctataatgttgtcgttgcaactgcgggggatgatagagtaaacaagaatagtaccacattgcctacccacgtaggttgttagtcctatgtaccctatgtaat

SEQ ID NO: 31880 - DNA, 620 bp, Zea Mays
gaaaagttttgaggcgctattcatcaatccaattcatcatgggaaaaaactcacactcctagtaatgtaacaaggcacttcagcttgctcctaaagacaataaggcaagaacacaaagccatgccaagataatgaaatgaggcaaaaatagtgcaagttgaagtcttaggcacggccattacctgaggtgtcgtctattcacatccctctatgtgactgttattaggacactgataagctttacaacgtgctacaatttactacgcaccagacatgtcctgtgacacaccggatcccacatcgggtagggcactcaaataggttgcaaatgtaatcaagcagtgtaacactcaccggacatgtccagagtgacactagtgactgcattggatacctaggcttcaagggtcgacaatagctagtttgtaatggctgactggtgtataactcattgtatgtgtccggtgctacaaaaaaagtttgatttgttcctgaaagagaaatgtgcccttaggttatttctatttagttttgatgattaaatgttcaacagattgtgcttggactaacatcatcttgtatgagaaatgagtacatgtagttaaagcaaattgagaaaa

SEQ ID NO: 31881 - DNA, 833 bp, Zea Mays
ctcattgttttttcattaaaataacaggtcagaaaacgaaggaagagagggtcggcgagaaggaagatgaaatcggagggcagaaggaagatgacagggtaggttccctagcattgacaaaccatgatagagaaggaaataatcaagatcaagatcaaaaagcaccaattgatgaccattcaagcagaggaactcatacgggcaaagctattatagaagaatccagacctaactgcgttgatgatcataagacccatagacctatgtctcctggaacactagcactgatgtgtgatgaagaagcatttgagaaaatgtgtgacgaacaagatacaatgtttacgacttctcaaaatgctgctcctcagcagacagtaattgtcaaccataaccaatctgcactgtatgcagaacaagaaaacgttgtgctgacagaattccgggattgcctccgcaagtttgtgagatacggaagaatgaaagaggaaaggtactccatggcaatcaaatctgaaacatctggtcatcctggacagatttttacttggggtgttgcaaggatcaagggaatagtattttcaccctattaacatgttgatcagatacatgtatcagtcttgatagataatttagatgttagagaattccaattttttctcattggtcagaataagtgtaatgctggaatctggatagttagtttagtaataaatgccaaccttgtaatattttcttcattgtattttctctcttttcttttcccattttccacccacctggttcgagccaagatgtagcttggtgggtgcttatttgaaaataaagaagtcaaa

SEQ ID NO: 31882 - DNA, 895 bp, Zea Mays
gtcagaaaacgaaggaagagagggtcggcgagaaggaagatgaaatcggagggcagaaggaagatgacagggtaggttccctagcattgacaaaccatgatagagaaggaaataatcaagatcaagatcaaaaagcaccaattgatgaccattcaagcagaggaactcatacgggcaaagctattatagaagaatccagacctaactgcgttgatgatcataagacccatagacctatgtctcctggaacactagcactgatgtgtgatgaagaagcatttgagaaaatgtgtgacgaacaagatacaatgtttacgacttctcaaaatgctgctcctcagcagacagtaattgtcaaccataaccaatctgcactgtatgcagaacaagaaaacgttgtgctgacagaattccgggattgcctccgcaagtttgtgagatacggaagaatgaaaggtaaatggtgtttctcaagtaccatattcaaaagtagatgtgcctgctgtaaaaacatatccacagagttccagcagtcatcttgttgctggaaaacctgttactggccttttggacaaaaactgaagccttggcgttccagatttttacttggggtgttgcaaggatcaagggaatagtattttcaccctattaacatgttgatcagatacatgtatcagtcttgatagataatttagatgttagagaattccaattttttctcattggtcagaataagtgtaatgctggaatctggatagttagtttagtaataaatgccaaccttgtaatattttcttcattgtattttctctcttttcttttcccattttccacccacctggttcgagccaagatgtagcttggtgggtgcttatttgaaaataaagaagtcaaa

SEQ ID NO: 31883 - DNA, 2122 bp, Zea Mays
gatgcgctcccgacgaatgcggtggaggtcgtaacgggcctggtgacctgcacgctgggcaagcgggcagcatcaagaaagcgctgatgagatgtgaggattgttgatcatttgatctgccggaggatgcgaactgtggtacatatacctggaacaaatatagttgcaaattctgtgcagttaaacatatacctggaacacgttgaatcgatcgtgtgacgactctaactgacgatgtacagccaccgtacccgtttcctgtacagatacggccgccgcatcgtcgtaggcacgtcgtccagcagcagacacctccgccacctccaccctcgaatcgttccccaccatggcgtcgcagggatcctccgtcttcgccgcactcgagcaggccccggaggaccccatcctcggagtgaccgttgcctacaacaaggatcccagccccgtgaaggtcaacctcggggtcggcgcctaccggaccgaggaagggaagcccctagtgctgaacgtggtcaggcgcgccgagcaaatgttgatcaataatccgtcacgtgtcaaggagtacctaccaatcaccggtctggctgaattcaataagctgagcgctaagcttatctttggcgctgacagccctgctattcaggagaatagggttgctaccgtgcagtgcctatcgggtactggttctttaagagtcggaggtgaatttcttgcaaggcactatcacgagcgcactatctacatcccacaaccaacctggggaaatcacccaaaagtcttcaccctatctggcttgaacgttaggagctaccgctattatgatcctgcaacatgcagccttcacttcgaaggactcctggaagacctcggttctgctccttcaggttcaattgtactgctgcatgcctgtgctcacaaccctactggagtagatcctaccatcgaacagtgggaacagattaggcagctgatgagatcaaaatcactgcttccgttctttgacagtgcctatcaaggctttgcaagtggaagtcttgacaaagatgctcagtcagtgcgtatgtttgttgctgatggtggtgaacttctcatggctcagagctacgctaagaacatgggattgtatggagagcgtgttggcgctttgagcattgtatgtaaaagtgccgatgtagctgttagggttgaaagtcaactcaaacttgtcatcaggcctatgtattcaaaccctcctcttcatggtgcctctatcgttgctaccatactcagggacagcgagatgttcaacgaatggactctggaactgaaggccatggctgataggatcattaacatgaggcaacaactatttaatgcgctgaaatccagaggaacccctggtgattggagccatatcattaagcaaattgggatgtttactttcactgggctgaatagcgaacaagtcgcattcatgaggcaggaataccacatttatatgacatctgatgggaggatcagcatggccggtttgagcatgaggactgtgccccatcttgcagatgccatacacgctgcagttactcaactgaaatgaggatagtatcgcagctttcgtgaataaaacctgaatcacccacaacaatgttctaagtactcagccagtggtatttactggttgacctactgtagtttgcgtcggaatagatatgtttttttactcttcgtggggcagttttgtactggtggattcataaggactctgattatggtgcgttcggaacttataataataagcacatgaaattttgcttcaggtgcagtgatgctgtctcattaagttattagttattaggttgctgtcttattaagttatcaggtcgcagctgggttgaagcggagcacctgtcttgatttatctcttctcttttctagagagcttctgtcattcgtgtgcccttttatatcattttgctctatcaatgattatcctacaatctgcagtagttttgattccgttttgttctttgcctgctgtactggctcagaagtacggtaatgctcgcaagctttgcggttgttgatttagggactgaaaggatctgtttagaaaggtgtcgatttggagactcaaaaggaacga

SEQ ID NO: 31884 - DNA, 1745 bp, Zea Mays
cctgtacagatacggccgccgcatcgtcgtaggcacgtcgtccagcagcagacacctccgccacctccaccctcgaatcgttccccaccatggcgtcgcagggatcctccgtcttcgccgcactcgagcaggccccggaggaccccatcctcggagtgaccgttgcctacaacaaggatcccagccccgtgaaggtcaacctcggggtcggcgcctaccggaccgaggaagggaagcccctagtgctgaacgtggtcaggcgcgccgagcaaatgttgatcaataatccgtcacgtgtcaaggagtacctaccaatcaccggtctggctgaattcaataagctgagcgctaagcttatctttggcgctgacagccctgctattcaggagaatagggttgctaccgtgcagtgcctatcgggtactggttctttaagagtcggaggtgaatttcttgcaaggcactatcacgagcgcactatctacatcccacaaccaacctggggaaatcacccaaaagtcttcaccctatctggcttgaacgttaggagctaccgctattatgatcctgcaacatgcagccttcacttcgaaggactcctggaagacctcggttctgctccttcaggttcaattgtactgctgcatgcctgtgctcacaaccctactggagtagatcctaccatcgaacagtgggaacagattaggcagctgatgagatcaaaatcactgcttccgttctttgacagtgcctatcaaggctttgcaagtggaagtcttgacaaagatgctcagtcagtgcgtatgtttgttgctgatggtggtgaacttctcatggctcagagctacgctaagaacatgggattgtatggagagcgtgttggcgctttgagcattgtatgtaaaagtgccgatgtagctgttagggttgaaagtcaactcaaacttgtcatcaggcctatgtattcaaaccctcctcttcatggtgcctctatcgttgctaccatactcagggacagcgagatgttcaacgaatggactctggaactgaaggccatggctgataggatcattaacatgaggcaggaataccacatttatatgacatctgatgggaggatcagcatggccggtttgagcatgaggactgtgccccatcttgcagatgccatacacgctgcagttactcaactgaaatgaggatagtatcgcagctttcgtgaataaaacctgaatcacccacaacaatgttctaagtactcagccagtggtatttactggttgacctactgtagtttgcgtcggaatagatatgtttttttactcttcgtggggcagttttgtactggtggattcataaggactctgattatggtgcgttcggaacttataataataagcacatgaaattttgcttcaggtgcagtgatgctgtctcattaagttattagttattaggttgctgtcttattaagttatcaggtcgcagctgggttgaagcggagcacctgtcttgatttatctcttctcttttctagagagcttctgtcattcgtgtgcccttttatatcattttgctctatcaatgattatcctacaatctgcagtagttttgattccgttttgttctttgcctgctgtactggctcagaagtacggtaatgctcgcaagctttgcggttgttgatttagggactgaaaggatctgtttagaaaggtgtcgatttggagactcaaaaggaacga

SEQ ID NO: 31885 - DNA, 1844 bp, Zea Mays
cctgtacagatacggccgccgcatcgtcgtaggcacgtcgtccagcagcagacacctccgccacctccaccctcgaatcgttccccaccatggcgtcgcagggatcctccgtcttcgccgcactcgagcaggccccggaggaccccatcctcggagtgaccgttgcctacaacaaggatcccagccccgtgaaggtcaacctcggggtcggcgcctaccggaccgaggaagggaagcccctagtgctgaacgtggtcaggcgcgccgagcaaatgttgatcaataatccgtcacgtgtcaaggagtacctaccaatcaccggtctggctgaattcaataagctgagcgctaagcttatctttggcgctgacagggttgctaccgtgcagtgcctatcgggtactggttctttaagagtcggaggtgaatttcttgcaaggcactatcacgagcgcactatctacatcccacaaccaacctggggaaatcacccaaaagtcttcaccctatctggcttgaacgttaggagctaccgctattatgatcctgcaacatgcagccttcacttcgaaggactcctggaagacctcggttctgctccttcaggttcaattgtactgctgcatgcctgtgctcacaaccctactggagtagatcctaccatcgaacagtgggaacagattaggcagctgatgagatcaaaatcactgcttccgttctttgacagtgcctatcaaggctttgcaagtggaagtcttgacaaagatgctcagtcagtgcgtatgtttgttgctgatggtggtgaacttctcatggctcagagctacgctaagaacatgggattgtatggagagcgtgttggcgctttgagcattgtatgtaaaagtgccgatgtagctgttagggttgaaagtcaactcaaacttgtcatcaggcctatgtattcaaaccctcctcttcatggtgcctctatcgttgctaccatactcagggacagcgagatgttcaacgaatggactctggaactgaaggccatggctgataggatcattaacatgaggcaacaactatttaatgcgctgaaatccagaggaacccctggtgattggagccatatcattaagcaaattgggatgtttactttcactgggctgaatagcgaacaagtcgcattcatgaggcaggaataccacatttatatgacatctgatgggaggatcagcatggccggtttgagcatgaggactgtgccccatcttgcagatgccatacacgctgcagttactcaactgaaatgaggatagtatcgcagctttcgtgaataaaacctgaatcacccacaacaatgttctaagtactcagccagtggtatttactggttgacctactgtagtttgcgtcggaatagatatgtttttttactcttcgtggggcagttttgtactggtggattcataaggactctgattatggtgcgttcggaacttataataataagcacatgaaattttgcttcaggtgcagtgatgctgtctcattaagttattagttattaggttgctgtcttattaagttatcaggtcgcagctgggttgaagcggagcacctgtcttgatttatctcttctcttttctagagagcttctgtcattcgtgtgcccttttatatcattttgctctatcaatgattatcctacaatctgcagtagttttgattccgttttgttctttgcctgctgtactggctcagaagtacggtaatgctcgcaagctttgcggttgttgatttagggactgaaaggatctgtttagaaaggtgtcgatttggagactcaaaaggaacga

SEQ ID NO: 31886 - DNA, 2511 bp, Zea Mays
cacggtgtgtaggcgtccacaccgtgcgcgttctgcctcccgacgctccatgcatctcggtcacgctttcatctccgccatcatcggctacctgcctcgacatcctccccctccgctcaccgtccaggatctcatcgcgcacgcctagtctgtcccaccccgacatcctcccccaccacgccgtgcacgcctcacgtcgtgcgtctccaccacgcccgccgcacacgccgcgatgagatccaggaaagcagtctgcggatcccccgcgacatcctcctccaccgcgccatggccgcccccgacgtcctcccctccgcgccgcgcccgcccgatccaatgatgaaagcgggtcggatctcgggggcacttcccccaccactgctccaagctcatggagcaccaagaatccgccaagtcgagccctgagctccgacgtgaacctgcgaatccagcgcctctgtcaggcgggtgacctcgcatgcgctctgaggctgctgggctctgacggcggcgtagatgtgcggagctactgcacggtcgttcagctctgcggggaggagcggtcgttggaggctaccaagagagcacatgccttaattcgcgcgtccagtgtcgctgccacgggtggaaaaagggagcgtctttgggaagaggttaatgctggcgtacctgaaatgcggcgacctgggcgaggcaaggacggtgttcgatggaatgcctcctcaagctgctgatgtccgtgtccggacttcgctgatgagcgcgtacgccaaggcgggtgatttacagaaagttgttttgctgtttaggcagatgcaagtgctgcggggtcagtccagatgcacatgctgtttcctgtgtcctcaagtgcgttgccagtttgggcagccttacgaacgagcatgcgcggttgcaaatgctctgatcgccgtgtactcgaggtgtggacggatggaggatgcgaagcgggtatttgacagtatgcatccctgggatgccatctcttggaattctatgattggtggatgcttttcaaacggatggcatggtacagctgttgattttttcagcaaaatgtggtctcaaggccttgattctgtacaaagtgggatagatgatgctgctcttggatccaaactggtattcatgtatgtgaaatgtggggacatgggctctgcaagaagggtgcttgatgcgatgtcatcaaaaggtaatgtgcacgtatggaatctgataatgggtgggtacgcaaagggatggcttggtggctcatggatatatagtaaaattgggtttcagggcagagtgtgcagtttgcaatgcactgatatcattctatgcaaagtccaacatgattggcgatgcagtcttggtgttcgatataatgcctcgtcaagataccatttcttggaattatgtgattagtggatgctcttccaatggactaaacagtgaagctattgagttgttcataagaatgtggacacaaggacatgagctggacttagttacattgctaagtgtttttgccagcttgtgcagtcacgctattggtttgcaggaagggtggttcatggttactcggttaaaactggattgattggggaaacatctcttgcaaactggattcattgttcatgttgctaatgctagcaatttttcctaccagatttcttggtatatcttttaggaagcctgctaaatctacattggaacttatctttaaaatttgtatgtcatcaagtccaattttatttgtgcaataaaagcagggaggcttttatctataacattttccttttatcttttctgtagagatttttctcacaactagctgttaggcaacttctatgttttcctgtagtgtatgtgcgcaaccatgggtcggttcctagggcggactggtccacctggaccgtggaggtggcggggctcgtgagacgcctcgccaagttgaccatggagcagctagtgacggagttcgagaccttggaactccccgtgacgctggtatgcgtggccaaccgacacaaggagcataacatggtgtgccaaaaggtgggcttcaactagccccgacgccatctccatgtccatgcggtgcggcacgcgcctctacgacgtgttgtgtcactgcggtgtcatgggcaccacggatgacgttgtcaacgtgtgcttcaatactgattctttagaaatactttgtgccatattataatattggttgcacattagtccattctatttaatcacacggatttcacaaattataatgatgtttgtcgttccgtatctatgtttcaaactaattttgtactcccgtgacaacgtacgagcacagacctagtttaatctttagtttaagaaaaaatagaaaaaacaaccatccaacagttccttatcaagactccttattcacccgcacgccaaaaatattccctcccctacgcaaatatacgccaccgcgtctcgtcccaattccctgtattttcactttcccgcatgatattc

SEQ ID NO: 31887 - DNA, 2393 bp, Zea Mays
tccacaccgtgcgcgttctgcctcccgacgctccatgcatctcggtcacgctttcatctccgccatcatcggctacctgcctcgacatcctccccctccgctcaccgtccaggatctcatcgcgcacgcctagtctgtcccaccccgacatcctcccccaccacgccgtgcacgcctcacgtcgtgcgtctccaccacgcccgccgcacacgccgcgatgagatccaggaaagcagtctgcggatcccccgcgacatcctcctccaccgcgccatggccgcccccgacgtcctcccctccgcgccgcgcccgcccgatccaatgatgaaagcgggtcgctgccacgggtggaaaaagggagcgtctttgggaagaggttaatgctggcgtacctgaaatgcggcgacctgggcgaggcaaggacggtgttcgatggaatgcctcctcaagctgctgatgtccgtgtccggacttcgctgatgagcgcgtacgccaaggcgggtgatttacagaaagttgttttgctgtttaggcagatgcaagtgctgcggggtcagtccagatgcacatgctgtttcctgtgtcctcaagtgcgttgccagtttgggcagccttacgaacgaggtgattcatggattactttgagaagttgggtctcggtcaagcatgcgcggttgcaaatgctctgatcgccgtgtactcgaggtgtggacggatggaggatgcgaagcgggtatttgacagtatgcatccctgggatgccatctcttggaattctatgattggtggatgcttttcaaacggatggcatggtacagctgttgattttttcagcaaaatgtggtctcaaggccttgattctgtacaaagtgggatagatgatgctgctcttggatccaaactggtattcatgtatgtgaaatgtggggacatgggctctgcaagaagggtgcttgatgcgatgtcatcaaaaggtaatgtgcacgtatggaatctgataatgggtgggtacgcaaaggttggtgaatttgaagaaactctcgcttttttgtgcaaatgcatgagcttggaatcgcccccgatgaacatgtcatttcttgccttctgaagtgcatcacttgtttgtcttgtgccagggatggcttggtggctcatggatatatagtaaaattgggtttcagggcagagtgtgcagtttgcaatgcactgatatcattctatgcaaagtccaacatgattggcgatgcagtcttggtgttcgatataatgcctcgtcaagataccatttcttggaattatgtgattagtggatgctcttccaatggactaaacagtgaagctattgagttgttcataagaatgtggacacaaggacatgagctggacttagttacattgctaagtgtttttgccagcttgtgcagtcacgctattggtttgcaggaagggtggttcatggttactcggttaaaactggattgattggggaaacatctcttgcaaactggattcattgttcatgttgctaatgctagcaatttttcctaccagatttcttggtatatcttttaggaagcctgctaaatctacattggaacttatctttaaaatttgtatgtcatcaagtccaattttatttgtgcaataaaagcagggaggcttttatctataacattttccttttatcttttctgtagagatttttctcacaactagctgttaggcaacttctatgttttcctgtagtgtatgtgcgcaaccatgggtcggttcctagggcggactggtccacctggaccgtggaggtggcggggctcgtgagacgcctcgccaagttgaccatggagcagctagtgacggagttcgagaccttggaactccccgtgacgctggtatgcgtggccaaccgacacaaggagcataacatggtgtgccaaaaggtgggcttcaactagccccgacgccatctccatgtccatgcggtgcggcacgcgcctctacgacgtgttgtgtcactgcggtgtcatgggcaccacggatgacgttgtcaacgtgtgcttcaatactgattctttagaaatactttgtgccatattataatattggttgcacattagtccattctatttaatcacacggatttcacaaattataatgatgtttgtcgttccgtatctatgtttcaaactaattttgtactcccgtgacaacgtacgagcacagacctagtttaatctttagtttaagaaaaaatagaaaaaacaaccatccaacagttccttatcaagactccttattcacccgcacgccaaaaatattccctcccctacgcaaatatacgccaccgcgtctcgtcccaattccctgtattttcactttcccgcatgatattc

SEQ ID NO: 31888 - DNA, 1778 bp, Zea Mays
agacacggtaaaggcacaacgaagaagagagatcaactactcatgcaagcactgcggtatttaatttaggttcttaggaacaaaaacaccaagcaccaactttgtacatattaatggacgccatgcacatggtgatcgatcggtctatatagaaagacaggcgggtactagagaggttgtgtggtgtccaagctacacacgggatgctactaactagctgcaggcaagggcgaggaatggcaagcctttcatgtgctcgggcggacggtgttgtccgttccggcgctctgcccgccaagctgttgctgtgcgccagctgctgcttccctacggcggctccagtcgcggacggagaggtgcaggtgcttgcctgccgccagcatctccaccgttgccgaggcgtcaggatctccgtcgccacgcccgcgccgtcgccatcctcagctcgtcggcctccaccagcaccgacagcgcggccttgtagctgtccaggcgcgtccacctcgcgtcccggctcctagccgggccgccctgagccgccgccgccgcgccgtcgcacttccgctggcagcagctgcagctcccaaccgtgccgcggcagcgagctcgcgctgccgcacgatgggcaggagcgggcggtcggcgatgtcctcctgcagggtggcgagccggtccgacagggcgttctcctggtgcaccgtccggctgtggaggtcgttgatgagcaccagctgagcggacgtgatccccagggccccggtcgggatgacgccgttgctgaggccgccgagcagctcctccacctgcgcctccaggccctccccggagaggttgtagagcaggcggacggtgagcgaagggcggcagcccccgagccagagcacggagttctcgaaggcggtgcaccagggcggggcgaagaaggcgacgccgtcctcccgcgacagcgcgcgcctgcgggtggcgtagtcctggtacccgagcatgcaccgctccaccacggtccgcagctcggcgtccgttgcccggcccgcggcggcattggccgacgccgcctcgagctcggcgaggcctgcctcctgcccggcgatccagtgccggtagcatgactcgtaccgcgccatgtccatcccgtccgtccaagcctctgcagtgtgaggccgtgacgagagagtggagtaagcacatggcctatatgttcgcactacatgttgtattcatgcacatatgccttttttgaccctttacctcgtttcagttttcggcaggccctgttgtgtgacttgatctgtctctatggttcctccgattttgcttttttttttgtttctgcggtatgtcaccagacggggacgacggagcacgaggctttcgatagcgtgatggtgatgtgctggtcggccgcggatgcatgcgtgcgtgtagaacctatctgatgtggatccctatcggatcacggcgacgaaacttttgggaagcaaaaagacacggaaggtgtcacgcaagattggccatggaacggcgcttcccctcggcccgcggccctgcgtttaaccttttccgtgggcaggtgtgaagggaatcggaggccggaccgcggacgaggagatggatggtgcatccttgtgcgacggagagctcccggtctgacttcacgagaacaaaggttcactaatgctctgcagctacaatatgatgaaggtgccaatcagctgatacagaccgtggtttgcaaggaaacaaacagacagacccattcggtaatgttgaaacgggag

SEQ ID NO: 31889 - DNA, 2591 bp, Zea Mays
gcagaaattgcttacagaagagaaatgacccgtttcgagccaaggcatcctcgcgtctcgctctcacccctcctcggcgcctccccgaccacagtgtaaagcccctgtcccttcctccccgactcgcccctcatggcgaggaggcgctgctgatgcctcgcggcgtcggatcggacgcggcggccacgacacctagccgcttgcggtggcgctcgcctacgcgcccaatccgccgacgctgctcctcggatcccccgagagattcaggccccgtctcgcctcgtcctgcctagtgcctaggtgaggctctggcctccaaaggtgcgtgggtgggatctgctgcctcggtttgcgttattcccaagtgccctgcccatactccaacagcggtccagtcgacttccccaagtgctcgacccctacaaggcagcgcgcgtgcgtcacctcaaccccttgcatgcgctggcgctaaccctatctaggagacggagcggcgggccagcggctacgcgggcaaagagaggacgagagcgtgcaagaagagaaggcccgtgtcaggcggcggctataggtgcaaggataggcaacaagtgttcaaaaacacgtctgtggatcaattgacttgtatttcagcctttcagttgaggattaaagtggaggtttaagaagcttgagaattggcatcatctcaagaatacattgaagtgcaagatgccaaaaataaagagtctatctaatgcatgccgagtatcattttctccagaaggtcccatatctgaagaggcgcttgagagagtccgtgcactgttagatatgataagacctctagatgtcggcctagataatgaagcccaaattgcacgcaattggagtagttctacgcgtccatcaaatgggagacgaggacgcaatggggctaaccagttcgcggctccaatcaaatatttgcacattcatgaatgtgaaagcttctctatgggtatattttgtatgccaccttcttcagttatcccacttcataatcatcctggaatgactgtacttagcaagcttctttatggacgtctgcatgctgaatcttatgactgggttgacatacctgatcatccaattgatcaattacaaagtggtaacatccacactttcagagccattacaccttgtgctctctttgacgttctttctccaccatactccgctgaggatgggcgacactgttcatacttccgaaagtctcagatgaatcagccacctgttgttttgcctgctgagatagatagctctcaggtagtttggttggaggagttggaggaccatcagcccccagaaggctttgttgttgcaagaggtctgtataaaggccctgtaattaggagataatttgctttggagcgcagaatcaaccaagctgcaaatcagctgaaagacgatgcaggcttgtagtgcctagtgcaagcatcgtcaggtcatgtgcagcctacggtttatttgtacatctcaaagtgatctttgataatttaacagcagttttacagaacaggaacggatgttttttgtttggctgccattttaactttgtcccactgctggagtatctctgacctagttatggagctcttatcagatcaagaccatggtacttttgatgtaccagcatagctattgtcatgatgtaccagggaagatcaagacaagtgtttccatttggtgatttcagaaagaatttggtgtggggctaccattttgtctgtgtaatagcagcattactattttggagcaagactgtaaattacgggagaggaactataataatatcattaggtttatcatgaaatatattttcatggtgtatctatttaggccttgtttggaaggagatctttttctgcattattgtcactgtgttccaaataggccgttaaagtttggtggtgacctagattgctgttagtctggtggggacctagaaatgaaagcgagtacagaagtccctcgctgccttagcgaatcctggtgttgtgataagtcgcgcggtaaagtcctttttcatctcagaaaccatataggcacgttttcatctcagaaaacataagggtacttaggtttttttattcaactaatcttgaggaacgaaatgtgaggactacattaagtgtccaaaccaaaccatgcatcatctgatctagctaagataaaactatcctgatctagctaagataaaactctccttgatctagctaagataaaactctccttgatctagcctgggtcgctatgagcaggtggcctgaacggtgagcgcgccggattggcaccctgcgccggcaaacgcggccgtgtacttgaccgtgcacgactccctgccgacgcacgcgtccgtgaacgccttgagcgcggccttggactcgcagcctcccttgtaggcgccgcagctgcccctggcgacgccgaagctggccacgtcgacgctggcgacgacgcggccgtggccgccgcatgacagcgtgacgtcgtcgccgagctcgacggccgccacgcacacggggcccacggcgacggtgtggaacgcggcgcgtgtcgggtcgccgccg

SEQ ID NO: 31890 - DNA, 2521 bp, Zea Mays
gcagaaattgcttacagaagagaaatgacccgtttcgagccaaggcatcctcgcgtctcgctctcacccctcctcggcgcctccccgaccacagtgtaaagcccctgtcccttcctccccgactcgcccctcatggcgaggaggcgctgctgatgcctcgcggcgtcggatcggacgcggcggccacgacacctagccgcttgcggtggcgctcgcctacgcgcccaatccgccgacgctgctcctcggatcccccgagagattcaggccccgtctcgcctcgtcctgcctagtgcctaggtgaggctctggcctccaaaggtgcgtgggtgggatctgctgcctcggtttgcgttattcccaagtgccctgcccatactccaacagcggtccagtcgacttccccaagtgctcgacccctacaaggcagcgcgcgtgcgtcacctcaaccccttgcatgcgctggcgctaaccctatctaggagacggagcggcgggccagcggctacgcgggcaaagagaggacgagagcgtgcaagaagagaaggcccgtgtcaggcggcggctatagttgaggattaaagtggaggtttaagaagcttgagaattggcatcatctcaagaatacattgaagtgcaagatgccaaaaataaagagtctatctaatgcatgccgagtatcattttctccagaaggtcccatatctgaagaggcgcttgagagagtccgtgcactgttagatatgataagacctctagatgtcggcctagataatgaagcccaaattgcacgcaattggagtagttctacgcgtccatcaaatgggagacgaggacgcaatggggctaaccagttcgcggctccaatcaaatatttgcacattcatgaatgtgaaagcttctctatgggtatattttgtatgccaccttcttcagttatcccacttcataatcatcctggaatgactgtacttagcaagcttctttatggacgtctgcatgctgaatcttatgactgggttgacatacctgatcatccaattgatcaattacaaagtggtaacatccacactttcagagccattacaccttgtgctctctttgacgttctttctccaccatactccgctgaggatgggcgacactgttcatacttccgaaagtctcagatgaatcagccacctgttgttttgcctgctgagatagatagctctcaggtagtttggttggaggagttggaggaccatcagcccccagaaggctttgttgttgcaagaggtctgtataaaggccctgtaattaggagataatttgctttggagcgcagaatcaaccaagctgcaaatcagctgaaagacgatgcaggcttgtagtgcctagtgcaagcatcgtcaggtcatgtgcagcctacggtttatttgtacatctcaaagtgatctttgataatttaacagcagttttacagaacaggaacggatgttttttgtttggctgccattttaactttgtcccactgctggagtatctctgacctagttatggagctcttatcagatcaagaccatggtacttttgatgtaccagcatagctattgtcatgatgtaccagggaagatcaagacaagtgtttccatttggtgatttcagaaagaatttggtgtggggctaccattttgtctgtgtaatagcagcattactattttggagcaagactgtaaattacgggagaggaactataataatatcattaggtttatcatgaaatatattttcatggtgtatctatttaggccttgtttggaaggagatctttttctgcattattgtcactgtgttccaaataggccgttaaagtttggtggtgacctagattgctgttagtctggtggggacctagaaatgaaagcgagtacagaagtccctcgctgccttagcgaatcctggtgttgtgataagtcgcgcggtaaagtcctttttcatctcagaaaccatataggcacgttttcatctcagaaaacataagggtacttaggtttttttattcaactaatcttgaggaacgaaatgtgaggactacattaagtgtccaaaccaaaccatgcatcatctgatctagctaagataaaactatcctgatctagctaagataaaactctccttgatctagctaagataaaactctccttgatctagcctgggtcgctatgagcaggtggcctgaacggtgagcgcgccggattggcaccctgcgccggcaaacgcggccgtgtacttgaccgtgcacgactccctgccgacgcacgcgtccgtgaacgccttgagcgcggccttggactcgcagcctcccttgtaggcgccgcagctgcccctggcgacgccgaagctggccacgtcgacgctggcgacgacgcggccgtggccgccgcatgacagcgtgacgtcgtcgccgagctcgacggccgccacgcacacggggcccacggcgacggtgtggaacgcggcgcgtgtcgggtcgccgccg

SEQ ID NO: 31891 - DNA, 2115 bp, Zea Mays
gcagaaattgcttacagaagagaaatgacccgtttcgagccaaggcatcctcgcgtctcgctctcacccctcctcggcgcctccccgaccacagtgtgcaaggataggcaacaagtgttcaaaaacacgtctgtggatcaattgacttgtatttcagcctttcagttgaggattaaagtggaggtttaagaagcttgagaattggcatcatctcaagaatacattgaagtgcaagatgccaaaaataaagagtctatctaatgcatgccgagtatcattttctccagaaggtcccatatctgaagaggcgcttgagagagtccgtgcactgttagatatgataagacctctagatgtcggcctagataatgaagcccaaattgcacgcaattggagtagttctacgcgtccatcaaatgggagacgaggacgcaatggggctaaccagttcgcggctccaatcaaatatttgcacattcatgaatgtgaaagcttctctatgggtatattttgtatgccaccttcttcagttatcccacttcataatcatcctggaatgactgtacttagcaagcttctttatggacgtctgcatgctgaatcttatgactgggttgacatacctgatcatccaattgatcaattacaaagtggtaacatccacactttcagagccattacaccttgtgctctctttgacgttctttctccaccatactccgctgaggatgggcgacactgttcatacttccgaaagtctcagatgaatcagccacctgttgttttgcctgctgagatagatagctctcaggtagtttggttggaggagttggaggaccatcagcccccagaaggctttgttgttgcaagaggtctgtataaaggccctgtaattaggagataatttgctttggagcgcagaatcaaccaagctgcaaatcagctgaaagacgatgcaggcttgtagtgcctagtgcaagcatcgtcaggtcatgtgcagcctacggtttatttgtacatctcaaagtgatctttgataatttaacagcagttttacagaacaggaacggatgttttttgtttggctgccattttaactttgtcccactgctggagtatctctgacctagttatggagctcttatcagatcaagaccatggtacttttgatgtaccagcatagctattgtcatgatgtaccagggaagatcaagacaagtgtttccatttggtgatttcagaaagaatttggtgtggggctaccattttgtctgtgtaatagcagcattactattttggagcaagactgtaaattacgggagaggaactataataatatcattaggtttatcatgaaatatattttcatggtgtatctatttaggccttgtttggaaggagatctttttctgcattattgtcactgtgttccaaataggccgttaaagtttggtggtgacctagattgctgttagtctggtggggacctagaaatgaaagcgagtacagaagtccctcgctgccttagcgaatcctggtgttgtgataagtcgcgcggtaaagtcctttttcatctcagaaaccatataggcacgttttcatctcagaaaacataagggtacttaggtttttttattcaactaatcttgaggaacgaaatgtgaggactacattaagtgtccaaaccaaaccatgcatcatctgatctagctaagataaaactatcctgatctagctaagataaaactctccttgatctagctaagataaaactctccttgatctagcctgggtcgctatgagcaggtggcctgaacggtgagcgcgccggattggcaccctgcgccggcaaacgcggccgtgtacttgaccgtgcacgactccctgccgacgcacgcgtccgtgaacgccttgagcgcggccttggactcgcagcctcccttgtaggcgccgcagctgcccctggcgacgccgaagctggccacgtcgacgctggcgacgacgcggccgtggccgccgcatgacagcgtgacgtcgtcgccgagctcgacggccgccacgcacacggggcccacggcgacggtgtggaacgcggcgcgtgtcgggtcgccgccg

SEQ ID NO: 31892 - DNA, 2399 bp, Zea Mays
gcagaaattgcttacagaagagaaatgacccgtttcgagccaaggcatcctcgcgtctcgctctcacccctcctcggcgcctccccgaccacagtgtaaagcccctgtcccttcctccccgactcgcccctcatggcgaggaggcgctgctgatgcctcgcggcgtcggatcggacgcggcggccacgacacctagccgcttgcggtggcgctcgcctacgcgcccaatccgccgacgctgctcctcggatcccccgagagattcaggccccgtctcgcctcgtcctgcctagtgcctaggtgaggctctggcctccaaaggtgcgtgggtgggatctgctgcctcggtttgcgttattcccaagtgccctgcccatactccaacagcggtccagtcgacttccccaagtgctcgacccctacaaggcagcgcgcgtgcgtcacctcaaccccttgcatgcgctggcgctaaccctatctaggagacggagcggcgggccagcggctacgcgggcaaagagaggacgagagcgtgcaagaagagaaggcccgtgtcaggcggcggctatagaaggtcccatatctgaagaggcgcttgagagagtccgtgcactgttagatatgataagacctctagatgtcggcctagataatgaagcccaaattgcacgcaattggagtagttctacgcgtccatcaaatgggagacgaggacgcaatggggctaaccagttcgcggctccaatcaaatatttgcacattcatgaatgtgaaagcttctctatgggtatattttgtatgccaccttcttcagttatcccacttcataatcatcctggaatgactgtacttagcaagcttctttatggacgtctgcatgctgaatcttatgactgggttgacatacctgatcatccaattgatcaattacaaagtggtaacatccacactttcagagccattacaccttgtgctctctttgacgttctttctccaccatactccgctgaggatgggcgacactgttcatacttccgaaagtctcagatgaatcagccacctgttgttttgcctgctgagatagatagctctcaggtagtttggttggaggagttggaggaccatcagcccccagaaggctttgttgttgcaagaggtctgtataaaggccctgtaattaggagataatttgctttggagcgcagaatcaaccaagctgcaaatcagctgaaagacgatgcaggcttgtagtgcctagtgcaagcatcgtcaggtcatgtgcagcctacggtttatttgtacatctcaaagtgatctttgataatttaacagcagttttacagaacaggaacggatgttttttgtttggctgccattttaactttgtcccactgctggagtatctctgacctagttatggagctcttatcagatcaagaccatggtacttttgatgtaccagcatagctattgtcatgatgtaccagggaagatcaagacaagtgtttccatttggtgatttcagaaagaatttggtgtggggctaccattttgtctgtgtaatagcagcattactattttggagcaagactgtaaattacgggagaggaactataataatatcattaggtttatcatgaaatatattttcatggtgtatctatttaggccttgtttggaaggagatctttttctgcattattgtcactgtgttccaaataggccgttaaagtttggtggtgacctagattgctgttagtctggtggggacctagaaatgaaagcgagtacagaagtccctcgctgccttagcgaatcctggtgttgtgataagtcgcgcggtaaagtcctttttcatctcagaaaccatataggcacgttttcatctcagaaaacataagggtacttaggtttttttattcaactaatcttgaggaacgaaatgtgaggactacattaagtgtccaaaccaaaccatgcatcatctgatctagctaagataaaactatcctgatctagctaagataaaactctccttgatctagctaagataaaactctccttgatctagcctgggtcgctatgagcaggtggcctgaacggtgagcgcgccggattggcaccctgcgccggcaaacgcggccgtgtacttgaccgtgcacgactccctgccgacgcacgcgtccgtgaacgccttgagcgcggccttggactcgcagcctcccttgtaggcgccgcagctgcccctggcgacgccgaagctggccacgtcgacgctggcgacgacgcggccgtggccgccgcatgacagcgtgacgtcgtcgccgagctcgacggccgccacgcacacggggcccacggcgacggtgtggaacgcggcgcgtgtcgggtcgccgccg

SEQ ID NO: 31893 - DNA, 2654 bp, Zea Mays
gcagaaattgcttacagaagagaaatgacccgtttcgagccaaggcatcctcgcgtctcgctctcacccctcctcggcgcctccccgaccacagtgtaaagcccctgtcccttcctccccgactcgcccctcatggcgaggaggcgctgctgatgcctcgcggcgtcggatcggacgcggcggccacgacacctagccgcttgcggtggcgctcgcctacgcgcccaatccgccgacgctgctcctcggatcccccgagagattcaggccccgtctcgcctcgtcctgcctagtgcctaggtgaggctctggcctccaaaggtgcgtgggtgggatctgctgcctcggtttgcgttattcccaagtgccctgcccatactccaacagcggtccagtcgacttccccaagtgctcgacccctacaaggcagcgcgcgtgcgtcacctcaaccccttgcatgcgctggcgctaaccctatctaggagacggagcggcgggccagcggctacgcgggcaaagagaggacgagagcgtgcaagaagagaaggcccgtgtcaggcggcggctataggtgcaaggataggcaacaagtgttcaaaaacacgtctgtggatcaattgacttgtatttcagcctttcagttgaggattaaagtggaggtttaagaagcttgagaattggcatcatctcaagaatacattgaagtgcaagatgccaaaaataaagagtctatctaatgcatgccgagtatcattttctccagaaggtcccatatctgaagaggcgcttgagagagtccgtgcactgttagatatgataagacctctagatgtcggcctagataatgaagcccaaattgcacgcaattggagtagttctacgcgtccatcaaatgggagacgaggacgcaatggggctaaccagttcgcggctccaatcaaatatttgcacattcatgaatgtgaaagcttctctatgggtatattttgtatgccaccttcttcagttatcccacttcataatcatcctggaatgactgtacttagcaagcttctttatggacgtctgcatgctgaatcttatgactgggttgacatacctgatcatccaattgatcaattacaaaccaagcttgttaaagattgtgaaatgactgctccagagacaactattctttaccctaatgcaggtggtaacatccacactttcagagccattacaccttgtgctctctttgacgttctttctccaccatactccgctgaggatgggcgacactgttcatacttccgaaagtctcagatgaatcagccacctgttgttttgcctgctgagatagatagctctcaggtagtttggttggaggagttggaggaccatcagcccccagaaggctttgttgttgcaagaggtctgtataaaggccctgtaattaggagataatttgctttggagcgcagaatcaaccaagctgcaaatcagctgaaagacgatgcaggcttgtagtgcctagtgcaagcatcgtcaggtcatgtgcagcctacggtttatttgtacatctcaaagtgatctttgataatttaacagcagttttacagaacaggaacggatgttttttgtttggctgccattttaactttgtcccactgctggagtatctctgacctagttatggagctcttatcagatcaagaccatggtacttttgatgtaccagcatagctattgtcatgatgtaccagggaagatcaagacaagtgtttccatttggtgatttcagaaagaatttggtgtggggctaccattttgtctgtgtaatagcagcattactattttggagcaagactgtaaattacgggagaggaactataataatatcattaggtttatcatgaaatatattttcatggtgtatctatttaggccttgtttggaaggagatctttttctgcattattgtcactgtgttccaaataggccgttaaagtttggtggtgacctagattgctgttagtctggtggggacctagaaatgaaagcgagtacagaagtccctcgctgccttagcgaatcctggtgttgtgataagtcgcgcggtaaagtcctttttcatctcagaaaccatataggcacgttttcatctcagaaaacataagggtacttaggtttttttattcaactaatcttgaggaacgaaatgtgaggactacattaagtgtccaaaccaaaccatgcatcatctgatctagctaagataaaactatcctgatctagctaagataaaactctccttgatctagctaagataaaactctccttgatctagcctgggtcgctatgagcaggtggcctgaacggtgagcgcgccggattggcaccctgcgccggcaaacgcggccgtgtacttgaccgtgcacgactccctgccgacgcacgcgtccgtgaacgccttgagcgcggccttggactcgcagcctcccttgtaggcgccgcagctgcccctggcgacgccgaagctggccacgtcgacgctggcgacgacgcggccgtggccgccgcatgacagcgtgacgtcgtcgccgagctcgacggccgccacgcacacggggcccacggcgacggtgtggaacgcggcgcgtgtcgggtcgccgccg

SEQ ID NO: 31894 - DNA, 2413 bp, Zea Mays
gcagaaattgcttacagaagagaaatgacccgtttcgagccaaggcatcctcgcgtctcgctctcacccctcctcggcgcctccccgaccacagtgtaaagcccctgtcccttcctccccgactcgcccctcatggcgaggaggcgctgctgatgcctcgcggcgtcggatcggacgcggcggccacgacacctagccgcttgcggtggcgctcgcctacgcgcccaatccgccgacgctgctcctcggatcccccgagagattcaggccccgtctcgcctcgtcctgcctagtgcctaggtgaggctctggcctccaaaggtgcaaggataggcaacaagtgttcaaaaacacgtctgtggatcaattgacttgtatttcagcctttcagttgaggattaaagtggaggtttaagaagcttgagaattggcatcatctcaagaatacattgaagtgcaagatgccaaaaataaagagtctatctaatgcatgccgagtatcattttctccagaaggtcccatatctgaagaggcgcttgagagagtccgtgcactgttagatatgataagacctctagatgtcggcctagataatgaagcccaaattgcacgcaattggagtagttctacgcgtccatcaaatgggagacgaggacgcaatggggctaaccagttcgcggctccaatcaaatatttgcacattcatgaatgtgaaagcttctctatgggtatattttgtatgccaccttcttcagttatcccacttcataatcatcctggaatgactgtacttagcaagcttctttatggacgtctgcatgctgaatcttatgactgggttgacatacctgatcatccaattgatcaattacaaacaaggccagccaagcttgttaaagattgtgaaatgactgctccagagacaactattctttaccctaatgcaggtggtaacatccacactttcagagccattacaccttgtgctctctttgacgttctttctccaccatactccgctgaggatgggcgacactgttcatacttccgaaagtctcagatgaatcagccacctgttgttttgcctgctgagatagatagctctcaggtagtttggttggaggagttggaggaccatcagcccccagaaggctttgttgttgcaagaggtctgtataaaggccctgtaattaggagataatttgctttggagcgcagaatcaaccaagctgcaaatcagctgaaagacgatgcaggcttgtagtgcctagtgcaagcatcgtcaggtcatgtgcagcctacggtttatttgtacatctcaaagtgatctttgataatttaacagcagttttacagaacaggaacggatgttttttgtttggctgccattttaactttgtcccactgctggagtatctctgacctagttatggagctcttatcagatcaagaccatggtacttttgatgtaccagcatagctattgtcatgatgtaccagggaagatcaagacaagtgtttccatttggtgatttcagaaagaatttggtgtggggctaccattttgtctgtgtaatagcagcattactattttggagcaagactgtaaattacgggagaggaactataataatatcattaggtttatcatgaaatatattttcatggtgtatctatttaggccttgtttggaaggagatctttttctgcattattgtcactgtgttccaaataggccgttaaagtttggtggtgacctagattgctgttagtctggtggggacctagaaatgaaagcgagtacagaagtccctcgctgccttagcgaatcctggtgttgtgataagtcgcgcggtaaagtcctttttcatctcagaaaccatataggcacgttttcatctcagaaaacataagggtacttaggtttttttattcaactaatcttgaggaacgaaatgtgaggactacattaagtgtccaaaccaaaccatgcatcatctgatctagctaagataaaactatcctgatctagctaagataaaactctccttgatctagctaagataaaactctccttgatctagcctgggtcgctatgagcaggtggcctgaacggtgagcgcgccggattggcaccctgcgccggcaaacgcggccgtgtacttgaccgtgcacgactccctgccgacgcacgcgtccgtgaacgccttgagcgcggccttggactcgcagcctcccttgtaggcgccgcagctgcccctggcgacgccgaagctggccacgtcgacgctggcgacgacgcggccgtggccgccgcatgacagcgtgacgtcgtcgccgagctcgacggccgccacgcacacggggcccacggcgacggtgtggaacgcggcgcgtgtcgggtcgccgccg

SEQ ID NO: 31895 - DNA, 2322 bp, Zea Mays
gcagaaattgcttacagaagagaaatgacccgtttcgagccaaggcatcctcgcgtctcgctctcacccctcctcggcgcctccccgaccacagtgtaaagcccctgtcccttcctccccgactcgcccctcatggcgaggaggcgctgctgatgcctcgcggcgtcggatcggacgcggcggccacgacacctagccgcttgcggtggcgctcgcctacgcgcccaatccgccgacgctgctcctcggatcccccgagagattcaggccccgtctcgcctcgtcctgcctagtgcctagttgaggattaaagtggaggtttaagaagcttgagaattggcatcatctcaagaatacattgaagtgcaagatgccaaaaataaagagtctatctaatgcatgccgagtatcattttctccagaaggtcccatatctgaagaggcgcttgagagagtccgtgcactgttagatatgataagacctctagatgtcggcctagataatgaagcccaaattgcacgcaattggagtagttctacgcgtccatcaaatgggagacgaggacgcaatggggctaaccagttcgcggctccaatcaaatatttgcacattcatgaatgtgaaagcttctctatgggtatattttgtatgccaccttcttcagttatcccacttcataatcatcctggaatgactgtacttagcaagcttctttatggacgtctgcatgctgaatcttatgactgggttgacatacctgatcatccaattgatcaattacaaacaaggccagccaagcttgttaaagattgtgaaatgactgctccagagacaactattctttaccctaatgcaggtggtaacatccacactttcagagccattacaccttgtgctctctttgacgttctttctccaccatactccgctgaggatgggcgacactgttcatacttccgaaagtctcagatgaatcagccacctgttgttttgcctgctgagatagatagctctcaggtagtttggttggaggagttggaggaccatcagcccccagaaggctttgttgttgcaagaggtctgtataaaggccctgtaattaggagataatttgctttggagcgcagaatcaaccaagctgcaaatcagctgaaagacgatgcaggcttgtagtgcctagtgcaagcatcgtcaggtcatgtgcagcctacggtttatttgtacatctcaaagtgatctttgataatttaacagcagttttacagaacaggaacggatgttttttgtttggctgccattttaactttgtcccactgctggagtatctctgacctagttatggagctcttatcagatcaagaccatggtacttttgatgtaccagcatagctattgtcatgatgtaccagggaagatcaagacaagtgtttccatttggtgatttcagaaagaatttggtgtggggctaccattttgtctgtgtaatagcagcattactattttggagcaagactgtaaattacgggagaggaactataataatatcattaggtttatcatgaaatatattttcatggtgtatctatttaggccttgtttggaaggagatctttttctgcattattgtcactgtgttccaaataggccgttaaagtttggtggtgacctagattgctgttagtctggtggggacctagaaatgaaagcgagtacagaagtccctcgctgccttagcgaatcctggtgttgtgataagtcgcgcggtaaagtcctttttcatctcagaaaccatataggcacgttttcatctcagaaaacataagggtacttaggtttttttattcaactaatcttgaggaacgaaatgtgaggactacattaagtgtccaaaccaaaccatgcatcatctgatctagctaagataaaactatcctgatctagctaagataaaactctccttgatctagctaagataaaactctccttgatctagcctgggtcgctatgagcaggtggcctgaacggtgagcgcgccggattggcaccctgcgccggcaaacgcggccgtgtacttgaccgtgcacgactccctgccgacgcacgcgtccgtgaacgccttgagcgcggccttggactcgcagcctcccttgtaggcgccgcagctgcccctggcgacgccgaagctggccacgtcgacgctggcgacgacgcggccgtggccgccgcatgacagcgtgacgtcgtcgccgagctcgacggccgccacgcacacggggcccacggcgacggtgtggaacgcggcgcgtgtcgggtcgccgccg

SEQ ID NO: 31896 - DNA, 2187 bp, Zea Mays
gcagaaattgcttacagaagagaaatgacccgtttcgagccaaggcatcctcgcgtctcgctctcacccctcctcggcgcctccccgaccacagtgtgcaaggataggcaacaagtgttcaaaaacacgtctgtggatcaattgacttgtatttcagcctttcagttgaggattaaagtggaggtttaagaagcttgagaattggcatcatctcaagaatacattgaagtgcaagatgccaaaaataaagagtctatctaatgcatgccgagtatcattttctccagaaggtcccatatctgaagaggcgcttgagagagtccgtgcactgttagatatgataagacctctagatgtcggcctagataatgaagcccaaattgcacgcaattggagtagttctacgcgtccatcaaatgggagacgaggacgcaatggggctaaccagttcgcggctccaatcaaatatttgcacattcatgaatgtgaaagcttctctatgggtatattttgtatgccaccttcttcagttatcccacttcataatcatcctggaatgactgtacttagcaagcttctttatggacgtctgcatgctgaatcttatgactgggttgacatacctgatcatccaattgatcaattacaaacaaggccagccaagcttgttaaagattgtgaaatgactgctccagagacaactattctttaccctaatgcaggtggtaacatccacactttcagagccattacaccttgtgctctctttgacgttctttctccaccatactccgctgaggatgggcgacactgttcatacttccgaaagtctcagatgaatcagccacctgttgttttgcctgctgagatagatagctctcaggtagtttggttggaggagttggaggaccatcagcccccagaaggctttgttgttgcaagaggtctgtataaaggccctgtaattaggagataatttgctttggagcgcagaatcaaccaagctgcaaatcagctgaaagacgatgcaggcttgtagtgcctagtgcaagcatcgtcaggtcatgtgcagcctacggtttatttgtacatctcaaagtgatctttgataatttaacagcagttttacagaacaggaacggatgttttttgtttggctgccattttaactttgtcccactgctggagtatctctgacctagttatggagctcttatcagatcaagaccatggtacttttgatgtaccagcatagctattgtcatgatgtaccagggaagatcaagacaagtgtttccatttggtgatttcagaaagaatttggtgtggggctaccattttgtctgtgtaatagcagcattactattttggagcaagactgtaaattacgggagaggaactataataatatcattaggtttatcatgaaatatattttcatggtgtatctatttaggccttgtttggaaggagatctttttctgcattattgtcactgtgttccaaataggccgttaaagtttggtggtgacctagattgctgttagtctggtggggacctagaaatgaaagcgagtacagaagtccctcgctgccttagcgaatcctggtgttgtgataagtcgcgcggtaaagtcctttttcatctcagaaaccatataggcacgttttcatctcagaaaacataagggtacttaggtttttttattcaactaatcttgaggaacgaaatgtgaggactacattaagtgtccaaaccaaaccatgcatcatctgatctagctaagataaaactatcctgatctagctaagataaaactctccttgatctagctaagataaaactctccttgatctagcctgggtcgctatgagcaggtggcctgaacggtgagcgcgccggattggcaccctgcgccggcaaacgcggccgtgtacttgaccgtgcacgactccctgccgacgcacgcgtccgtgaacgccttgagcgcggccttggactcgcagcctcccttgtaggcgccgcagctgcccctggcgacgccgaagctggccacgtcgacgctggcgacgacgcggccgtggccgccgcatgacagcgtgacgtcgtcgccgagctcgacggccgccacgcacacggggcccacggcgacggtgtggaacgcggcgcgtgtcgggtcgccgccg

SEQ ID NO: 31897 - DNA, 2045 bp, Zea Mays
gcagaaattgcttacagaagagaaatgacccgtttcgagccaaggcatcctcgcgtctcgctctcacccctcctcggcgcctccccgaccacagtttgaggattaaagtggaggtttaagaagcttgagaattggcatcatctcaagaatacattgaagtgcaagatgccaaaaataaagagtctatctaatgcatgccgagtatcattttctccagaaggtcccatatctgaagaggcgcttgagagagtccgtgcactgttagatatgataagacctctagatgtcggcctagataatgaagcccaaattgcacgcaattggagtagttctacgcgtccatcaaatgggagacgaggacgcaatggggctaaccagttcgcggctccaatcaaatatttgcacattcatgaatgtgaaagcttctctatgggtatattttgtatgccaccttcttcagttatcccacttcataatcatcctggaatgactgtacttagcaagcttctttatggacgtctgcatgctgaatcttatgactgggttgacatacctgatcatccaattgatcaattacaaagtggtaacatccacactttcagagccattacaccttgtgctctctttgacgttctttctccaccatactccgctgaggatgggcgacactgttcatacttccgaaagtctcagatgaatcagccacctgttgttttgcctgctgagatagatagctctcaggtagtttggttggaggagttggaggaccatcagcccccagaaggctttgttgttgcaagaggtctgtataaaggccctgtaattaggagataatttgctttggagcgcagaatcaaccaagctgcaaatcagctgaaagacgatgcaggcttgtagtgcctagtgcaagcatcgtcaggtcatgtgcagcctacggtttatttgtacatctcaaagtgatctttgataatttaacagcagttttacagaacaggaacggatgttttttgtttggctgccattttaactttgtcccactgctggagtatctctgacctagttatggagctcttatcagatcaagaccatggtacttttgatgtaccagcatagctattgtcatgatgtaccagggaagatcaagacaagtgtttccatttggtgatttcagaaagaatttggtgtggggctaccattttgtctgtgtaatagcagcattactattttggagcaagactgtaaattacgggagaggaactataataatatcattaggtttatcatgaaatatattttcatggtgtatctatttaggccttgtttggaaggagatctttttctgcattattgtcactgtgttccaaataggccgttaaagtttggtggtgacctagattgctgttagtctggtggggacctagaaatgaaagcgagtacagaagtccctcgctgccttagcgaatcctggtgttgtgataagtcgcgcggtaaagtcctttttcatctcagaaaccatataggcacgttttcatctcagaaaacataagggtacttaggtttttttattcaactaatcttgaggaacgaaatgtgaggactacattaagtgtccaaaccaaaccatgcatcatctgatctagctaagataaaactatcctgatctagctaagataaaactctccttgatctagctaagataaaactctccttgatctagcctgggtcgctatgagcaggtggcctgaacggtgagcgcgccggattggcaccctgcgccggcaaacgcggccgtgtacttgaccgtgcacgactccctgccgacgcacgcgtccgtgaacgccttgagcgcggccttggactcgcagcctcccttgtaggcgccgcagctgcccctggcgacgccgaagctggccacgtcgacgctggcgacgacgcggccgtggccgccgcatgacagcgtgacgtcgtcgccgagctcgacggccgccacgcacacggggcccacggcgacggtgtggaacgcggcgcgtgtcgggtcgccgccg

SEQ ID NO: 31898 - DNA, 2455 bp, Zea Mays
gcagaaattgcttacagaagagaaatgacccgtttcgagccaaggcatcctcgcgtctcgctctcacccctcctcggcgcctccccgaccacagtgtaaagcccctgtcccttcctccccgactcgcccctcatggcgaggaggcgctgctgatgcctcgcggcgtcggatcggacgcggcggccacgacacctagccgcttgcggtggcgctcgcctacgcgcccaatccgccgacgctgctcctcggatcccccgagagattcaggccccgtctcgcctcgtcctgcctagtgcctaggtgaggctctggcctccaaaggtgcgtgggtgggatctgctgcctcggtttgcgttattcccaagtgccctgcccatactccaacagcggtccagtcgacttccccaagtgctcgacccctacaaggcagcgcgcgtgcaaggataggcaacaagtgttcaaaaacacgtctgtggatcaattgacttgtatttcagcctttcagttgaggattaaagtggaggtttaagaagcttgagaattggcatcatctcaagaatacattgaagtgcaagatgccaaaaataaagagtctatctaatgcatgccgagtatcattttctccagaaggtcccatatctgaagaggcgcttgagagagtccgtgcactgttagatatgataagacctctagatgtcggcctagataatgaagcccaaattgcacgcaattggagtagttctacgcgtccatcaaatgggagacgaggacgcaatggggctaaccagttcgcggctccaatcaaatatttgcacattcatgaatgtgaaagcttctctatgggtatattttgtatgccaccttcttcagttatcccacttcataatcatcctggaatgactgtacttagcaagcttctttatggacgtctgcatgctgaatcttatgactgggttgacatacctgatcatccaattgatcaattacaaagtggtaacatccacactttcagagccattacaccttgtgctctctttgacgttctttctccaccatactccgctgaggatgggcgacactgttcatacttccgaaagtctcagatgaatcagccacctgttgttttgcctgctgagatagatagctctcaggtagtttggttggaggagttggaggaccatcagcccccagaaggctttgttgttgcaagaggtctgtataaaggccctgtaattaggagataatttgctttggagcgcagaatcaaccaagctgcaaatcagctgaaagacgatgcaggcttgtagtgcctagtgcaagcatcgtcaggtcatgtgcagcctacggtttatttgtacatctcaaagtgatctttgataatttaacagcagttttacagaacaggaacggatgttttttgtttggctgccattttaactttgtcccactgctggagtatctctgacctagttatggagctcttatcagatcaagaccatggtacttttgatgtaccagcatagctattgtcatgatgtaccagggaagatcaagacaagtgtttccatttggtgatttcagaaagaatttggtgtggggctaccattttgtctgtgtaatagcagcattactattttggagcaagactgtaaattacgggagaggaactataataatatcattaggtttatcatgaaatatattttcatggtgtatctatttaggccttgtttggaaggagatctttttctgcattattgtcactgtgttccaaataggccgttaaagtttggtggtgacctagattgctgttagtctggtggggacctagaaatgaaagcgagtacagaagtccctcgctgccttagcgaatcctggtgttgtgataagtcgcgcggtaaagtcctttttcatctcagaaaccatataggcacgttttcatctcagaaaacataagggtacttaggtttttttattcaactaatcttgaggaacgaaatgtgaggactacattaagtgtccaaaccaaaccatgcatcatctgatctagctaagataaaactatcctgatctagctaagataaaactctccttgatctagctaagataaaactctccttgatctagcctgggtcgctatgagcaggtggcctgaacggtgagcgcgccggattggcaccctgcgccggcaaacgcggccgtgtacttgaccgtgcacgactccctgccgacgcacgcgtccgtgaacgccttgagcgcggccttggactcgcagcctcccttgtaggcgccgcagctgcccctggcgacgccgaagctggccacgtcgacgctggcgacgacgcggccgtggccgccgcatgacagcgtgacgtcgtcgccgagctcgacggccgccacgcacacggggcccacggcgacggtgtggaacgcggcgcgtgtcgggtcgccgccg

SEQ ID NO: 31899 - DNA, 2569 bp, Zea Mays
gcagaaattgcttacagaagagaaatgacccgtttcgagccaaggcatcctcgcgtctcgctctcacccctcctcggcgcctccccgaccacagtgtaaagcccctgtcccttcctccccgactcgcccctcatggcgaggaggcgctgctgatgcctcgcggcgtcggatcggacgcggcggccacgacacctagccgcttgcggtggcgctcgcctacgcgcccaatccgccgacgctgctcctcggatcccccgagagattcaggccccgtctcgcctcgtcctgcctagtgcctaggtgaggctctggcctccaaaggtgcgtgggtgggatctgctgcctcggtttgcgttattcccaagtgccctgcccatactccaacagcggtccagtcgacttccccaagtgctcgacccctacaaggcagcgcgcgtgcgtcacctcaaccccttgcatgcgctggcgctaaccctatctaggagacggagcggcgggccagcggctacgcgggcaaagagaggacgagagcgtgcaagaagagaaggcccgtgtcaggcggcggctataggtgcaaggataggcaacaagtgttcaaaaacacgtctgtggatcaattgacttgtatttcagcctttcagttgaggattaaagtggaggtttaagaagcttgagaattggcatcatctcaagaatacattgaagtgcaagatgccaaaaataaagagtctatctaatgcatgccgagtatcattttctccagaaggtcccatatctgaagaggcgcttgagagagtccgtgcactgttagatatgataagacctctagatgtcggcctagataatgaagcccaaattgcacgcaattggagtagttctacgcgtccatcaaatgggagacgaggacgcaatggggctaaccagttcgcggctccaatcaaatatttgcacattcatgaatgtgaaagcttctctatgggtatattttgtatgccaccttcttcagttatcccacttcataatcatcctggaatgactgtacttagcaagcttctttatggacgtctgcatgctgaatcttatgactgggttgacatacctgatcatccaattgatcaattacaaaagccattacaccttgtgctctctttgacgttctttctccaccatactccgctgaggatgggcgacactgttcatacttccgaaagtctcagatgaatcagccacctgttgttttgcctgctgagatagatagctctcaggtagtttggttggaggagttggaggaccatcagcccccagaaggctttgttgttgcaagaggtctgtataaaggccctgtaattaggagataatttgctttggagcgcagaatcaaccaagctgcaaatcagctgaaagacgatgcaggcttgtagtgcctagtgcaagcatcgtcaggtcatgtgcagcctacggtttatttgtacatctcaaagtgatctttgataatttaacagcagttttacagaacaggaacggatgttttttgtttggctgccattttaactttgtcccactgctggagtatctctgacctagttatggagctcttatcagatcaagaccatggtacttttgatgtaccagcatagctattgtcatgatgtaccagggaagatcaagacaagtgtttccatttggtgatttcagaaagaatttggtgtggggctaccattttgtctgtgtaatagcagcattactattttggagcaagactgtaaattacgggagaggaactataataatatcattaggtttatcatgaaatatattttcatggtgtatctatttaggccttgtttggaaggagatctttttctgcattattgtcactgtgttccaaataggccgttaaagtttggtggtgacctagattgctgttagtctggtggggacctagaaatgaaagcgagtacagaagtccctcgctgccttagcgaatcctggtgttgtgataagtcgcgcggtaaagtcctttttcatctcagaaaccatataggcacgttttcatctcagaaaacataagggtacttaggtttttttattcaactaatcttgaggaacgaaatgtgaggactacattaagtgtccaaaccaaaccatgcatcatctgatctagctaagataaaactatcctgatctagctaagataaaactctccttgatctagctaagataaaactctccttgatctagcctgggtcgctatgagcaggtggcctgaacggtgagcgcgccggattggcaccctgcgccggcaaacgcggccgtgtacttgaccgtgcacgactccctgccgacgcacgcgtccgtgaacgccttgagcgcggccttggactcgcagcctcccttgtaggcgccgcagctgcccctggcgacgccgaagctggccacgtcgacgctggcgacgacgcggccgtggccgccgcatgacagcgtgacgtcgtcgccgagctcgacggccgccacgcacacggggcccacggcgacggtgtggaacgcggcgcgtgtcgggtcgccgccg

SEQ ID NO: 31900 - DNA, 2592 bp, Zea Mays
gcagaaattgcttacagaagagaaatgacccgtttcgagccaaggcatcctcgcgtctcgctctcacccctcctcggcgcctccccgaccacagtgtaaagcccctgtcccttcctccccgactcgcccctcatggcgaggaggcgctgctgatgcctcgcggcgtcggatcggacgcggcggccacgacacctagccgcttgcggtggcgctcgcctacgcgcccaatccgccgacgctgctcctcggatcccccgagagattcaggccccgtctcgcctcgtcctgcctagtgcctaggtgaggctctggcctccaaaggtgcgtgggtgggatctgctgcctcggtttgcgttattcccaagtgccctgcccatactccaacagcggtccagtcgacttccccaagtgctcgacccctacaaggcagcgcgcgtgcgtcacctcaaccccttgcatgcgctggcgctaaccctatctaggagacggagcggcgggccagcggctacgcgggcaaagagaggacgagagcgtgcaagaagagaaggcccgtgtcaggcggcggctatagcctttcagttgaggattaaagtggaggtttaagaagcttgagaattggcatcatctcaagaatacattgaagtgcaagatgccaaaaataaagagtctatctaatgcatgccgagtatcattttctccagaaggtcccatatctgaagaggcgcttgagagagtccgtgcactgttagatatgataagacctctagatgtcggcctagataatgaagcccaaattgcacgcaattggagtagttctacgcgtccatcaaatgggagacgaggacgcaatggggctaaccagttcgcggctccaatcaaatatttgcacattcatgaatgtgaaagcttctctatgggtatattttgtatgccaccttcttcagttatcccacttcataatcatcctggaatgactgtacttagcaagcttctttatggacgtctgcatgctgaatcttatgactgggttgacatacctgatcatccaattgatcaattacaaaccaagcttgttaaagattgtgaaatgactgctccagagacaactattctttaccctaatgcaggtggtaacatccacactttcagagccattacaccttgtgctctctttgacgttctttctccaccatactccgctgaggatgggcgacactgttcatacttccgaaagtctcagatgaatcagccacctgttgttttgcctgctgagatagatagctctcaggtagtttggttggaggagttggaggaccatcagcccccagaaggctttgttgttgcaagaggtctgtataaaggccctgtaattaggagataatttgctttggagcgcagaatcaaccaagctgcaaatcagctgaaagacgatgcaggcttgtagtgcctagtgcaagcatcgtcaggtcatgtgcagcctacggtttatttgtacatctcaaagtgatctttgataatttaacagcagttttacagaacaggaacggatgttttttgtttggctgccattttaactttgtcccactgctggagtatctctgacctagttatggagctcttatcagatcaagaccatggtacttttgatgtaccagcatagctattgtcatgatgtaccagggaagatcaagacaagtgtttccatttggtgatttcagaaagaatttggtgtggggctaccattttgtctgtgtaatagcagcattactattttggagcaagactgtaaattacgggagaggaactataataatatcattaggtttatcatgaaatatattttcatggtgtatctatttaggccttgtttggaaggagatctttttctgcattattgtcactgtgttccaaataggccgttaaagtttggtggtgacctagattgctgttagtctggtggggacctagaaatgaaagcgagtacagaagtccctcgctgccttagcgaatcctggtgttgtgataagtcgcgcggtaaagtcctttttcatctcagaaaccatataggcacgttttcatctcagaaaacataagggtacttaggtttttttattcaactaatcttgaggaacgaaatgtgaggactacattaagtgtccaaaccaaaccatgcatcatctgatctagctaagataaaactatcctgatctagctaagataaaactctccttgatctagctaagataaaactctccttgatctagcctgggtcgctatgagcaggtggcctgaacggtgagcgcgccggattggcaccctgcgccggcaaacgcggccgtgtacttgaccgtgcacgactccctgccgacgcacgcgtccgtgaacgccttgagcgcggccttggactcgcagcctcccttgtaggcgccgcagctgcccctggcgacgccgaagctggccacgtcgacgctggcgacgacgcggccgtggccgccgcatgacagcgtgacgtcgtcgccgagctcgacggccgccacgcacacggggcccacggcgacggtgtggaacgcggcgcgtgtcgggtcgccgccg

SEQ ID NO: 31901 - DNA, 1430 bp, Zea Mays
attttggattctgtgccaaaagaggggttaaaggaacgaattctgattcccgtggaccgacaaggagcagctgggaaacggagcgccacaagcccacaactctcgcgcaggcttctctcccatctccgcccttcccgaagcagcacggtgcaggccgcggacccgcggtttctccacagaatcccgctccacgcacgtcgcccccgtcgccggcgaggcggctgtgctgctgcgtactcccctggttccaactctgaaccggccaccctctcctgctccgcgacctcgagtaactttttgagtaccagtgatgcaaagggacacaagctctagcgatgtttctgcttctcatgtaggacgtgtaagacgtcgcaaacatccaactgaggctaccacagatgggaatagagctaatggacagccattgcttgtcaatgatcagaacaaatataaatcaatgcttacccgtacgtattctacagtatggatgattggaggctttgcctttattatttatatgggtcatctatatatctgggctatggtggttgtgattcaaatatacatggcaagagaacttttcaatttactcagaaaatccagtgaagagaaacaactgccagggttcagggtcctgaattggcacttctttttcacggcaatgctgtacacttatgggcgctttcttagtcgtcagctggtgaatacagtgacttcagatcacttgctttataaggtcgtcagtggcctaattaagtatcagatgtttatctgctatttcctttatattgcagggtttgtatggtttattttgactctcaagaaaaagacatacaagtatcagttcaaacagtatgcctggacacacatgatacttttaacagtttttgcacagtctgctttcactgtggcaaacatatttgaagggatattctgaacaccattaatcaagttgtctccaaagaaaacttgggaaggttttattggtgcatcagtgacaactatcatctctgcgtttctgttagcaaatgtaatgggccattcgcaatggttgacatgcccaagaaaggatctgttgactgggtggctttattgtgatcctggtccaatgtttaagccagagcattactcattgggagagtgggtgccgcattggcacaacaaggtcttgatctacacactgctcttctggacattcgtacgtaatcccgaagcctctccaaaaagctgaagaatatccaaaataatattgatatccatggctgccgctcgaaggaagatcacatcatcagcatagagttgagacctggtgctgcagtgcacgtggagcaaggggctgcagcagtccatcctgttcggccttattaatcaagaagcccaaagtatccaattatcgatgaccaagatgaacagaaaaggagacaaaggat

SEQ ID NO: 31902 - DNA, 2877 bp, Zea Mays
attttggattctgtgccaaaagaggggttaaaggaacgaattctgattcccgtggaccgacaaggagcagctgggaaacggagcgccacaagcccacaactctcgcgcaggcttctctcccatctccgcccttcccgaagcagcacggtgcaggccgcggacccgcggtttctccacagaatcccgctccacgcacgtcgcccccgtcgccggcgaggcggctgtgctgctgcgtactcccctggttccaactctgaaccggccaccctctcctgctccgcgacctcgagtaactttttgagtaccagtgatgcaaagggacacaagctctagcgatgtttctgcttctcatgtaggacgtgtaagacgtcgcaaacatccaactgaggctaccacagatgggaatagagctaatggacagccattgcttgtcaatgatcagaacaaatataaatcaatgcttacccgtacgtattctacagtatggatgattggaggctttgcctttattatttatatgggtcatctatatatctgggctatggtggttgtgattcaaatatacatggcaagagaacttttcaatttactcagaaaatccagtgaagagaaacaactgccagggttcagggtcctgaattggcacttctttttcacggcaatgctgtacacttatgggcgctttcttagtcgtcagctggtgaatacagtgacttcagatcacttgctttataaggtcgtcagtggcctaattaagtatcagatgtttatctgctatttcctttatattgcagggtttgtatggtttattttgactctcaagaaaaagacatacaagtatcagttcaaacagtatgcctggacacacatgatacttttaacagtttttgcacagtctgctttcactgtggcaaacatatttgaagggatattctggtttcttttgcctgcttcacttattgtgatcaacgatatttttgcttatttatttgggttctttcttgggagaacaccattaatcaagttgtctccaaagaaaacttgggaaggttttattggtgcatcagtgacaactatcatctctgcgtttctgttagcaaatgtaatgggccattcgcaatggttgacatgcccaagaaaggatctgttgactgggtggctttattgtgatcctggtccaatgtttaagccagagcattactcattgggagagtgggtgccgcattggcacaacaaggtcttgatctacacactgctcttctggacattcgtacgtaatcccgaagcctctccaaaaagctgaagaatatccaaaataatattgatatccatggctgccgctcgaaggaagatcacatcatcagcatagagttgagacctggtgctgcagtgcacgtggagcaaggggctgcagcagtccatcctgttcggccttattaatcaagaagcccaaagtatccaattatcgatgaccaagatgaacagaaaaggagacaaaggatctctctgtcggaggccacgacgatgaagaatagactgtcataggcaaactgatgtgttcccatggaaagaactagctattatgcctgtgcagtggcatgctttagccctaggtttatttgcatcaataatagcaccatttggaggattttttgcgagtggcttcaagagggcttttaaaattaaggattttggtgacagcatacctgggcatggtggaattactgacagaatggattgtcaaatggttatggcagtgtttgcatacatataccaccaatcattcattgcacctcagaacttctctgttgagataatcttggatcagattataagaaacctaacctatgaggagcaaaaatatgtatatgaacaacttggggaaatgttccgtgagaggcaattggctcattggctgaaagctgagagttagcgtgcttatgaaatgcatgatatgttgtgcatttagttcatgtatggcagcatgccagcatgttatgaatgtatacggagcccttgcccaaaccattgtatagaatggtagaatggagagaatgaatgggttgtaggtgctttattcactctctagtctccactgacgctgcctataattcactccccctgtcatcgtttctgcagtctgtgtaaaagggaacctggaaagttttattctttccacttcgtggtgctgggctcagatcaaatattcgaggattcacaatatatccccgatgttttaccacttcatgaaaattcaactaccccaactagccctatttacatctagacaacttcaagctaaatacatcctatcagttccttggatatggatccttattggataacagatagacgacatgtgtcatctagagagagacaatcactacaagcatggtaaaaccaacatttgaagcaatcattacaaggaaaatactcactttaactaacaatttgaagcaatcactgcaggaaaataatcgctttagtccaaacaatccatgcttgaccgatgaagatgatggagatgactgagaggtactcatgctaaataatacaaaatgtacttgcattcactatccaaggtaccgaaggatcgaaaaggctaccaaagccaattaaattctgttgttcaaaactgaaatttgagcagttagcttcaatggagatgaagaagtcgctcaaaacaaaagcacattaatcaactagtgatttcatgtttcaaaaatattcctagaatcacatgataccaacaaaatgaacgggtcacaaattggacgctgaaaagtctgaatcggcccaaaaccgtgtcgttatctagtgttgttttcaacggctcaaaatgcagttttcaaatgtcaaactgattcaaacggactc

SEQ ID NO: 31903 - DNA, 2722 bp, Zea Mays
gttgcgccgatcattagcgttgtatagacgcgggaagccgcgaacaaggcaacgccagtagacttgacaaaatacttccgtgccacataactttttgagtaccagtgatgcaaagggacacaagctctagcgatgtttctgcttctcatgtaggacgtgtaagacgtcgcaaacatccaactgaggctaccacagatgggaatagagctaatggacagccattgcttgtcaatgatcagaacaaatataaatcaatgcttacccgtacgtattctacagtatggatgattggaggctttgcctttattatttatatgggtcatctatatatctgggctatggtggttgtgattcaaatatacatggcaagagaacttttcaatttactcagaaaatccagtgaagagaaacaactgccagggttcagggtcctgaattggcacttctttttcacggcaatgctgtacacttatgggcgctttcttagtcgtcagctggtgaatacagtgacttcagatcacttgctttataaggtcgtcagtggcctaattaagtatcagatgtttatctgctatttcctttatattgcagggtttgtatggtttattttgactctcaagaaaaagacatacaagtatcagttcaaacagtatgcctggacacacatgatacttttaacagtttttgcacagtctgctttcactgtggcaaacatatttgaagggatattctggtttcttttgcctgcttcacttattgtgatcaacgatatttttgcttatttatttgggttctttcttgggagaacaccattaatcaagttgtctccaaagaaaacttgggaaggttttattggtgcatcagtgacaactatcatctctgcgtttctgttagcaaatgtaatgggccattcgcaatggttgacatgcccaagaaaggatctgttgactgggtggctttattgtgatcctggtccaatgtttaagccagagcattactcattgggagagtgggtgccgcattggataacagcaagggaaagcagccaactcacaaggcagtatattctgcagcacaacaaggtcttgatctacacactgctcttctggacattcgtacgtaatcccgaagcctctccaaaaagctgaagaatatccaaaataatattgatatccatggctgccgctcgaaggaagatcacatcatcagcatagagttgagacctggtgctgcagtgcacgtggagcaaggggctgcagcagtccatcctgttcggccttattaatcaagaagcccaaagtatccaattatcgatgaccaagatgaacagaaaaggagacaaaggatctctctgtcggaggccacgacgatgaagaatagactgtcataggcaaactgatgtgttcccatggaaagaactagctattatgcctgtgcagtggcatgctttagccctaggtttatttgcatcaataatagcaccatttggaggattttttgcgagtggcttcaagagggcttttaaaattaaggattttggtgacagcatacctgggcatggtggaattactgacagaatggattgtcaaatggttatggcagtgtttgcatacatataccaccaatcattcattgcacctcagaacttctctgttgagataatcttggatcagattataagaaacctaacctatgaggagcaaaaatatgtatatgaacaacttggggaaatgttccgtgagaggcaattggctcattggctgaaagctgagagttagcgtgcttatgaaatgcatgatatgttgtgcatttagttcatgtatggcagcatgccagcatgttatgaatgtatacggagcccttgcccaaaccattgtatagaatggtagaatggagagaatgaatgggttgtaggtgctttattcactctctagtctccactgacgctgcctataattcactccccctgtcatcgtttctgcagtctgtgtaaaagggaacctggaaagttttattctttccacttcgtggtgctgggctcagatcaaatattcgaggattcacaatatatccccgatgttttaccacttcatgaaaattcaactaccccaactagccctatttacatctagacaacttcaagctaaatacatcctatcagttccttggatatggatccttattggataacagatagacgacatgtgtcatctagagagagacaatcactacaagcatggtaaaaccaacatttgaagcaatcattacaaggaaaatactcactttaactaacaatttgaagcaatcactgcaggaaaataatcgctttagtccaaacaatccatgcttgaccgatgaagatgatggagatgactgagaggtactcatgctaaataatacaaaatgtacttgcattcactatccaaggtaccgaaggatcgaaaaggctaccaaagccaattaaattctgttgttcaaaactgaaatttgagcagttagcttcaatggagatgaagaagtcgctcaaaacaaaagcacattaatcaactagtgatttcatgtttcaaaaatattcctagaatcacatgataccaacaaaatgaacgggtcacaaattggacgctgaaaagtctgaatcggcccaaaaccgtgtcgttatctagtgttgttttcaacggctcaaaatgcagttttcaaatgtcaaactgattcaaacggactc

SEQ ID NO: 31904 - DNA, 2250 bp, Zea Mays
gttgcgccgatcattagcgttgtatagacgcgggaagccgcgaacaaggcaacgccagtagacttgacaaaatacttccgtgccacataactttttgagtaccagtgatgcaaagggacacaagctctagcgatgtttctgcttctcatgtaggacgtgtaagacgtcgcaaacatccaactgaggctaccacagatgggaatagagctaatggacagccattgcttgtcaatgatcagaacaaatataaatcaatgcttacccgtacgtattctacagtatggatgattggaggctttgcctttattatttatatgggtcatctatatatctgggctatggtggttgtgattcaaatatacatggcaagagaacttttcaatttactcagaaaatccagtgaagagaaacaactgccagggttcagggtcctgaattggcacttctttttcacggcaatgctgtacacttatgggcgctttcttagtcgtcagctgggtttgtatggtttattttgactctcaagaaaaagacatacaagtatcagttcaaacagtatgcctggacacacatgatacttttaacagtttttgcacagtctgctttcactgtggcaaacatatttgaagggatattctggtttcttttgcctgcttcacttattgtgatcaacgatatttttgcttatttatttgggttctttcttgggagaacaccattaatcaagttgtctccaaagaaaacttgggaaggttttattggtgcatcagtgacaactatcatctctgcgtttctgttagcaaatgtaatgggccattcgcaatggttgacatgcccaagaaaggatctgttgactgggtggctttattgtgatcctggtccaatgtttaagccagagcattactcattgggagagtgggtgccgcattggttcccatggaaagaactagctattatgcctgtgcagtggcatgctttagccctaggtttatttgcatcaataatagcaccatttggaggattttttgcgagtggcttcaagagggcttttaaaattaaggattttggtgacagcatacctgggcatggtggaattactgacagaatggattgtcaaatggttatggcagtgtttgcatacatataccaccaatcattcattgcacctcagaacttctctgttgagataatcttggatcagattataagaaacctaacctatgaggagcaaaaatatgtatatgaacaacttggggaaatgttccgtgagaggcaattggctcattggctgaaagctgagagttagcgtgcttatgaaatgcatgatatgttgtgcatttagttcatgtatggcagcatgccagcatgttatgaatgtatacggagcccttgcccaaaccattgtatagaatggtagaatggagagaatgaatgggttgtaggtgctttattcactctctagtctccactgacgctgcctataattcactccccctgtcatcgtttctgcagtctgtgtaaaagggaacctggaaagttttattctttccacttcgtggtgctgggctcagatcaaatattcgaggattcacaatatatccccgatgttttaccacttcatgaaaattcaactaccccaactagccctatttacatctagacaacttcaagctaaatacatcctatcagttccttggatatggatccttattggataacagatagacgacatgtgtcatctagagagagacaatcactacaagcatggtaaaaccaacatttgaagcaatcattacaaggaaaatactcactttaactaacaatttgaagcaatcactgcaggaaaataatcgctttagtccaaacaatccatgcttgaccgatgaagatgatggagatgactgagaggtactcatgctaaataatacaaaatgtacttgcattcactatccaaggtaccgaaggatcgaaaaggctaccaaagccaattaaattctgttgttcaaaactgaaatttgagcagttagcttcaatggagatgaagaagtcgctcaaaacaaaagcacattaatcaactagtgatttcatgtttcaaaaatattcctagaatcacatgataccaacaaaatgaacgggtcacaaattggacgctgaaaagtctgaatcggcccaaaaccgtgtcgttatctagtgttgttttcaacggctcaaaatgcagttttcaaatgtcaaactgattcaaacggactc

SEQ ID NO: 31905 - DNA, 2292 bp, Zea Mays
ctgggttacggttacgggagactactgaggaaaaataactttttgagtaccagtgatgcaaagggacacaagctctagcgatgtttctgcttctcatgtaggacgtgtaagacgtcgcaaacatccaactgaggctaccacagatgggaatagagctaatggacagccattgcttgtcaatgatcagaacaaatataaatcaatgcttacccgtacgtattctacagtatggatgattggaggctttgcctttattatttatatgggtcatctatatatctgggctatggtggttgtgattcaaatatacatggcaagagaacttttcaatttactcagaaaatccagtgaagagaaacaactgccagggttcagggtcctgaattggcacttctttttcacggcaatgctgtacacttatgggcgctttcttagtcgtcagctggtgaatacagtgacttcagatcacttgctttataaggtcgtcagtggcctaattaagtatcagatgtttatctgctatttcctttatattgcagggtttgtatggtttattttgactctcaagaaaaagacatacaagtatcagttcaaacagtatgcctggacacacatgatacttttaacagtttttgcacagtctgctttcactgtggcaaacatatttgaagggatattctggtttcttttgcctgcttcacttattgtgatcaacgatatttttgcttatttatttgggttctttcttgggagaacaccattaatcaagttgtctccaaagaaaacttgggaaggttttattggtgcatcagtgacaactatcatctctgcgtttctgttagcaaatgtaatgggccattcgcaatggttgacatgcccaagaaaggatctgttgactgggtggctttattgtgatcctggtccaatgtttaagccagagcattactcattgggagagtgggtgccgcattggttcccatggaaagaactagctattatgcctgtgcagtggcatgctttagccctaggtttatttgcatcaataatagcaccatttggaggattttttgcgagtggcttcaagagggcttttaaaattaaggattttggtgacagcatacctgggcatggtggaattactgacagaatggattgtcaaatggttatggcagtgtttgcatacatataccaccaatcattcattgcacctcagaacttctctgttgagataatcttggatcagattataagaaacctaacctatgaggagcaaaaatatgtatatgaacaacttggggaaatgttccgtgagaggcaattggctcattggctgaaagctgagagttagcgtgcttatgaaatgcatgatatgttgtgcatttagttcatgtatggcagcatgccagcatgttatgaatgtatacggagcccttgcccaaaccattgtatagaatggtagaatggagagaatgaatgggttgtaggtgctttattcactctctagtctccactgacgctgcctataattcactccccctgtcatcgtttctgcagtctgtgtaaaagggaacctggaaagttttattctttccacttcgtggtgctgggctcagatcaaatattcgaggattcacaatatatccccgatgttttaccacttcatgaaaattcaactaccccaactagccctatttacatctagacaacttcaagctaaatacatcctatcagttccttggatatggatccttattggataacagatagacgacatgtgtcatctagagagagacaatcactacaagcatggtaaaaccaacatttgaagcaatcattacaaggaaaatactcactttaactaacaatttgaagcaatcactgcaggaaaataatcgctttagtccaaacaatccatgcttgaccgatgaagatgatggagatgactgagaggtactcatgctaaataatacaaaatgtacttgcattcactatccaaggtaccgaaggatcgaaaaggctaccaaagccaattaaattctgttgttcaaaactgaaatttgagcagttagcttcaatggagatgaagaagtcgctcaaaacaaaagcacattaatcaactagtgatttcatgtttcaaaaatattcctagaatcacatgataccaacaaaatgaacgggtcacaaattggacgctgaaaagtctgaatcggcccaaaaccgtgtcgttatctagtgttgttttcaacggctcaaaatgcagttttcaaatgtcaaactgattcaaacggactc

SEQ ID NO: 31906 - DNA, 2348 bp, Zea Mays
ttgttagttcctttaccgtccctcaaatccaaacattccttcctaggactggcacggtgctccagttcatctaaagcaatttgtcttttggtaactttttgagtaccagtgatgcaaagggacacaagctctagcgatgtttctgcttctcatgtaggacgtgtaagacgtcgcaaacatccaactgaggctaccacagatgggaatagagctaatggacagccattgcttgtcaatgatcagaacaaatataaatcaatgcttacccgtacgtattctacagtatggatgattggaggctttgcctttattatttatatgggtcatctatatatctgggctatggtggttgtgattcaaatatacatggcaagagaacttttcaatttactcagaaaatccagtgaagagaaacaactgccagggttcagggtcctgaattggcacttctttttcacggcaatgctgtacacttatgggcgctttcttagtcgtcagctggtgaatacagtgacttcagatcacttgctttataaggtcgtcagtggcctaattaagtatcagatgtttatctgctatttcctttatattgcagggtttgtatggtttattttgactctcaagaaaaagacatacaagtatcagttcaaacagtatgcctggacacacatgatacttttaacagtttttgcacagtctgctttcactgtggcaaacatatttgaagggatattctggtttcttttgcctgcttcacttattgtgatcaacgatatttttgcttatttatttgggttctttcttgggagaacaccattaatcaagttgtctccaaagaaaacttgggaaggttttattggtgcatcagtgacaactatcatctctgcgtttctgttagcaaatgtaatgggccattcgcaatggttgacatgcccaagaaaggatctgttgactgggtggctttattgtgatcctggtccaatgtttaagccagagcattactcattgggagagtgggtgccgcattggttcccatggaaagaactagctattatgcctgtgcagtggcatgctttagccctaggtttatttgcatcaataatagcaccatttggaggattttttgcgagtggcttcaagagggcttttaaaattaaggattttggtgacagcatacctgggcatggtggaattactgacagaatggattgtcaaatggttatggcagtgtttgcatacatataccaccaatcattcattgcacctcagaacttctctgttgagataatcttggatcagattataagaaacctaacctatgaggagcaaaaatatgtatatgaacaacttggggaaatgttccgtgagaggcaattggctcattggctgaaagctgagagttagcgtgcttatgaaatgcatgatatgttgtgcatttagttcatgtatggcagcatgccagcatgttatgaatgtatacggagcccttgcccaaaccattgtatagaatggtagaatggagagaatgaatgggttgtaggtgctttattcactctctagtctccactgacgctgcctataattcactccccctgtcatcgtttctgcagtctgtgtaaaagggaacctggaaagttttattctttccacttcgtggtgctgggctcagatcaaatattcgaggattcacaatatatccccgatgttttaccacttcatgaaaattcaactaccccaactagccctatttacatctagacaacttcaagctaaatacatcctatcagttccttggatatggatccttattggataacagatagacgacatgtgtcatctagagagagacaatcactacaagcatggtaaaaccaacatttgaagcaatcattacaaggaaaatactcactttaactaacaatttgaagcaatcactgcaggaaaataatcgctttagtccaaacaatccatgcttgaccgatgaagatgatggagatgactgagaggtactcatgctaaataatacaaaatgtacttgcattcactatccaaggtaccgaaggatcgaaaaggctaccaaagccaattaaattctgttgttcaaaactgaaatttgagcagttagcttcaatggagatgaagaagtcgctcaaaacaaaagcacattaatcaactagtgatttcatgtttcaaaaatattcctagaatcacatgataccaacaaaatgaacgggtcacaaattggacgctgaaaagtctgaatcggcccaaaaccgtgtcgttatctagtgttgttttcaacggctcaaaatgcagttttcaaatgtcaaactgattcaaacggactc

SEQ ID NO: 31907 - DNA, 2658 bp, Zea Mays
atctaaagcaatttgtcttttggtaactttttgagtaccagtgatgcaaagggacacaagctctagcgatgtttctgcttctcatgtaggacgtgtaagacgtcgcaaacatccaactgaggctaccacagatgggaatagagctaatggacagccattgcttgtcaatgatcagaacaaatataaatcaatgcttacccgtacgtattctacagtatggatgattggaggctttgcctttattatttatatgggtcatctatatatctgggctatggtggttgtgattcaaatatacatggcaagagaacttttcaatttactcagaaaatccagtgaagagaaacaactgccagggttcagggtcctgaattggcacttctttttcacggcaatgctgtacacttatgggcgctttcttagtcgtcagctggtgaatacagtgacttcagatcacttgctttataaggtcgtcagtggcctaattaagtatcagatgtttatctgctatttcctttatattgcagggtttgtatggtttattttgactctcaagaaaaagacatacaagtatcagttcaaacagtatgcctggacacacatgatacttttaacagtttttgcacagtctgctttcactgtggcaaacatatttgaagggatattctggtttcttttgcctgcttcacttattgtgatcaacgatatttttgcttatttatttgggttctttcttgggagaacaccattaatcaagttgtctccaaagaaaacttgggaaggttttattggtgcatcagtgacaactatcatctctgcgtttctgttagcaaatgtaatgggccattcgcaatggttgacatgcccaagaaaggatctgttgactgggtggctttattgtgatcctggtccaatgtttaagccagagcattactcattgggagagtgggtgccgcattggataacagcaagggaaagcagccaactcacaaggcagtatattctgcagcacaacaaggtcttgatctacacactgctcttctggacattcgtacgtaatcccgaagcctctccaaaaagctgaagaatatccaaaataatattgatatccatggctgccgctcgaaggaagatcacatcatcagcatagagttgagacctggtgctgcagtgcacgtggagcaaggggctgcagcagtccatcctgttcggccttattaatcaagaagcccaaagtatccaattatcgatgaccaagatgaacagaaaaggagacaaaggatctctctgtcggaggccacgacgatgaagaatagactgtcataggcaaactgatgtgttcccatggaaagaactagctattatgcctgtgcagtggcatgctttagccctaggtttatttgcatcaataatagcaccatttggaggattttttgcgagtggcttcaagagggcttttaaaattaaggattttggtgacagcatacctgggcatggtggaattactgacagaatggattgtcaaatggttatggcagtgtttgcatacatataccaccaatcattcattgcacctcagaacttctctgttgagataatcttggatcagattataagaaacctaacctatgaggagcaaaaatatgtatatgaacaacttggggaaatgttccgtgagaggcaattggctcattggctgaaagctgagagttagcgtgcttatgaaatgcatgatatgttgtgcatttagttcatgtatggcagcatgccagcatgttatgaatgtatacggagcccttgcccaaaccattgtatagaatggtagaatggagagaatgaatgggttgtaggtgctttattcactctctagtctccactgacgctgcctataattcactccccctgtcatcgtttctgcagtctgtgtaaaagggaacctggaaagttttattctttccacttcgtggtgctgggctcagatcaaatattcgaggattcacaatatatccccgatgttttaccacttcatgaaaattcaactaccccaactagccctatttacatctagacaacttcaagctaaatacatcctatcagttccttggatatggatccttattggataacagatagacgacatgtgtcatctagagagagacaatcactacaagcatggtaaaaccaacatttgaagcaatcattacaaggaaaatactcactttaactaacaatttgaagcaatcactgcaggaaaataatcgctttagtccaaacaatccatgcttgaccgatgaagatgatggagatgactgagaggtactcatgctaaataatacaaaatgtacttgcattcactatccaaggtaccgaaggatcgaaaaggctaccaaagccaattaaattctgttgttcaaaactgaaatttgagcagttagcttcaatggagatgaagaagtcgctcaaaacaaaagcacattaatcaactagtgatttcatgtttcaaaaatattcctagaatcacatgataccaacaaaatgaacgggtcacaaattggacgctgaaaagtctgaatcggcccaaaaccgtgtcgttatctagtgttgttttcaacggctcaaaatgcagttttcaaatgtcaaactgattcaaacggactc

SEQ ID NO: 31908 - DNA, 1814 bp, Zea Mays
gccccagcttatacaccagcagtgtgaaaaaataacattgaaagataaatccttgggggattgcaagctttcgctgtgcggttgcggtcgctccccttcccgactccggccagaagcagcgacggtgccggcagccggttactccactcggcggcggcccatcctttcatgttttctcctccagtcctacaaatacaggacacaacacgcttgctcttgtgatactctattaagaatgttttgcttgaggaactactggtcgcctgcatttgcttcagtaaaggaggggcctgttcgacatcatataaagtttaattgtgtagtggtttgtggtgccaggggtccaagaccgagatatccccgtgtatggaaaactcgtaagaaaattgggactatttccaagtcacagaagcttgttgaatgtattaaaggtctgtctaatgtaaaggaggaagtttatggagcgcttgactcttttgttgcatgggaactggagtttcccttgatagtagtaaagaaggcactgaagaaacttgaagacgaaaaggaatggaaacgaataattcaggtcattaaatggatgttcaacaaaggtcaggggaagacaatggggagctattacaccttgttgaatgctttgatcgaggacggacggattgaggaagcagaagagttatttagaatgtgctggagagcatgataagatgttcgagatttttgctgatatggaggaactaggcgtaagaccagatggttctattatcaggatgctaggtgatgtatttcaaaagatagagatgatggacaaatacgaaaagttaaaaaagaaatacccaccaccgaaatgggaatatcgatacatcaaaggcaagcgcattagaattagagtttaccctgatagtaaaactgaagagacggcaaaaggagaccatgacaatgatgaactcggagaggtagaaagtatacagcttgataatgaattggaagaagaagcaagctcaggcctcgacaggagtgtattggacgatgcaacttgtggagaccttgaatatatataattcagagcttccatttggttttttttaatgcctgcttaatcaaagcggcctggagcaaattgaaccggtaacatcctagaacccatgccgttgtacttctaaaacacgggcatcgatatcttcagatctattttacttggattgactagaaactatgtgtcatgcgttttcccatcagcagtccttttcatgacattgtggtgattttaccacgagatgtgttcttcagagttcggttacttgatttatctgattcacaagcatgaggctcatgcttttcttgaaagcttccaaccatgttaaaattgtagcaatggtattaggtacaaacagttatcgtttttcctagtgcttatgatgcgtccatattcctgctttcctcggttgtgctgcagattgagatttttggtgtagccaatttgctactgctgccatgttaggaaatataaaagatcagccctcgtgttcaatggatttacggcagtttatcctcgcgtattctgtcaaatggtctggtaatcctattccattggtacacctacatctgactgcattcctgaacatgtggttgattgttggaggcaatatcctggacatgagagcagcaaccattatatcattcgtatggccctggcatggaaagacaccgtttctgacagagacttgtgttatctgctctagccatatccagtgtgggggcgaaaaccttcgcaggacatttgcgtggtcgattaccaaattaattagggcagggga

SEQ ID NO: 31909 - DNA, 1915 bp, Zea Mays
gccccagcttatacaccagcagtgtgaaaaaataacattgaaagataaatccttgggggattgcaagctttcgctgtgcggttgcggtcgctccccttcccgactccggccagaagcagcgacggtgccggcagccggttactccactcggcggcggcccatcctttcatgttttctcctccagtcctacaaatacaggacacaacacgcttgctcttgtgatactctattaaggtacggcctgaagatgagagtcctcttcatctgaatgttttgcttgaggaactactggtcgcctgcatttgcttcagtaaaggaggggcctgttcgacatcatataaagtttaattgtgtagtggtttgtggtgccaggggtccaagaccgagatatccccgtgtatggaaaactcgtaagaaaattgggactatttccaagtcacagaagcttgttgaatgtattaaaggtctgtctaatgtaaaggaggaagtttatggagcgcttgactcttttgttgcatgggaactggagtttcccttgatagtagtaaagaaggcactgaagaaacttgaagacgaaaaggaatggaaacgaataattcaggtcattaaatggatgttcaacaaaggtcaggggaagacaatggggagctattacaccttgttgaatgctttgatcgaggacggacggattgaggaagcagaagagttatttagaatggtattctcacgatatatggagggtttgcctcgtacatttttcatgagaattatttctttctattacagtgctggagagcatgataagatgttcgagatttttgctgatatggaggaactaggcgtaagaccagatggttctattatcaggatgctaggtgatgtatttcaaaagatagagatgatggacaaatacgaaaagttaaaaaagaaatacccaccaccgaaatgggaatatcgatacatcaaaggcaagcgcattagaattagagtttaccctgatagtaaaactgaagagacggcaaaaggagaccatgacaatgatgaactcggagaggtagaaagtatacagcttgataatgaattggaagaagaagcaagctcaggcctcgacaggagtgtattggacgatgcaacttgtggagaccttgaatatatataattcagagcttccatttggttttttttaatgcctgcttaatcaaagcggcctggagcaaattgaaccggtaacatcctagaacccatgccgttgtacttctaaaacacgggcatcgatatcttcagatctattttacttggattgactagaaactatgtgtcatgcgttttcccatcagcagtccttttcatgacattgtggtgattttaccacgagatgtgttcttcagagttcggttacttgatttatctgattcacaagcatgaggctcatgcttttcttgaaagcttccaaccatgttaaaattgtagcaatggtattaggtacaaacagttatcgtttttcctagtgcttatgatgcgtccatattcctgctttcctcggttgtgctgcagattgagatttttggtgtagccaatttgctactgctgccatgttaggaaatataaaagatcagccctcgtgttcaatggatttacggcagtttatcctcgcgtattctgtcaaatggtctggtaatcctattccattggtacacctacatctgactgcattcctgaacatgtggttgattgttggaggcaatatcctggacatgagagcagcaaccattatatcattcgtatggccctggcatggaaagacaccgtttctgacagagacttgtgttatctgctctagccatatccagtgtgggggcgaaaaccttcgcaggacatttgcgtggtcgattaccaaattaattagggcagggga

SEQ ID NO: 31910 - DNA, 2634 bp, Zea Mays
agccgtgcggttccgttccgttcgaaccccgccgctcgccgcggctcgggcacccgcatttacgccggggcgggcggcatacaccaaccaaccaacgctagccccgagcaagagtaacgtttgtctagtggcaccgctcgccgctcgcctatggttggttccgcgtccgctggcttgcctctctctactagtgattttcgaatttgaatcgcgcactggtccggtcaggtccggtccatcgcgtcggctcctgggagtctgggactggcagccggtgcgtctcgcggtcgcaacctcgcctcgcggtcgcagcctcgccccgatttattaacaggacgacgtgccgcccgggccggctgccttctcacgccgggagggttggggaacgagcgccgcagccgccgccgccaccacgaactcgcggaagaccatgccgagatccaggggcaacgagccgccgctgcggacgtcgcagcgcgcgccgctgcacctcaagacgacggcctgctccgaggcgaatggcgcgcaccaccgccccgtcgccgaccggagtagccccagggtctcgccgcgcagccctctgcccgagaagcgtgcggcgggaacacgtgttgcggagctggagggcaagctggggaaggtgcaggaggagctcaagaagctgcgggagcagctcgcgtccgccgaggccgccaagaaggacgcgcaggtcgcgctcgaggaggccaagaagcgcgtcggtaccaagggaagcccagcctccaccaccaccaccactcctctctcccccccttcgcctggggtcgaaatcgccaagaagaccgaggagctgaagctgcctcagccggcagccgaggaggagagcagcataaacgtcccggcgaccgatgtgtttgaggtcgtccgggccgagtcgggggacaaggagaaccagagcgcggctgaggtctgcgaggtcgttagctgcggcggcggtaaggcggcggtggacgtggccgagaatgaggagacggaggaagaggagactaagaaaatgatcggggaggacaacagcgcggcggtggaatctgacggcgccgacaaggagagcccggaggtcgtggagctgaaggcgaagctggcggagaaggacacggagatcgctgccctcacggcggaaaacgctgagctgaagaagcaggcagaggaggccgcggaggcggcgaagaaggccgaagaggggcccgcgtcgagggcggccaaggccgagcacgaactgaaggagggcgcagcgcgggaggcccgggtgggcgagcagctgcgggcgtcggaggccgcgcgggaggcgctggacggcgagctgcggcgcctgcgcgtgcagaccgagcagtggcgcaaggcggcagaggcggcggccgctgtgctcggcggggacaaccacctcaccggactggccggcaacggctggggctcccccgccacgatgcccgacgacggcgacgacgagggcttcggtggcaagcggaagggcgccggcatccgggtgctcggcgacctgtggaagaggaaggggagcaagtgaaggcctgccgcctgccgcggaatgggacccgtgtcccaaatttcgcaacggtgagctcgctcagcccgcccgcttgccagcttgaacaactccatcccttgcactagcttagctccatcgttttaccgcgttttggttcggagtctacttatgtttgtatgatgatgatgacgatgatgagacgatgctcgtgaggttaaactatgtctgtaacgcttgatcccgctgctgcctgctacctccgcgtaaggagcaaccaagatggcttggtgcttttactgcattgcggcggtgctgttgacgagggagtagatggtgtttattttcatggtggaattgaggaatgcttgattgcagcatcaagaaatgcctcttgtgactctaacgaatcctaagatatcattgcagcgcgtaggatctccggtggcctttagagagagagagagaatcgctggaatcctaaagaggttcatcgtgatacttgctgattgtatggtggctgttcatgatacttccagcctatgaattatgattgcatccgatggatgcaaccagattttgatttgagcagcggattggagcagtatgtcagtagcatcgtcttggtgaatatccataggaccacctgatagttttgactttcaaggtgtccagaatcctaaaacgaagcattctcggcgcagccaactcccaccaggccggcacaagccattttgcgcgccgattgtttgtgtccccatggactcacgtcgtgataacgatgagttcgaagatgttttttttactggagctcaagatggttgaagcaggctcgtcctctcatgccgacggctgccagccgagtgccgacgcccgctgatcggttgcaatcacggacattgaacccgattccattctggaaccacgccaaggcccaagggtaatggcagtgtttccgcataggccggatggcaggttgtggactgggccccattcagtgtactgcctttgtaggttcgttctctgattggacgcgacagcttttggctttctgtactgtaccgctaacctgaaacatggaaaatataatcgtt

SEQ ID NO: 31911 - DNA, 2055 bp, Zea Mays
agccgtgcggttccgttccgttcgaaccccgccgctcgccgcggctcgggcacccgcatttacgccggggcgggcggcatacaccaaccaaccaacgctagccccgagcaagagtaacgtttgtctagtggcaccgctcgccgctcgcctatggacgacgtgccgcccgggccggctgccttctcacgccgggagggttggggaacgagcgccgcagccgccgccgccaccacgaactcgcggaagaccatgccgagatccaggggcaacgagccgccgctgcggacgtcgcagcgcgcgccgctgcacctcaagacgacggcctgctccgaggcgaatggcgcgcaccaccgccccgtcgccgaccggagtagccccagggtctcgccgcgcagccctctgcccgagaagcgtgcggcgggaacacgtgttgcggagctggagggcaagctggggaaggtgcaggaggagctcaagaagctgcgggagcagctcgcgtccgccgaggccgccaagaaggacgcgcaggtcgcgctcgaggaggccaagaagcgcgtcggtaccaagggaagcccagcctccaccaccaccaccactcctctctcccccccttcgcctggggtcgaaatcgccaagaagaccgaggagctgaagctgcctcagccggcagccgaggaggagagcagcataaacgtcccggcgaccgatgtgtttgaggtcgtccgggccgagtcgggggacaaggagaaccagagcgcggctgaggtctgcgaggtcgttagctgcggcggcggtaaggcggcggtggacgtggccgagaatgaggagacggaggaagaggagactaagaaaatgatcggggaggacaacagcgcggcggtggaatctgacggcgccgacaaggagagcccggaggtcgtggagctgaaggcgaagctggcggagaaggacacggagatcgctgccctcacggcggaaaacgctgagctgaagaagccgcggaatgggacccgtgtcccaaatttcgcaacggtgagctcgctcagcccgcccgcttgccagcttgaacaactccatcccttgcactagcttagctccatcgttttaccgcgttttggttcggagtctacttatgtttgtatgatgatgatgacgatgatgagacgatgctcgtgaggttaaactatgtctgtaacgcttgatcccgctgctgcctgctacctccgcgtaaggagcaaccaagatggcttggtgcttttactgcattgcggcggtgctgttgacgagggagtagatggtgtttattttcatggtggaattgaggaatgcttgattgcagcatcaagaaatgcctcttgtgactctaacgaatcctaagatatcattgcagcgcgtaggatctccggtggcctttagagagagagagagaatcgctggaatcctaaagaggttcatcgtgatacttgctgattgtatggtggctgttcatgatacttccagcctatgaattatgattgcatccgatggatgcaaccagattttgatttgagcagcggattggagcagtatgtcagtagcatcgtcttggtgaatatccataggaccacctgatagttttgactttcaaggtgtccagaatcctaaaacgaagcattctcggcgcagccaactcccaccaggccggcacaagccattttgcgcgccgattgtttgtgtccccatggactcacgtcgtgataacgatgagttcgaagatgttttttttactggagctcaagatggttgaagcaggctcgtcctctcatgccgacggctgccagccgagtgccgacgcccgctgatcggttgcaatcacggacattgaacccgattccattctggaaccacgccaaggcccaagggtaatggcagtgtttccgcataggccggatggcaggttgtggactgggccccattcagtgtactgcctttgtaggttcgttctctgattggacgcgacagcttttggctttctgtactgtaccgctaacctgaaacatggaaaatataatcgtt

SEQ ID NO: 31912 - DNA, 856 bp, Zea Mays
aacgagccagctcgagctcggtcgagccgaggggtcgatatccacccctagctgcctggtgcccacgataacccagagacctcgagaacggctggaagaaccgagagcgctccggaaatgtcggcgggtgagctgcggttggagctggacgagctgcggcggctggagagcctcgccaagcacccccgcgtccagatcctcctcgccaacgaaatccgcaacgttgaagcgaagatatatgtttcccttgagggagttgagcaagagaaggtggagactactttcaagccaacatcagtggatataaagtttcatgatgtcaaaggcaagaattaccgggttctaaaggcaactggttagacttgcacttcaaggaagacaagttcaagccaaacatggacaaggaaaaagatccgatgtcaggaattatggacttaatgaagaacatgtacgaggagggcgacgaggatatgaagcgcacaatagccaaagcttggtctgatgccaggtctgggaagacgactgattcgatgagcggattacgttgagctggtataatcagttgatgggcttaagttttctgcgctagcccctgcagccgaagtgtttctgatggttcaaatagcgttgcagtgccttgttggtgttagtccttgtttatcttacatttgtgagtgaagttggacgtgccaaacatatttaaatatatcctcttgaacgggggaaagatcatatcaagtccaagaggttttgtgcttttgtggaattaccacggcgtttctgtttgctacgaaacgatggtagtaacagcttgagccttgccagaaatttcctgtttgtgacgctgtttttaaaa

SEQ ID NO: 31913 - DNA, 994 bp, Zea Mays
aacgagccagctcgagctcggtcgagccgaggggtcgatatccacccctagctgcctggtgcccacgataacccagagacctcgagaacggctggaagaaccgagagcgctccggaaatgtcggcgggtgagctgcggttggagctggacgagctgcggcggctggagagcctcgccaagcacccccgcgtccagatcctcctcgccaacgaaatccgcaacgttgaagcgaagttggcgaaggcaaccgaaccatcgcctgagccactggcggcggcttctgcgccagcgcccgcgcccgctgcgcgtcctgttttaagctacgtcactcttgggtcgttcagctgggagcaggacaacgagaagattaggatatatgtttcccttgagggagttgagcaagagaaggtggagactactttcaagccaacatcagtggatataaagtttcatgatgtcaaaggcaagaattaccgggttctaaaggcaactggttagacttgcacttcaaggaagacaagttcaagccaaacatggacaaggaaaaagatccgatgtcaggaattatggacttaatgaagaacatgtacgaggagggcgacgaggatatgaagcgcacaatagccaaagcttggtctgatgccaggtctgggaagacgactgattcgatgagcggattacgttgagctggtataatcagttgatgggcttaagttttctgcgctagcccctgcagccgaagtgtttctgatggttcaaatagcgttgcagtgccttgttggtgttagtccttgtttatcttacatttgtgagtgaagttggacgtgccaaacatatttaaatatatcctcttgaacgggggaaagatcatatcaagtccaagaggttttgtgcttttgtggaattaccacggcgtttctgtttgctacgaaacgatggtagtaacagcttgagccttgccagaaatttcctgtttgtgacgctgtttttaaaa

SEQ ID NO: 31914 - DNA, 4210 bp, Zea Mays
gtggcttcctcctccccaaattcctctcctcgtgtcctccctcgctaccacgcttgggtgaaatgccctcgccgcctctccctgtgctcgcccaaatcgtcgcctctccctccctgtcgcccctgcgccacggtgcttcacgccgttgaagtcacttcactcatcccgccgatgcagtcgcccacaccgcctcctcccctcctccgctcaagccgcaccgcgacagctacacgccgcgatgtcagctgccagcagcgcccccctcttaacaacgtcgcgacgtcctcgtgggctaaaccccctccatcacttcttcccgtcgagatgcacaacaccgcgagatccatccaccttctccagcacccccacccccgctcaaatggtgtcgcgatgtccgccaccaacagcgccccttcccccctctcaaacaacgtcgcgacgtctgcgagttctgtaaggaatgatgaataactcccagtcgtgattattcttcttcagccttctatccttccgagttctttttggtgcaggtgcatgtggggtcatcttggcacgatgtgcgaccatcgatgaagtagcagctgccttcccacaacgtcactatccgcctcctattgtggcagtcgggtgattgagctttaaccttgaagtcctaggataatggtggcaaacctttcttcaagtgtattagaaatgaatgaaaaacatagtaccggctgacagcggctgcggcgaagctatctgagcggtagcggagtactaaggggtggagagagggagcactgtctcatgcatgaaataaagtctccaaaacaaaagatttggtccagagcgcggccacacgggcccaacaatagcaacgtcacatggtggttgccattgtcacgtcgagctctccctctccaccaactaacagttcctgacggtggagcagaaattcattaagagcatatagggattcacaagtgattttgagcccaacaatcttgctgccatcgatactcctggttcgtatatttggttactcaaaacatgagatgatcctctgaagtagaaagggaaacaccgaatatgctcttgctgaaatattctatagaaagacacaattccattttggcagatgcaagtgtatggttattctactcatggaagatctacagggaagaaattgaggtagcatataactgccgcaagggaaaatatggtgtagcagatgaggatataatcttatatggtcaatgtgtttgaattggtccaaccattgatatttcttcgcggttgctagacttgagagtcgcagttttgcatagtcctatattctatctgcactaagagtaatatatacagccaagcggacgtttggtttaacatttacaaggtatgtttggtccttttgttttttggaattaatggttgtccgatgcttgtcattcatatgagttctaatatcatgcccccttaaagtactcatcatcaaaagtttccatgtgaatgttttaaatgtagatttaaagggttgaaagacatcaaacagttattcaaacatgatcttaagtgtcgtgaaagactacaagtgaggttcaacttggcaaattgtttttctagtaactaaggagcaacaatgctatgtattttagcttgacttatatatctaagtacttacatttttggaatcgggcaaacagtgatagtttgaatcacatgttttgccaaaaggaattattagaactgttcaaaagttaggaaaaaatacatatttatgctttcttatgcacgggtaaattgctctgttcatatataaaaaaaataattgtagtattattgcttatattgattttaaatgatgaccttattagatgtgccatcgagaccacatatattagcattttgtaactaaatacaatgcatgaatatatatagatagcctttacatcgtgctacatgcttcctagaaataaggaaccattacaacatatatatttttgatgatgtacaacttcgtcatcggatataccgttccttcttttttacatacattttgataagaatgtcaaaatgttaaaaaaatagcgcgcgcatggcgcgcgttagacactagtagatttcagaactatcatgaagcgcgtgctcgctggttgttagttgttacagagcaacagcccagggaggccaagatgctacttagctactaaaaccaactgacaacaagtgcacagcccagtgggccgctaagctgcaagaaaaccctcgcccctcgttctggattgagattctctgcagaggctgcgatgttgggccgtcctgccctgcccggtgggtatatgtaagctcagaccgccaccggaaccttctcgagcccgcggccgcacacctccgcccgaagccgccagtcggactacgaacggcggcggcgcctcggctcccctgatctccctcaccggaatggacggccaggctccgccgcttctcgacgccgtcgtgctcgagccccttgcagttggcgacgagctccatccgcggcgtcctgtcgaggtggaggacgctccggccgccgctccgccctccggtatggacggccaggttccacctctctacaacgtcacgcgggatcctctgaccgtatccgacgagctgcagcccacgggcgaggtggtggatgacgccctactcgtcgcgcccgatatcgtcaagggcgaggtgatggaggacgacatcctacccgtcgcaaccgacatcatcaacgacgccgcctcggagtgccccgaggctggcagtgatggcgtcgtgctcaccgacgagctccgcaatcgcatcgtcaagcaggtggagtactatttcagcgatgagaaccttcctacggacgagttcctgctgaattatgtgaagaagaacaataagggctttgttcctattgagatcatcgcatcatttaggagaatgaagaaactcgttcaagacctctcagtaattgaagctgcactcaggacatcatcaaagctggttgtaagttcaaatgggaaacgggtcaggaggttacatccattgccacacaaagaattgaaagattcaaagaaaagcactgttttggtcgaaaatctacctccagatttctcaatggagagtattcaggaaaaattcgcaacagtgggcaaagttgtgaacataacaattaatgatccagaatcagtgaaagaattttcaactgctaagaagcctgacttcaatttaagttttaaggttactgccctaagtgatgagagcaactggagaactgggatgaaagtcaggcttctgtctaaacaaagtgtaatgggaccaggaaagtataaaaaaccttctaaagaaaatcaagatgcagtttccaaaatgattgatcagaatcaacattcaaaagaagaccagcttaaaaccttggaaaagatctccggtgctgatgcagtggggattaccaaggacagagataatttgaaacctgtttttatcactgagactgagcaccaagatcagaagccaaatgctagaggacgaaaaggatggtacaaaggtcaaggtcagatgcagcaaaatgcaaacaaacaaggcagttgtggttccgagtcattaaacaagcctatttctggaccgaggatgccagatggaacaaggggcttcacactgggacgtggtagatctcttccactacagaagtctgagaaggctgaagagtagagctaccaaaaaaggcctgttaagaaccttatccaaagaagctgggtaaaatctaacagaaaacctttgcttttttttttttgaaacttaagatcatcgaagccgttctttgcatggaatgggacacagaagaaagggaatcttggaatggctttctctctgcaagaaatggaacacaaaagggaatctgggaatgacttgtacagaaacacaattgtctgggggtagttccgagttcactcgtatggaacacagtagaacctttgcatgtttcctgacttgcattgtgtcatatactcgtatcatgctgcatgcagcattgcagccctgtttgcaatttcagcagccgggggctggggccgtgagcccgtgaccctgcaccatccgggtctaccacgagcccccctgttctgcgaggcgtttggcccctcatccctatggatctgtactctgtaggctctccttataacgcatgattgggattgaaaaacacattgaatag

SEQ ID NO: 31915 - DNA, 3997 bp, Zea Mays
gtggcttcctcctccccaaattcctctcctcgtgtcctccctcgctaccacgcttgggtgaaatgccctcgccgcctctccctgtgctcgcccaaatcgtcgcctctccctccctgtcgcccctgcgccacggtgcttcacgccgttgaagtcacttcactcatcccgccgatgcagtcgcccacaccgcctcctcccctcctccgctcaagccgcaccgcgacagctacacgccgcgatgtcagctgccagcagcgcccccctcttaacaacgtcgcgacgtcctcgtgggctaaaccccctccatcacttcttcccgtcgagatgcacaacaccgcgagatccatccaccttctccagcacccccacccccgctcaaatggtgtcgcgatgtccgccaccaacagcgccccttcccccctctcaaacaacgtcgcgacgtctgcgagttctgtgcatgtggggtcatcttggcacgatgtgcgaccatcgatgaagtagcagctgccttcccacaacgtcactatccgcctcctattgtggcagtcgggtgattgagctttaaccttgaagtcctaggataatggtggcaaacctttcttcaagtgtattagaaatgaatgaaaaacatagtaccggctgacagcggctgcggcgaagctatctgagcggtagcggagtactaaggggtggagagagggagcactgtctcatgcatgaaataaagtctccaaaacaaaagatttggtccagagcgcggccacacgggcccaacaatagcaacgtcacatggtggttgccattgtcacgtcgagctctccctctccaccaactaacagttcctgacggtggagcagaaattcattaagagcatatagggattcacaagtgattttgagcccaacaatcttgctgccatcgatactcctgatgcaagtgtatggttattctactcatggaagatctacagggaagaaattgaggtagcatataactgccgcaagggaaaatatggtgtagcagatgaggatataatcttatatggtcaatgtgtttgaattggtccaaccattgatatttcttcgcggttgctagacttgagagtcgcagttttgcatagtcctatattctatctgcactaagagtaatatatacagccaagcggacgtttggtttaacatttacaaggtatgtttggtccttttgttttttggaattaatggttgtccgatgcttgtcattcatatgagttctaatatcatgcccccttaaagtactcatcatcaaaagtttccatgtgaatgttttaaatgtagatttaaagggttgaaagacatcaaacagttattcaaacatgatcttaagtgtcgtgaaagactacaagtgaggttcaacttggcaaattgtttttctagtaactaaggagcaacaatgctatgtattttagcttgacttatatatctaagtacttacatttttggaatcgggcaaacagtgatagtttgaatcacatgttttgccaaaaggaattattagaactgttcaaaagttaggaaaaaatacatatttatgctttcttatgcacgggtaaattgctctgttcatatataaaaaaaataattgtagtattattgcttatattgattttaaatgatgaccttattagatgtgccatcgagaccacatatattagcattttgtaactaaatacaatgcatgaatatatatagatagcctttacatcgtgctacatgcttcctagaaataaggaaccattacaacatatatatttttgatgatgtacaacttcgtcatcggatataccgttccttcttttttacatacattttgataagaatgtcaaaatgttaaaaaaatagcgcgcgcatggcgcgcgttagacactagtagatttcagaactatcatgaagcgcgtgctcgctggttgttagttgttacagagcaacagcccagggaggccaagatgctacttagctactaaaaccaactgacaacaagtgcacagcccagtgggccgctaagctgcaagaaaaccctcgcccctcgttctggattgagattctctgcagaggctgcgatgttgggccgtcctgccctgcccggtgggtatatgtaagctcagaccgccaccggaaccttctcgagcccgcggccgcacacctccgcccgaagccgccagtcggactacgaacggcggcggcgcctcggctcccctgatctccctcaccggaatggacggccaggctccgccgcttctcgacgccgtcgtgctcgagccccttgcagttggcgacgagctccatccgcggcgtcctgtcgaggtggaggacgctccggccgccgctccgccctccgcccacgggcgaggtggtggatgacgccctactcgtcgcgcccgatatcgtcaagggcgaggtgatggaggacgacatcctacccgtcgcaaccgacatcatcaacgacgccgcctcggagtgccccgaggctggcagtgatggcgtcgtgctcaccgacgagctccgcaatcgcatcgtcaagcaggtggagtactatttcagcgatgagaaccttcctacggacgagttcctgctgaattatgtgaagaagaacaataagggctttgttcctattgagatcatcgcatcatttaggagaatgaagaaactcgttcaagacctctcagtaattgaagctgcactcaggacatcatcaaagctggttgtaagttcaaatgggaaacgggtcaggaggttacatccattgccacacaaagaattgaaagattcaaagaaaagcactgttttggtcgaaaatctacctccagatttctcaatggagagtattcaggaaaaattcgcaacagtgggcaaagttgtgaacataacaattaatgatccagaatcagtgaaagaattttcaactgctaagaagcctgacttcaatttaagttttaaggctcatgtacttgttgaatatgaagcagtggaggctgctgagaaggctgttactgccctaagtgatgagagcaactggagaactgggatgaaagtcaggcttctgtctaaacaaagtgtaatgggaccaggaaagtataaaaaaccttctaaagaaaatcaagatgcagtttccaaaatgattgatcagaatcaacattcaaaagaagaccagcttaaaaccttggaaaagatctccggtgctgatgcagtggggattaccaaggacagagataatttgaaacctgtttttatcactgagactgagcaccaagatcagaagccaaatgctagaggacgaaaaggatggtacaaaggtcaaggtcagatgcagcaaaatgcaaacaaacaaggcagttgtggttccgagtcattaaacaagcctatttctggaccgaggatgccagatggaacaaggggcttcacactgggacgtggtagatctcttccactacagaagtctgagaaggctgaagagtagagctaccaaaaaaggcctgttaagaaccttatccaaagaagctgggtaaaatctaacagaaaacctttgcttttttttttttgaaacttaagatcatcgaagccgttctttgcatggaatgggacacagaagaaagggaatcttggaatggctttctctctgcaagaaatggaacacaaaagggaatctgggaatgacttgtacagaaacacaattgtctgggggtagttccgagttcactcgtatggaacacagtagaacctttgcatgtttcctgacttgcattgtgtcatatactcgtatcatgctgcatgcagcattgcagccctgtttgcaatttcagcagccgggggctggggccgtgagcccgtgaccctgcaccatccgggtctaccacgagcccccctgttctgcgaggcgtttggcccctcatccctatggatctgtactctgtaggctctccttataacgcatgattgggattgaaaaacacattgaatag

SEQ ID NO: 31916 - DNA, 3955 bp, Zea Mays
gtggcttcctcctccccaaattcctctcctcgtgtcctccctcgctaccacgcttgggtgaaatgccctcgccgcctctccctgtgctcgcccaaatcgtcgcctctccctccctgtcgcccctgcgccacggtgcttcacgccgttgaagtcacttcactcatcccgccgatgcagtcgcccacaccgcctcctcccctcctccgctcaagccgcaccgcgacagctacacgccgcgatgtcagctgccagcagcgcccccctcttaacaacgtcgcgacgtcctcgtgggctaaaccccctccatcacttcttcccgtcgagatgcacaacaccgcgagatccatccaccttctccagcacccccacccccgctcaaatggtgtcgcgatgtccgccaccaacagcgccccttcccccctctcaaacaacgtcgcgacgtctgcgagttctagtaccggctgacagcggctgcggcgaagctatctgagcggtagcggagtactaaggggtggagagagggagcactgtctcatgcatgaaataaagtctccaaaacaaaagatttggtccagagcgcggccacacgggcccaacaatagcaacgtcacatggtggttgccattgtcacgtcgagctctccctctccaccaactaacagttcctgacggtggagcagaaattcattaagagcatatagggattcacaagtgattttgagcccaacaatcttgctgccatcgatactcctggttcgtatatttggttactcaaaacatgagatgatcctctgaagtagaaagggaaacaccgaatatgctcttgctgaaatattctatagaaagacacaattccattttggcagatgcaagtgtatggttattctactcatggaagatctacagggaagaaattgaggtagcatataactgccgcaagggaaaatatggtgtagcagatgaggatataatcttatatggtcaatgtgtttgaattggtccaaccattgatatttcttcgcggttgctagacttgagagtcgcagttttgcatagtcctatattctatctgcactaagagtaatatatacagccaagcggacgtttggtttaacatttacaaggtatgtttggtccttttgttttttggaattaatggttgtccgatgcttgtcattcatatgagttctaatatcatgcccccttaaagtactcatcatcaaaagtttccatgtgaatgttttaaatgtagatttaaagggttgaaagacatcaaacagttattcaaacatgatcttaagtgtcgtgaaagactacaagtgaggttcaacttggcaaattgtttttctagtaactaaggagcaacaatgctatgtattttagcttgacttatatatctaagtacttacatttttggaatcgggcaaacagtgatagtttgaatcacatgttttgccaaaaggaattattagaactgttcaaaagttaggaaaaaatacatatttatgctttcttatgcacgggtaaattgctctgttcatatataaaaaaaataattgtagtattattgcttatattgattttaaatgatgaccttattagatgtgccatcgagaccacatatattagcattttgtaactaaatacaatgcatgaatatatatagatagcctttacatcgtgctacatgcttcctagaaataaggaaccattacaacatatatatttttgatgatgtacaacttcgtcatcggatataccgttccttcttttttacatacattttgataagaatgtcaaaatgttaaaaaaatagcgcgcgcatggcgcgcgttagacactagtagatttcagaactatcatgaagcgcgtgctcgctggttgttagttgttacagagcaacagcccagggaggccaagatgctacttagctactaaaaccaactgacaacaagtgcacagcccagtgggccgctaagctgcaagaaaaccctcgcccctcgttctggattgagattctctgcagaggctgcgatgttgggccgtcctgccctgcccggtgggtatatgtaagctcagaccgccaccggaaccttctcgagcccgcggccgcacacctccgcccgaagccgccagtcggactacgaacggcggcggcgcctcggctcccctgatctccctcaccggaatggacggccaggctccgccgcttctcgacgccgtcgtgctcgagccccttgcagttggcgacgagctccatccgcggcgtcctgtcgaggtggaggacgctccggccgccgctccgccctccggtatggacggccaggttccacctctctacaacgtcacgcgggatcctctgaccgtatccgacgagctgcagcccacgggcgaggtggtggatgacgccctactcgtcgcgcccgatatcgtcaagggcgaggtgatggaggacgacatcctacccgtcgcaaccgacatcatcaacgacgccgcctcggagtgccccgaggctggcagtgatggcgtcgtgctcaccgacgagctccgcaatcgcatcgtcaagcaggtggagtactatttcagcgatgagaaccttcctacggacgagttcctgctgaattatgtgaagaagaacaataagggctttgttcctattgagatcatcgcatcatttaggagaatgaagaaactcgttcaagacctctcagtaattgaagctgcactcaggacatcatcaaagctggttgtaagttcaaatgggaaacgggtcaggaggttacatccattgccacacaaagaattgaaagattcaaagaaaagcactgttttggtcgaaaatctacctccagatttctcaatggagagtattcaggaaaaattcgcaacagtgggcaaagttgtgaacataacaattaatgatccagaatcagtgaaagaattttcaactgctaagaagcctgacttcaatttaagttttaaggttactgccctaagtgatgagagcaactggagaactgggatgaaagtcaggcttctgtctaaacaaagtgtaatgggaccaggaaagtataaaaaaccttctaaagaaaatcaagatgcagtttccaaaatgattgatcagaatcaacattcaaaagaagaccagcttaaaaccttggaaaagatctccggtgctgatgcagtggggattaccaaggacagagataatttgaaacctgtttttatcactgagactgagcaccaagatcagaagccaaatgctagaggacgaaaaggatggtacaaaggtcaaggtcagatgcagcaaaatgcaaacaaacaaggcagttgtggttccgagtcattaaacaagcctatttctggaccgaggatgccagatggaacaaggggcttcacactgggacgtggtagatctcttccactacagaagtctgagaaggctgaagagtagagctaccaaaaaaggcctgttaagaaccttatccaaagaagctgggtaaaatctaacagaaaacctttgcttttttttttttgaaacttaagatcatcgaagccgttctttgcatggaatgggacacagaagaaagggaatcttggaatggctttctctctgcaagaaatggaacacaaaagggaatctgggaatgacttgtacagaaacacaattgtctgggggtagttccgagttcactcgtatggaacacagtagaacctttgcatgtttcctgacttgcattgtgtcatatactcgtatcatgctgcatgcagcattgcagccctgtttgcaatttcagcagccgggggctggggccgtgagcccgtgaccctgcaccatccgggtctaccacgagcccccctgttctgcgaggcgtttggcccctcatccctatggatctgtactctgtaggctctccttataacgcatgattgggattgaaaaacacattgaatag

SEQ ID NO: 31917 - DNA, 4003 bp, Zea Mays
gtggcttcctcctccccaaattcctctcctcgtgtcctccctcgctaccacgcttgggtgaaatgccctcgccgcctctccctgtgctcgcccaaatcgtcgcctctccctccctgtcgcccctgcgccacggtgcttcacgccgttgaagtcacttcactcatcccgccgatgcagtcgcccacaccgcctcctcccctcctccgctcaagccgcaccgcgacagctacacgccgcgatgtcagctgccagcagcgcccccctcttaacaacgtcgcgacgtcctcgtgggctaaaccccctccatcacttcttcccgtcgagatgcacaacaccgcgagatccatccaccttctccagcacccccacccccgctcaaatggtgtcgcgatgtccgccaccaacagcgccccttcccccctctcaaacaacgtcgcgacgtctgcgagttctagtaccggctgacagcggctgcggcgaagctatctgagcggtagcggagtactaaggggtggagagagggagcactgtctcatgcatgaaataaagtctccaaaacaaaagatttggtccagagcgcggccacacgggcccaacaatagcaacgtcacatggtggttgccattgtcacgtcgagctctccctctccaccaactaacagttcctgacggtggagcagaaattcattaagagcatatagggattcacaagtgattttgagcccaacaatcttgctgccatcgatactcctggttcgtatatttggttactcaaaacatgagatgatcctctgaagtagaaagggaaacaccgaatatgctcttgctgaaatattctatagaaagacacaattccattttggcagatgcaagtgtatggttattctactcatggaagatctacagggaagaaattgaggtagcatataactgccgcaagggaaaatatggtgtagcagatgaggatataatcttatatggtcaatgtgtttgaattggtccaaccattgatatttcttcgcggttgctagacttgagagtcgcagttttgcatagtcctatattctatctgcactaagagtaatatatacagccaagcggacgtttggtttaacatttacaaggtatgtttggtccttttgttttttggaattaatggttgtccgatgcttgtcattcatatgagttctaatatcatgcccccttaaagtactcatcatcaaaagtttccatgtgaatgttttaaatgtagatttaaagggttgaaagacatcaaacagttattcaaacatgatcttaagtgtcgtgaaagactacaagtgaggttcaacttggcaaattgtttttctagtaactaaggagcaacaatgctatgtattttagcttgacttatatatctaagtacttacatttttggaatcgggcaaacagtgatagtttgaatcacatgttttgccaaaaggaattattagaactgttcaaaagttaggaaaaaatacatatttatgctttcttatgcacgggtaaattgctctgttcatatataaaaaaaataattgtagtattattgcttatattgattttaaatgatgaccttattagatgtgccatcgagaccacatatattagcattttgtaactaaatacaatgcatgaatatatatagatagcctttacatcgtgctacatgcttcctagaaataaggaaccattacaacatatatatttttgatgatgtacaacttcgtcatcggatataccgttccttcttttttacatacattttgataagaatgtcaaaatgttaaaaaaatagcgcgcgcatggcgcgcgttagacactagtagatttcagaactatcatgaagcgcgtgctcgctggttgttagttgttacagagcaacagcccagggaggccaagatgctacttagctactaaaaccaactgacaacaagtgcacagcccagtgggccgctaagctgcaagaaaaccctcgcccctcgttctggattgagattctctgcagaggctgcgatgttgggccgtcctgccctgcccggtgggtatatgtaagctcagaccgccaccggaaccttctcgagcccgcggccgcacacctccgcccgaagccgccagtcggactacgaacggcggcggcgcctcggctcccctgatctccctcaccggaatggacggccaggctccgccgcttctcgacgccgtcgtgctcgagccccttgcagttggcgacgagctccatccgcggcgtcctgtcgaggtggaggacgctccggccgccgctccgccctccggtatggacggccaggttccacctctctacaacgtcacgcgggatcctctgaccgtatccgacgagctgcagcccacgggcgaggtggtggatgacgccctactcgtcgcgcccgatatcgtcaagggcgaggtgatggaggacgacatcctacccgtcgcaaccgacatcatcaacgacgccgcctcggagtgccccgaggctggcagtgatggcgtcgtgctcaccgacgagctccgcaatcgcatcgtcaagcaggtggagtactatttcagcgatgagaaccttcctacggacgagttcctgctgaattatgtgaagaagaacaataagggctttgttcctattgagatcatcgcatcatttaggagaatgaagaaactcgttcaagacctctcagtaattgaagctgcactcaggacatcatcaaagctggttgtaagttcaaatgggaaacgggtcaggaggttacatccattgccacacaaagaattgaaagattcaaagaaaagcactgttttggtcgaaaatctacctccagatttctcaatggagagtattcaggaaaaattcgcaacagtgggcaaagttgtgaacataacaattaatgatccagaatcagtgaaagaattttcaactgctaagaagcctgacttcaatttaagttttaaggctcatgtacttgttgaatatgaagcagtggaggctgctgagaaggctgttactgccctaagtgatgagagcaactggagaactgggatgaaagtcaggcttctgtctaaacaaagtgtaatgggaccaggaaagtataaaaaaccttctaaagaaaatcaagatgcagtttccaaaatgattgatcagaatcaacattcaaaagaagaccagcttaaaaccttggaaaagatctccggtgctgatgcagtggggattaccaaggacagagataatttgaaacctgtttttatcactgagactgagcaccaagatcagaagccaaatgctagaggacgaaaaggatggtacaaaggtcaaggtcagatgcagcaaaatgcaaacaaacaaggcagttgtggttccgagtcattaaacaagcctatttctggaccgaggatgccagatggaacaaggggcttcacactgggacgtggtagatctcttccactacagaagtctgagaaggctgaagagtagagctaccaaaaaaggcctgttaagaaccttatccaaagaagctgggtaaaatctaacagaaaacctttgcttttttttttttgaaacttaagatcatcgaagccgttctttgcatggaatgggacacagaagaaagggaatcttggaatggctttctctctgcaagaaatggaacacaaaagggaatctgggaatgacttgtacagaaacacaattgtctgggggtagttccgagttcactcgtatggaacacagtagaacctttgcatgtttcctgacttgcattgtgtcatatactcgtatcatgctgcatgcagcattgcagccctgtttgcaatttcagcagccgggggctggggccgtgagcccgtgaccctgcaccatccgggtctaccacgagcccccctgttctgcgaggcgtttggcccctcatccctatggatctgtactctgtaggctctccttataacgcatgattgggattgaaaaacacattgaatag

SEQ ID NO: 31918 - DNA, 4244 bp, Zea Mays
cttcctcctccccaaattcctctcctcgtgtcctccctcgctaccacgcttgggtgaaatgccctcgccgcctctccctgtgctcgcccaaatcgtcgcctctccctccctgtcgcccctgcgccacggtgcttcacgccgttgaagtcacttcactcatcccgccgatgcagtcgcccacaccgcctcctcccctcctccgctcaagccgcaccgcgacagctacacgccgcgatgtcagctgccagcagcgcccccctcttaacaacgtcgcgacgtcctcgtgggctaaaccccctccatcacttcttcccgtcgagatgcacaacaccgcgagatccatccaccttctccagcacccccacccccgctcaaatggtgtcgcgatgtccgccaccaacagcgccccttcccccctctcaaacaacgtcgcgacgtctgcgagttctgtaaggaatgatgaataactcccagtcgtgattattcttcttcagccttctatccttccgagttctttttggtgcaggtgcatgtggggtcatcttggcacgatgtgcgaccatcgatgaagtagcagctgccttcccacaacgtcactatccgcctccttcgggtgattgagctttaaccttgaagtcctaggataatggtggcaaacctttcttcaagtgtattagaaatgaatgaaaaacatagtaccggctgacagcggctgcggcgaagctatctgagcggtagcggagtactaaggggtggagagagggagcactgtctcatgcatgaaataaagtctccaaaacaaaagatttggtccagagcgcggccacacgggcccaacaatagcaacgtcacatggtggttgccattgtcacgtcgagctctccctctccaccaactaacagttcctgacggtggagcagaaattcattaagagcatatagggattcacaagtgattttgagcccaacaatcttgctgccatcgatactcctggttcgtatatttggttactcaaaacatgagatgatcctctgaagtagaaagggaaacaccgaatatgctcttgctgaaatattctatagaaagacacaattccattttggcagatgcaagtgtatggttattctactcatggaagatctacagggaagaaattgaggtagcatataactgccgcaagggaaaatatggtgtagcagatgaggatataatcttatatggtcaatgtgtttgaattggtccaaccattgatatttcttcgcggttgctagacttgagagtcgcagttttgcatagtcctatattctatctgcactaagagtaatatatacagccaagcggacgtttggtttaacatttacaaggtatgtttggtccttttgttttttggaattaatggttgtccgatgcttgtcattcatatgagttctaatatcatgcccccttaaagtactcatcatcaaaagtttccatgtgaatgttttaaatgtagatttaaagggttgaaagacatcaaacagttattcaaacatgatcttaagtgtcgtgaaagactacaagtgaggttcaacttggcaaattgtttttctagtaactaaggagcaacaatgctatgtattttagcttgacttatatatctaagtacttacatttttggaatcgggcaaacagtgatagtttgaatcacatgttttgccaaaaggaattattagaactgttcaaaagttaggaaaaaatacatatttatgctttcttatgcacgggtaaattgctctgttcatatataaaaaaaataattgtagtattattgcttatattgattttaaatgatgaccttattagatgtgccatcgagaccacatatattagcattttgtaactaaatacaatgcatgaatatatatagatagcctttacatcgtgctacatgcttcctagaaataaggaaccattacaacatatatatttttgatgatgtacaacttcgtcatcggatataccgttccttcttttttacatacattttgataagaatgtcaaaatgttaaaaaaatagcgcgcgcatggcgcgcgttagacactagtagatttcagaactatcatgaagcgcgtgctcgctggttgttagttgttacagagcaacagcccagggaggccaagatgctacttagctactaaaaccaactgacaacaagtgcacagcccagtgggccgctaagctgcaagaaaaccctcgcccctcgttctggattgagattctctgcagaggctgcgatgttgggccgtcctgccctgcccggtgggtatatgtaagctcagaccgccaccggaaccttctcgagcccgcggccgcacacctccgcccgaagccgccagtcggactacgaacggcggcggcgcctcggctcccctgatctccctcaccggaatggacggccaggctccgccgcttctcgacgccgtcgtgctcgagccccttgcagttggcgacgagctccatccgcggcgtcctgtcgaggtggaggacgctccggccgccgctccgccctccggtatggacggccaggttccacctctctacaacgtcacgcgggatcctctgaccgtatccgacgagctgcagcccacgggcgaggtggtggatgacgccctactcgtcgcgcccgatatcgtcaagggcgaggtgatggaggacgacatcctacccgtcgcaaccgacatcatcaacgacgccgcctcggagtgccccgaggctggcagtgatggcgtcgtgctcaccgacgagctccgcaatcgcatcgtcaagcaggtggagtactatttcagcgatgagaaccttcctacggacgagttcctgctgaattatgtgaagaagaacaataagggctttgttcctattgagatcatcgcatcatttaggagaatgaagaaactcgttcaagacctctcagtaattgaagctgcactcaggacatcatcaaagctggttgtaagttcaaatgggaaacgggtcaggaggttacatccattgccacacaaagaattgaaagattcaaagaaaagcactgttttggtcgaaaatctacctccagatttctcaatggagagtattcaggaaaaattcgcaacagtgggcaaagttgtgaacataacaattaatgatccagaatcagtgaaagaattttcaactgctaagaagcctgacttcaatttaagttttaaggctcatgtacttgttgaatatgaagcagtggaggctgctgagaaggctgttactgccctaagtgatgagagcaactggagaactgggatgaaagtcaggcttctgtctaaacaaagtgtaatgggaccaggaaagtataaaaaaccttctaaagaaaatcaagatgcagtttccaaaatgattgatcagaatcaacattcaaaagaagaccagcttaaaaccttggaaaagatctccggtgctgatgcagtggggattaccaaggacagagataatttgaaacctgtttttatcactgagactgagcaccaagatcagaagccaaatgctagaggacgaaaaggatggtacaaaggtcaaggtcagatgcagcaaaatgcaaacaaacaaggcagttgtggttccgagtcattaaacaagcctatttctggaccgaggatgccagatggaacaaggggcttcacactgggacgtggtagatctcttccactacagaagtctgagaaggctgaagagtagagctaccaaaaaaggcctgttaagaaccttatccaaagaagctgggtaaaatctaacagaaaacctttgcttttttttttttgaaacttaagatcatcgaagccgttctttgcatggaatgggacacagaagaaagggaatcttggaatggctttctctctgcaagaaatggaacacaaaagggaatctgggaatgacttgtacagaaacacaattgtctgggggtagttccgagttcactcgtatggaacacagtagaacctttgcatgtttcctgacttgcattgtgtcatatactcgtatcatgctgcatgcagcattgcagccctgtttgcaatttcagcagccgggggctggggccgtgagcccgtgaccctgcaccatccgggtctaccacgagcccccctgttctgcgaggcgtttggcccctcatccctatggatctgtactctgtaggctctccttataacgcatgattgggattgaaaaacacattgaatag

SEQ ID NO: 31919 - DNA, 4140 bp, Zea Mays
cttcctcctccccaaattcctctcctcgtgtcctccctcgctaccacgcttgggtgaaatgccctcgccgcctctccctgtgctcgcccaaatcgtcgcctctccctccctgtcgcccctgcgccacggtgcttcacgccgttgaagtcacttcactcatcccgccgatgcagtcgcccacaccgcctcctcccctcctccgctcaagccgcaccgcgacagctacacgccgcgatgtcagctgccagcagcgcccccctcttaacaacgtcgcgacgtcctcgtgggctaaaccccctccatcacttcttcccgtcgagatgcacaacaccgcgagatccatccaccttctccagcacccccacccccgctcaaatggtgtcgcgatgtccgccaccaacagcgccccttcccccctctcaaacaacgtcgcgacgtctgcgagttctgtgcatgtggggtcatcttggcacgatgtgcgaccatcgatgaagtagcagctgccttcccacaacgtcactatccgcctccttcctaggataatggtggcaaacctttcttcaagtgtattagaaatgaatgaaaaacatagtaccggctgacagcggctgcggcgaagctatctgagcggtagcggagtactaaggggtggagagagggagcactgtctcatgcatgaaataaagtctccaaaacaaaagatttggtccagagcgcggccacacgggcccaacaatagcaacgtcacatggtggttgccattgtcacgtcgagctctccctctccaccaactaacagttcctgacggtggagcagaaattcattaagagcatatagggattcacaagtgattttgagcccaacaatcttgctgccatcgatactcctggttcgtatatttggttactcaaaacatgagatgatcctctgaagtagaaagggaaacaccgaatatgctcttgctgaaatattctatagaaagacacaattccattttggcagatgcaagtgtatggttattctactcatggaagatctacagggaagaaattgaggtagcatataactgccgcaagggaaaatatggtgtagcagatgaggatataatcttatatggtcaatgtgtttgaattggtccaaccattgatatttcttcgcggttgctagacttgagagtcgcagttttgcatagtcctatattctatctgcactaagagtaatatatacagccaagcggacgtttggtttaacatttacaaggtatgtttggtccttttgttttttggaattaatggttgtccgatgcttgtcattcatatgagttctaatatcatgcccccttaaagtactcatcatcaaaagtttccatgtgaatgttttaaatgtagatttaaagggttgaaagacatcaaacagttattcaaacatgatcttaagtgtcgtgaaagactacaagtgaggttcaacttggcaaattgtttttctagtaactaaggagcaacaatgctatgtattttagcttgacttatatatctaagtacttacatttttggaatcgggcaaacagtgatagtttgaatcacatgttttgccaaaaggaattattagaactgttcaaaagttaggaaaaaatacatatttatgctttcttatgcacgggtaaattgctctgttcatatataaaaaaaataattgtagtattattgcttatattgattttaaatgatgaccttattagatgtgccatcgagaccacatatattagcattttgtaactaaatacaatgcatgaatatatatagatagcctttacatcgtgctacatgcttcctagaaataaggaaccattacaacatatatatttttgatgatgtacaacttcgtcatcggatataccgttccttcttttttacatacattttgataagaatgtcaaaatgttaaaaaaatagcgcgcgcatggcgcgcgttagacactagtagatttcagaactatcatgaagcgcgtgctcgctggttgttagttgttacagagcaacagcccagggaggccaagatgctacttagctactaaaaccaactgacaacaagtgcacagcccagtgggccgctaagctgcaagaaaaccctcgcccctcgttctggattgagattctctgcagaggctgcgatgttgggccgtcctgccctgcccggtgggtatatgtaagctcagaccgccaccggaaccttctcgagcccgcggccgcacacctccgcccgaagccgccagtcggactacgaacggcggcggcgcctcggctcccctgatctccctcaccggaatggacggccaggctccgccgcttctcgacgccgtcgtgctcgagccccttgcagttggcgacgagctccatccgcggcgtcctgtcgaggtggaggacgctccggccgccgctccgccctccggtatggacggccaggttccacctctctacaacgtcacgcgggatcctctgaccgtatccgacgagctgcagcccacgggcgaggtggtggatgacgccctactcgtcgcgcccgatatcgtcaagggcgaggtgatggaggacgacatcctacccgtcgcaaccgacatcatcaacgacgccgcctcggagtgccccgaggctggcagtgatggcgtcgtgctcaccgacgagctccgcaatcgcatcgtcaagcaggtggagtactatttcagcgatgagaaccttcctacggacgagttcctgctgaattatgtgaagaagaacaataagggctttgttcctattgagatcatcgcatcatttaggagaatgaagaaactcgttcaagacctctcagtaattgaagctgcactcaggacatcatcaaagctggttgtaagttcaaatgggaaacgggtcaggaggttacatccattgccacacaaagaattgaaagattcaaagaaaagcactgttttggtcgaaaatctacctccagatttctcaatggagagtattcaggaaaaattcgcaacagtgggcaaagttgtgaacataacaattaatgatccagaatcagtgaaagaattttcaactgctaagaagcctgacttcaatttaagttttaaggctcatgtacttgttgaatatgaagcagtggaggctgctgagaaggctgttactgccctaagtgatgagagcaactggagaactgggatgaaagtcaggcttctgtctaaacaaagtgtaatgggaccaggaaagtataaaaaaccttctaaagaaaatcaagatgcagtttccaaaatgattgatcagaatcaacattcaaaagaagaccagcttaaaaccttggaaaagatctccggtgctgatgcagtggggattaccaaggacagagataatttgaaacctgtttttatcactgagactgagcaccaagatcagaagccaaatgctagaggacgaaaaggatggtacaaaggtcaaggtcagatgcagcaaaatgcaaacaaacaaggcagttgtggttccgagtcattaaacaagcctatttctggaccgaggatgccagatggaacaaggggcttcacactgggacgtggtagatctcttccactacagaagtctgagaaggctgaagagtagagctaccaaaaaaggcctgttaagaaccttatccaaagaagctgggtaaaatctaacagaaaacctttgcttttttttttttgaaacttaagatcatcgaagccgttctttgcatggaatgggacacagaagaaagggaatcttggaatggctttctctctgcaagaaatggaacacaaaagggaatctgggaatgacttgtacagaaacacaattgtctgggggtagttccgagttcactcgtatggaacacagtagaacctttgcatgtttcctgacttgcattgtgtcatatactcgtatcatgctgcatgcagcattgcagccctgtttgcaatttcagcagccgggggctggggccgtgagcccgtgaccctgcaccatccgggtctaccacgagcccccctgttctgcgaggcgtttggcccctcatccctatggatctgtactctgtaggctctccttataacgcatgattgggattgaaaaacacattgaatag

SEQ ID NO: 31920 - DNA, 3113 bp, Zea Mays
tcctcctccccaaattcctctcctcgtgtcctccctcgctaccacgcttgggtgaaatgccctcgccgcctctccctgtgctcgcccaaatcgtcgcctctccctccctgtcgcccctgcgccacggtgcttcacgccgttgaagtcacttcactcatcccgccgatgcagtcgcccacaccgcctcctcccctcctccgctcaagccgcaccgcgacagctacacgccgcgatgtcagctgccagcagcgcccccctcttaacaacgtcgcgacgtcctcgtgggctaaaccccctccatcacttcttcccgtcgagatgcacaacaccgcgagatccatccaccttctccagcacccccacccccgctcaaatggtgtcgcgatgtccgccaccaacagcgccccttcccccctctcaaacaacgtcgcgacgtctgcgagttctagtaccggctgacagcggctgcggcgaagctatctgagcggtagcggagtactaaggggtggagagagggagcactgtctcatgcatgaaataaagtctccaaaacaaaagatttggtccagagcgcggccacacgggcccaacaatagcaacgtcacatggtggttgccattgtcacgtcgagctctccctctccaccaactaacagttcctgacggtggagcagaaattcattaagagcatatagggattcacaagtgattttgagcccaacaatcttgctgccatcgatactcctggttcgtatatttggttactcaaaacatgagatgatcctctgaagtagaaagggaaacaccgaatatgctcttgctgaaatattctatagaaagacacaattccattttggcagatgcaagtgtatggttattctactcatggaagatctacagggaagttgttacagagcaacagcccagggaggccaagatgctacttagctactaaaaccaactgacaacaagtgcacagcccagtgggccgctaagctgcaagaaaaccctcgcccctcgttctggattgagattctctgcagaggctgcgatgttgggccgtcctgccctgcccggtgggtatatgtaagctcagaccgccaccggaaccttctcgagcccgcggccgcacacctccgcccgaagccgccagtcggactacgaacggcggcggcgcctcggctcccctgatctccctcaccggaatggacggccaggctccgccgcttctcgacgccgtcgtgctcgagccccttgcagttggcgacgagctccatccgcggcgtcctgtcgaggtggaggacgctccggccgccgctccgccctccggtatggacggccaggttccacctctctacaacgtcacgcgggatcctctgaccgtatccgacgagctgcagcccacgggcgaggtggtggatgacgccctactcgtcgcgcccgatatcgtcaagggcgaggtgatggaggacgacatcctacccgtcgcaaccgacatcatcaacgacgccgcctcggagtgccccgaggctggcagtgatggcgtcgtgctcaccgacgagctccgcaatcgcatcgtcaagcaggtggagtactatttcagcgatgagaaccttcctacggacgagttcctgctgaattatgtgaagaagaacaataagggctttggatgtgaattttatgattattatagtggtgtcagggacaatgtatttggtgttcctgttcttagtttttttagccgagactcaaattttacacaagcttatgcttttattgtgtgtgtttctgcattagatattggtgcatttcctattgagatcatcgcatcatttaggagaatgaagaaactcgttcaagacctctcagtaattgaagctgcactcaggacatcatcaaagctggttgtaagttcaaatgggaaacgggtcaggaggttacatccattgccacacaaagaattgaaagattcaaagaaaagcactgttttggtcgaaaatctacctccagatttctcaatggagagtattcaggaaaaattcgcaacagtgggcaaagttgtgaacataacaattaatgatccagaatcagtgaaagaattttcaactgctaagaagcctgacttcaatttaagttttaaggttactgccctaagtgatgagagcaactggagaactgggatgaaagtcaggcttctgtctaaacaaagtgtaatgggaccaggaaagtataaaaaaccttctaaagaaaatcaagatgcagtttccaaaatgattgatcagaatcaacattcaaaagaagaccagcttaaaaccttggaaaagatctccggtgctgatgcagtggggattaccaaggacagagataatttgaaacctgtttttatcactgagactgagcaccaagatcagaagccaaatgctagaggacgaaaaggatggtacaaaggtcaaggtcagatgcagcaaaatgcaaacaaacaaggcagttgtggttccgagtcattaaacaagcctatttctggaccgaggatgccagatggaacaaggggcttcacactgggacgtggtagatctcttccactacagaagtctgagaaggctgaagagtagagctaccaaaaaaggcctgttaagaaccttatccaaagaagctgggtaaaatctaacagaaaacctttgcttttttttttttgaaacttaagatcatcgaagccgttctttgcatggaatgggacacagaagaaagggaatcttggaatggctttctctctgcaagaaatggaacacaaaagggaatctgggaatgacttgtacagaaacacaattgtctgggggtagttccgagttcactcgtatggaacacagtagaacctttgcatgtttcctgacttgcattgtgtcatatactcgtatcatgctgcatgcagcattgcagccctgtttgcaatttcagcagccgggggctggggccgtgagcccgtgaccctgcaccatccgggtctaccacgagcccccctgttctgcgaggcgtttggcccctcatccctatggatctgtactctgtaggctctccttataacgcatgattgggattgaaaaacacattgaatag

SEQ ID NO: 31921 - DNA, 2942 bp, Zea Mays
gtgattattcttcttcagccttctatccttccgagttctttttggtgcaggtgcatgtggggtcatcttggcacgatgtgcgaccatcgatgaagtagcagctgccttcccacaacgtcactatccgcctcctattgtggcagtcgggtgattgagctttaaccttgaagtcctaggataatggtggcaaacctttcttcaagtgtattagaaatgaatgaaaaacatagtaccggctgacagcggctgcggcgaagctatctgagcggtagcggagtactaaggggtggagagagggagcactgtctcatgcatgaaataaagtctccaaaacaaaagatttggtccagagcgcggccacacgggcccaacaatagcaacgtcacatggtggttgccattgtcacgtcgagctctccctctccaccaactaacagttcctgacggtggagcagaaattcattaagagcatatagggattcacaagtgattttgagcccaacaatcttgctgccatcgatactcctggttcgtatatttggttactcaaaacatgagatgatcctctgaagtagaaagggaaacaccgaatatgctcttgctgaaatattctatagaaagacacaattccattttggcagatgcaagtgtatggttattctactcatggaagatctacagggaagttgttacagagcaacagcccagggaggccaagatgctacttagctactaaaaccaactgacaacaagtgcacagcccagtgggccgctaagctgcaagaaaaccctcgcccctcgttctggattgagattctctgcagaggctgcgatgttgggccgtcctgccctgcccggtgggtatatgtaagctcagaccgccaccggaaccttctcgagcccgcggccgcacacctccgcccgaagccgccagtcggactacgaacggcggcggcgcctcggctcccctgatctccctcaccggaatggacggccaggctccgccgcttctcgacgccgtcgtgctcgagccccttgcagttggcgacgagctccatccgcggcgtcctgtcgaggtggaggacgctccggccgccgctccgccctccggtatggacggccaggttccacctctctacaacgtcacgcgggatcctctgaccgtatccgacgagctgcagcccacgggcgaggtggtggatgacgccctactcgtcgcgcccgatatcgtcaagggcgaggtgatggaggacgacatcctacccgtcgcaaccgacatcatcaacgacgccgcctcggagtgccccgaggctggcagtgatggcgtcgtgctcaccgacgagctccgcaatcgcatcgtcaagcaggtggagtactatttcagcgatgagaaccttcctacggacgagttcctgctgaattatgtgaagaagaacaataagggctttggatgtgaattttatgattattatagtggtgtcagggacaatgtatttggtgttcctgttcttagtttttttagccgagactcaaattttacacaagcttatgcttttattgtgtgtgtttctgcattagatattggtgcatttcctattgagatcatcgcatcatttaggagaatgaagaaactcgttcaagacctctcagtaattgaagctgcactcaggacatcatcaaagctggttgtaagttcaaatgggaaacgggtcaggaggttacatccattgccacacaaagaattgaaagattcaaagaaaagcactgttttggtcgaaaatctacctccagatttctcaatggagagtattcaggaaaaattcgcaacagtgggcaaagttgtgaacataacaattaatgatccagaatcagtgaaagaattttcaactgctaagaagcctgacttcaatttaagttttaaggctcatgtacttgttgaatatgaagcagtggaggctgctgagaaggctgttactgccctaagtgatgagagcaactggagaactgggatgaaagtcaggcttctgtctaaacaaagtgtaatgggaccaggaaagtataaaaaaccttctaaagaaaatcaagatgcagtttccaaaatgattgatcagaatcaacattcaaaagaagaccagcttaaaaccttggaaaagatctccggtgctgatgcagtggggattaccaaggacagagataatttgaaacctgtttttatcactgagactgagcaccaagatcagaagccaaatgctagaggacgaaaaggatggtacaaaggtcaaggtcagatgcagcaaaatgcaaacaaacaaggcagttgtggttccgagtcattaaacaagcctatttctggaccgaggatgccagatggaacaaggggcttcacactgggacgtggtagatctcttccactacagaagtctgagaaggctgaagagtagagctaccaaaaaaggcctgttaagaaccttatccaaagaagctgggtaaaatctaacagaaaacctttgcttttttttttttgaaacttaagatcatcgaagccgttctttgcatggaatgggacacagaagaaagggaatcttggaatggctttctctctgcaagaaatggaacacaaaagggaatctgggaatgacttgtacagaaacacaattgtctgggggtagttccgagttcactcgtatggaacacagtagaacctttgcatgtttcctgacttgcattgtgtcatatactcgtatcatgctgcatgcagcattgcagccctgtttgcaatttcagcagccgggggctggggccgtgagcccgtgaccctgcaccatccgggtctaccacgagcccccctgttctgcgaggcgtttggcccctcatccctatggatctgtactctgtaggctctccttataacgcatgattgggattgaaaaacacattgaatag

SEQ ID NO: 31922 - DNA, 3435 bp, Zea Mays
gaaaaacatcgcggccacacgggcccaacaatagcaacgtcacatggtggttgccattgtcacgtcgagctctccctctccaccaactaacagttcctgacggtggagcagaaattcattaagagcatatagggattcacaagtgattttgagcccaacaatcttgctgccatcgatactcctggttcgtatatttggttactcaaaacatgagatgatcctctgaagtagaaagggaaacaccgaatatgctcttgctgaaatattctatagaaagacacaattccattttggcagatgcaagtgtatggttattctactcatggaagatctacagggaagaaattgaggtagcatataactgccgcaagggaaaatatggtgtagcagatgaggatataatcttatatggtcaatgtgtttgaattggtccaaccattgatatttcttcgcggttgctagacttgagagtcgcagttttgcatagtcctatattctatctgcactaagagtaatatatacagccaagcggacgtttggtttaacatttacaaggtatgtttggtccttttgttttttggaattaatggttgtccgatgcttgtcattcatatgagttctaatatcatgcccccttaaagtactcatcatcaaaagtttccatgtgaatgttttaaatgtagatttaaagggttgaaagacatcaaacagttattcaaacatgatcttaagtgtcgtgaaagactacaagtgaggttcaacttggcaaattgtttttctagtaactaaggagcaacaatgctatgtattttagcttgacttatatatctaagtacttacatttttggaatcgggcaaacagtgatagtttgaatcacatgttttgccaaaaggaattattagaactgttcaaaagttaggaaaaaatacatatttatgctttcttatgcacgggtaaattgctctgttcatatataaaaaaaataattgtagtattattgcttatattgattttaaatgatgaccttattagatgtgccatcgagaccacatatattagcattttgtaactaaatacaatgcatgaatatatatagatagcctttacatcgtgctacatgcttcctagaaataaggaaccattacaacatatatatttttgatgatgtacaacttcgtcatcggatataccgttccttcttttttacatacattttgataagaatgtcaaaatgttaaaaaaatagcgcgcgcatggcgcgcgttagacactagtagatttcagaactatcatgaagcgcgtgctcgctggttgttagttgttacagagcaacagcccagggaggccaagatgctacttagctactaaaaccaactgacaacaagtgcacagcccagtgggccgctaagctgcaagaaaaccctcgcccctcgttctggattgagattctctgcagaggctgcgatgttgggccgtcctgccctgcccggtgggtatatgtaagctcagaccgccaccggaaccttctcgagcccgcggccgcacacctccgcccgaagccgccagtcggactacgaacggcggcggcgcctcggctcccctgatctccctcaccggaatggacggccaggctccgccgcttctcgacgccgtcgtgctcgagccccttgcagttggcgacgagctccatccgcggcgtcctgtcgaggtggaggacgctccggccgccgctccgccctccggtatggacggccaggttccacctctctacaacgtcacgcgggatcctctgaccgtatccgacgagctgcagcccacgggcgaggtggtggatgacgccctactcgtcgcgcccgatatcgtcaagggcgaggtgatggaggacgacatcctacccgtcgcaaccgacatcatcaacgacgccgcctcggagtgccccgaggctggcagtgatggcgtcgtgctcaccgacgagctccgcaatcgcatcgtcaagcaggtggagtactatttcagcgatgagaaccttcctacggacgagttcctgctgaattatgtgaagaagaacaataagggctttgttcctattgagatcatcgcatcatttaggagaatgaagaaactcgttcaagacctctcagtaattgaagctgcactcaggacatcatcaaagctggttgtaagttcaaatgggaaacgggtcaggaggttacatccattgccacacaaagaattgaaagattcaaagaaaagcactgttttggtcgaaaatctacctccagatttctcaatggagagtattcaggaaaaattcgcaacagtgggcaaagttgtgaacataacaattaatgatccagaatcagtgaaagaattttcaactgctaagaagcctgacttcaatttaagttttaaggctcatgtacttgttgaatatgaagcagtggaggctgctgagaaggctgttactgccctaagtgatgagagcaactggagaactgggatgaaagtcaggcttctgtctaaacaaagtgtaatgggaccaggaaagtataaaaaaccttctaaagaaaatcaagatgcagtttccaaaatgattgatcagaatcaacattcaaaagaagaccagcttaaaaccttggaaaagatctccggtgctgatgcagtggggattaccaaggacagagataatttgaaacctgtttttatcactgagactgagcaccaagatcagaagccaaatgctagaggacgaaaaggatggtacaaaggtcaaggtcagatgcagcaaaatgcaaacaaacaaggcagttgtggttccgagtcattaaacaagcctatttctggaccgaggatgccagatggaacaaggggcttcacactgggacgtggtagatctcttccactacagaagtctgagaaggctgaagagtagagctaccaaaaaaggcctgttaagaaccttatccaaagaagctgggtaaaatctaacagaaaacctttgcttttttttttttgaaacttaagatcatcgaagccgttctttgcatggaatgggacacagaagaaagggaatcttggaatggctttctctctgcaagaaatggaacacaaaagggaatctgggaatgacttgtacagaaacacaattgtctgggggtagttccgagttcactcgtatggaacacagtagaacctttgcatgtttcctgacttgcattgtgtcatatactcgtatcatgctgcatgcagcattgcagccctgtttgcaatttcagcagccgggggctggggccgtgagcccgtgaccctgcaccatccgggtctaccacgagcccccctgttctgcgaggcgtttggcccctcatccctatggatctgtactctgtaggctctccttataacgcatgattgggattgaaaaacacattgaatag

SEQ ID NO: 31923 - DNA, 3511 bp, Zea Mays
atacgtatttacatacatggacatctacatggtgttcaatagaacatgagtgaatcgctacaattagccaaagaacatgaaaaacaagatacatgttttatttttttattgagagaggcataccttctacaataattactcttgaagttataatatatactcttacaaaatccattgtagtgaaaaatttatcacctatttacatttgcagattgagtcttcagtgtttggagtaccggctgacagcggctgcggcgaagctatctgagcggtagcggagtactaaggggtggagagagggagcactgtctcatgcatgaaataaagtctccaaaacaaaagatttggtccagagcgcggccacacgggcccaacaatagcaacgtcacatggtggttgccattgtcacgtcgagctctccctctccaccaactaacagttcctgacggtggagcagaaattcattaagagcatatagggattcacaagtgattttgagcccaacaatcttgctgccatcgatactcctggttcgtatatttggttactcaaaacatgagatgatcctctgaagtagaaagggaaacaccgaatatgctcttgctgaaatattctatagaaagacacaattccattttggcagatgcaagtgtatggttattctactcatggaagatctacagggaagaaattgaggtagcatataactgccgcaagggaaaatatggtgtagcagatgaggatataatcttatatggtcaatgtgtttgaattggtccaaccattgatatttcttcgcggttgctagacttgagagtcgcagttttgcatagtcctatattctatctgcactaagagtaatatatacagccaagcggacgtttggtttaacatttacaaggtatgtttggtccttttgttttttggaattaatggttgtccgatgcttgtcattcatatgagttctaatatcatgcccccttaaagtactcatcatcaaaagtttccatgtgaatgttttaaatgtagatttaaagggttgaaagacatcaaacagttattcaaacatgatcttaagtgtcgtgaaagactacaagtgaggttcaacttggcaaattgtttttctagtaactaaggagcaacaatgctatgtattttagcttgacttatatatctaagtacttacatttttggaatcgggcaaacagtgatagtttgaatcacatgttttgccaaaaggaattattagaactgttcaaaagttaggaaaaaatacatatttatgctttcttatgcacgggtaaattgctctgttcatatataaaaaaaataattgtagtattattgcttatattgattttaaatgatgaccttattagatgtgccatcgagaccacatatattagcattttgtaactaaatacaatgcatgaatatatatagatagcctttacatcgtgctacatgcttcctagaaataaggaaccattacaacatatatatttttgatgatgtacaacttcgtcatcggatataccgttccttcttttttacatacattttgataagaatgtcaaaatgttaaaaaaatagcgcgcgcatggcgcgcgttagacactagtagatttcagaactatcatgaagcgcgtgctcgctggttgttagttgttacagagcaacagcccagggaggccaagatgctacttagctactaaaaccaactgacaacaagtgcacagcccagtgggccgctaagctgcaagaaaaccctcgcccctcgttctggattgagattctctgcagaggctgcgatgttgggccgtcctgccctgcccggtgggtatatgtaagctcagaccgccaccggaaccttctcgagcccgcggccgcacacctccgcccgaagccgccagtcggactacgaacggcggcggcgcctcggctcccctgatctccctcaccggaatggacggccaggctccgccgcttctcgacgccgtcgtgctcgagccccttgcagttggcgacgagctccatccgcggcgtcctgtcgaggtggaggacgctccggccgccgctccgccctccggtatggacggccaggttccacctctctacaacgtcacgcgggatcctctgaccgtatccgacgagctgcagcccacgggcgaggtggtggatgacgccctactcgtcgcgcccgatatcgtcaagggcgaggtgatggaggacgacatcctacccgtcgcaaccgacatcatcaacgacgccgcctcggagtgccccgaggctggcagtgatggcgtcgtgctcaccgacgagctccgcaatcgcatcgtcaagcaggtggagtactatttcagcgatgagaaccttcctacggacgagttcctgctgaattatgtgaagaagaacaataagggctttgttcctattgagatcatcgcatcatttaggagaatgaagaaactcgttcaagacctctcagtaattgaagctgcactcaggacatcatcaaagctggttgtaagttcaaatgggaaacgggtcaggaggttacatccattgccacacaaagaattgaaagattcaaagaaaagcactgttttggtcgaaaatctacctccagatttctcaatggagagtattcaggaaaaattcgcaacagtgggcaaagttgtgaacataacaattaatgatccagaatcagtgaaagaattttcaactgctaagaagcctgacttcaatttaagttttaaggctcatgtacttgttgaatatgaagcagtggaggctgctgagaaggctgttactgccctaagtgatgagagcaactggagaactgggatgaaagtcaggcttctgtctaaacaaagtgtaatgggaccaggaaagtataaaaaaccttctaaagaaaatcaagatgcagtttccaaaatgattgatcagaatcaacattcaaaagaagaccagcttaaaaccttggaaaagatctccggtgctgatgcagtggggattaccaaggacagagataatttgaaacctgtttttatcactgagactgagcaccaagatcagaagccaaatgctagaggacgaaaaggatggtacaaaggtcaaggtcagatgcagcaaaatgcaaacaaacaaggcagttgtggttccgagtcattaaacaagcctatttctggaccgaggatgccagatggaacaaggggcttcacactgggacgtggtagatctcttccactacagaagtctgagaaggctgaagagtagagctaccaaaaaaggcctgttaagaaccttatccaaagaagctgggaatgagatcctacgtcgttaagctggggtcaccggcgcactgagatcaacgtcaagcacagtaactgcatggaccacaataactgcacaacatggacatagtcggcataatttatcgtctcggtcatggtttaataccatgtcgtatcttgatcgggcacgcatggtggtaaaactaaaagaacgt

SEQ ID NO: 31924 - DNA, 3244 bp, Zea Mays
agtcttggattgtctttggtggtatggttattctactcatggaagatctacagggaagaaattgaggtagcatataactgccgcaagggaaaatatggtgtagcagatgaggatataatcttatatggtcaatgtgtttgaattggtccaaccattgatatttcttcgcggttgctagacttgagagtcgcagttttgcatagtcctatattctatctgcactaagagtaatatatacagccaagcggacgtttggtttaacatttacaaggtatgtttggtccttttgttttttggaattaatggttgtccgatgcttgtcattcatatgagttctaatatcatgcccccttaaagtactcatcatcaaaagtttccatgtgaatgttttaaatgtagatttaaagggttgaaagacatcaaacagttattcaaacatgatcttaagtgtcgtgaaagactacaagtgaggttcaacttggcaaattgtttttctagtaactaaggagcaacaatgctatgtattttagcttgacttatatatctaagtacttacatttttggaatcgggcaaacagtgatagtttgaatcacatgttttgccaaaaggaattattagaactgttcaaaagttaggaaaaaatacatatttatgctttcttatgcacgggtaaattgctctgttcatatataaaaaaaataattgtagtattattgcttatattgattttaaatgatgaccttattagatgtgccatcgagaccacatatattagcattttgtaactaaatacaatgcatgaatatatatagatagcctttacatcgtgctacatgcttcctagaaataaggaaccattacaacatatatatttttgatgatgtacaacttcgtcatcggatataccgttccttcttttttacatacattttgataagaatgtcaaaatgttaaaaaaatagcgcgcgcatggcgcgcgttagacactagtagatttcagaactatcatgaagcgcgtgctcgctggttgttagttgttacagagcaacagcccagggaggccaagatgctacttagctactaaaaccaactgacaacaagtgcacagcccagtgggccgctaagctgcaagaaaaccctcgcccctcgttctggattgagattctctgcagaggctgcgatgttgggccgtcctgccctgcccggtgggtatatgtaagctcagaccgccaccggaaccttctcgagcccgcggccgcacacctccgcccgaagccgccagtcggactacgaacggcggcggcgcctcggctcccctgatctccctcaccggaatggacggccaggctccgccgcttctcgacgccgtcgtgctcgagccccttgcagttggcgacgagctccatccgcggcgtcctgtcgaggtggaggacgctccggccgccgctccgccctccggtatggacggccaggttccacctctctacaacgtcacgcgggatcctctgaccgtatccgacgagctgcagcccacgggcgaggtggtggatgacgccctactcgtcgcgcccgatatcgtcaagggcgaggtgatggaggacgacatcctacccgtcgcaaccgacatcatcaacgacgccgcctcggagtgccccgaggctggcagtgatggcgtcgtgctcaccgacgagctccgcaatcgcatcgtcaagcaggtggagtactatttcagcgatgagaaccttcctacggacgagttcctgctgaattatgtgaagaagaacaataagggctttggatgtgaattttatgattattatagtggtgtcagggacaatgtatttggtgttcctgttcttagtttttttagccgagactcaaattttacacaagcttatgcttttattgtgtgtgtttctgcattagatattggtgcatttcctattgagatcatcgcatcatttaggagaatgaagaaactcgttcaagacctctcagtaattgaagctgcactcaggacatcatcaaagctggttgtaagttcaaatgggaaacgggtcaggaggttacatccattgccacacaaagaattgaaagattcaaagaaaagcactgttttggtcgaaaatctacctccagatttctcaatggagagtattcaggaaaaattcgcaacagtgggcaaagttgtgaacataacaattaatgatccagaatcagtgaaagaattttcaactgctaagaagcctgacttcaatttaagttttaaggttactgccctaagtgatgagagcaactggagaactgggatgaaagtcaggcttctgtctaaacaaagtgtaatgggaccaggaaagtataaaaaaccttctaaagaaaatcaagatgcagtttccaaaatgattgatcagaatcaacattcaaaagaagaccagcttaaaaccttggaaaagatctccggtgctgatgcagtggggattaccaaggacagagataatttgaaacctgtttttatcactgagactgagcaccaagatcagaagccaaatgctagaggacgaaaaggatggtacaaaggtcaaggtcagatgcagcaaaatgcaaacaaacaaggcagttgtggttccgagtcattaaacaagcctatttctggaccgaggatgccagatggaacaaggggcttcacactgggacgtggtagatctcttccactacagaagtctgagaaggctgaagagtagagctaccaaaaaaggcctgttaagaaccttatccaaagaagctgggtaaaatctaacagaaaacctttgcttttttttttttgaaacttaagatcatcgaagccgttctttgcatggaatgggacacagaagaaagggaatcttggaatggctttctctctgcaagaaatggaacacaaaagggaatctgggaatgacttgtacagaaacacaattgtctgggggtagttccgagttcactcgtatggaacacagtagaacctttgcatgtttcctgacttgcattgtgtcatatactcgtatcatgctgcatgcagcattgcagccctgtttgcaatttcagcagccgggggctggggccgtgagcccgtgaccctgcaccatccgggtctaccacgagcccccctgttctgcgaggcgtttggcccctcatccctatggatctgtactctgtaggctctccttataacgcatgattgggattgaaaaacacattgaatag

SEQ ID NO: 31925 - DNA, 2578 bp, Zea Mays
caatgctgatgaggtggcgccttgcattttgcgacatggtatggttattctactcatggaagatctacagggaagaaattgaggtagcatataactgccgcaagggaaaatatggtgtagcagatgaggatataatcttatatggtcaatgtgtttgaattggtccaaccattgatatttcttcgcggttgctagacttgagagtcgcagttttgcatagtcctatattctatctgcactaagagtaatatatacagccaagcggacgtttggtttaacatttacaaggtatgtttggtccttttgttttttggaattaatggttgtccgatgcttgtcattcatatgagttctaatatcatgcccccttaaagtactcatcatcaaaagtttccatgtgaatgttttaaatgtagatttaaagggttgaaagacatcaaacagttattcaaacatgatcttaagtgtcgtgaaagactacaagtgaggttcaacttggcaaattgtttttctagtaactaaggagcaacaatgctatgtattttagcttgacttatatatctaagtacttacatttttggaatcgggcaaacagtgatagtttgaatcacatgttttgccaaaaggaattattagaactgttcaaaagttaggaaaaaatacatatttatgctttcttatgcacgggtaaattgctctgttcatatataaaaaaaataattgtagtattattgcttatattgattttaaatgatgaccttattagatgtgccatcgagaccacatatattagcattttgtaactaaatacaatgcatgaatatatatagatagcctttacatcgtgctacatgcttcctagaaataaggaaccattacaacatatatatttttgatgatgtacaacttcgtcatcggatataccgttccttcttttttacatacattttgataagaatgtcaaaatgttaaaaaaatagcgcgcgcatggcgcgcgttagacactagtagatttcagaactatcatgaagcgcgtgctcgctggttgttagttgttacagagcaacagcccagggaggccaagatgctacttagctactaaaaccaactgacaacaagtgcacagcccagtgggccgctaagctgcaagaaaaccctcgcccctcgttctggattgagattctctgcagaggctgcgatgttgggccgtcctgccctgcccggtgggtatatgtaagctcagaccgccaccggaaccttctcgagcccgcggccgcacacctccgcccgaagccgccagtcggactacgaacggcggcggcgcctcggctcccctgatctccctcaccggaatggacggccaggctccgccgcttctcgacgccgtcgtgctcgagccccttgcagttggcgacgagctccatccgcggcgtcctgtcgaggtggaggacgctccggccgccgctccgccctccggtatggacggccaggttccacctctctacaacgtcacgcgggatcctctgaccgtatccgacgagctgcagcccacgggcgaggtggtggatgacgccctactcgtcgcgcccgatatcgtcaagggcgaggtgatggaggacgacatcctacccgtcgcaaccgacatcatcaacgacgccgcctcggagtgccccgaggctggcagtgatggcgtcgtgctcaccgacgagctccgcaatcgcatcgtcaagcaggtggagtactatttcagcgatgagaaccttcctacggacgagttcctgctgaattatgtgaagaagaacaataagggctttgttcctattgagatcatcgcatcatttaggagaatgaagaaactcgttcaagacctctcagtaattgaagctgcactcaggacatcatcaaagctggttgtaagttcaaatgggaaacgggtcaggaggttacatccattgccacacaaagaattgaaagattcaaagaaaagcactgttttggtcgaaaatctacctccagatttctcaatggagagtattcaggaaaaattcgcaacagtgggcaaagttgtgaacataacaattaatgatccagaatcagtgaaagaattttcaactgctaagaagcctgacttcaatttaagttttaaggctcatgtacttgttgaatatgaagcagtggaggctgctgagaaggctgttactgccctaagtgatgagagcaactggagaactgggatgaaagtcaggcttctgtctaaacaaagtgtaatgggaccaggaaagtataaaaaaccttctaaagaaaatcaagatgcagtttccaaaatgattgatcagaatcaacattcaaaagaagaccagcttaaaaccttggaaaagatctccggtgctgatgcagtggggattaccaaggacagagataatttgaaacctgtttttatcactgagactgagcaccaagatcagaagccaaatgctagaggacgaaaaggatggtacaaaggtcaaggtcagatgcagcaaaatgcaaacaaacaagatgaattttaagcatggttatcctaagaacacttcctgcc

SEQ ID NO: 31926 - DNA, 1153 bp, Zea Mays
ccttactcatctgagttgtcccttacccccatcatatttgatcaaactgaatgtttactacatttgagttcctattgagatcatcgcatcatttaggagaatgaagaaactcgttcaagacctctcagtaattgaagctgcactcaggacatcatcaaagctggttgtaagttcaaatgggaaacgggtcaggaggttacatccattgccacacaaagaattgaaagattcaaagaaaagcactgttttggtcgaaaatctacctccagatttctcaatggagagtattcaggaaaaattcgcaacagtgggcaaagttgtgaacataacaattaatgatccagaatcagtgaaagaattttcaactgctaagaagcctgacttcaatttaagttttaaggctcatgtacttgttgaatatgaagcagtggaggctgctgagaaggctgtgttactgccctaagtgatgagagcaactggagaactgggatgaaagtcaggcttctgtctaaacaaagtgtaatgggaccaggaaagtataaaaaaccttctaaagaaaatcaagatgcagtttccaaaatgattgatcagaatcaacattcaaaagaagaccagcttaaaaccttggaaaagatctccggtgctgatgcagtggggattaccaaggacagagataatttgaaacctgtttttatcactgagactgagcaccaagatcagaagccaaatgctagaggacgaaaaggatggtacaaaggtcaaggtcagatgcagcaaaatgcaaacaaacaaggcagttgtggttccgagtcattaaacaagcctatttctggaccgaggatgccagatggaacaaggggcttcacactgggacgtggtagatctcttccactacagaagtctgagaaggctgaagagtagagctaccaaaaaaggcctgttaagaaccttatccaaagaagctgggaatgagatcctacgtcgttaagctggggtcaccggcgcactgagatcaacgtcaagcacagtaactgcatggaccacaataactgcacaacatggacatagtcggcataatttatcgtctcggtcatggtttaataccatgtcgtatcttgatcgggcacgcatggtggtaaaactaaaagaacgt

SEQ ID NO: 31927 - DNA, 681 bp, Zea Mays
gcaatttcaatctgttgtaagttcaaatgggaaacgggtcaggaggttacatccattgccacacaaagaattgaaagattcaaagaaaagcactgttttggtcgaaaatctacctccagatttctcaatggagagtattcaggaaaaattcgcaacagtgggcaaagttgtgaacataacaattaatgatccagaatcagtgaaagaattttcaactgctaagaagcctgacttcaatttaagttttaaggctcatgtacttgttgaatatgaagcagtggaggctgctgagaaggctgttactgccctaagtgatgagagcaactggagaactgggatgaaagtcaggcttctgtctaaacaaagtgtaatgggaccaggaaagtataaaaaaccttctaaagaaaatcaagatgcagtttccaaaatgattgatcagaatcaacattcaaaagaagaccagcttaaaaccttggaaaagatctccggtgctgatgcagtggggattaccaaggacagagataatttgaaacctgtttttatcactgagactgagcaccaagatcagaagccaaatgctagaggacgaaaaggatggtacaaaggtcaaggtcagatgcagcaaaatgcaaacaaacaagatgaattttaagcatggttatcctaagaacacttcctgcc

SEQ ID NO: 31928 - DNA, 2054 bp, Zea Mays
ggagtggcgccccttccttcccacgtcccactcggccattcccccacccaatctcttgttcaaatcaatcaactgcctctctcactcgcctctaacctctttgcgcaaaaaaccccactccggcagctcaaaaccccaatcttccccggcctccccacccaaccctagcaccagaacacccgatgcggcatctgaagcgcggccgtggcggctttgaccccggcgacgcggtggttctcgacgtcgtggggctaggggagttcgcgcggttgtccctccctgagcccccgcccgacgagcttgggctatccgccgcctacgacgacgcttcaggccgcattatggtttctatctgcggtgacgctgtctctgcctcccccgccgacctcgcggtcgccctcgggctgccgctgggcccggtcggcctcctcgcgggatgggatgcggctgtgttctccacggcggaggcgatcggagccgtgagaaggtttgtctgcgatcgcgtgctgctgggatggggagagagcggctttacggtgtcgatggaggtcgctgccgcgttaaggttggtagaggaaggcaaggcgtacgaggtcgactgggctggcttgatttgggcaacggtgaagagggaggtagtagctggcacgacacggcgatacgcaccgtacctcctccatctgatggtgcgccaaaggccggagcgtttcgttgagggtaatgggagcttggcgcttgagaaggggttgaaaggtcaggtattgcagcaatgccagttggaggacgaagaagaaacctctttggttttttggggcacccaaaactttggtgacttagaggaaatgccaatttttggcagccaaaacataagttttttccctcaaccgcaggaggtggggggcaattgcagttaccaaactatttcacgtttccaagccctcatgcaacggatccaaggttatgtgtctgacatggagagtaaatacctggataaggaaaagacttgcagggacactcaacatgaggtggagtgcattaagaatatggtgatggaaaaggatcaacaaattgaagctactgtcaatgctatacgacaggaacttttagaaaggagtgttgtaatgcgaacattggaagcagacaaggatcaattgagccgcagtgttcaacaatacgataagttactcaagaagtctttagctaaatttcaggagtatatgaatatggtaacacgtggggaaggtgttgactcgtatttggagaatcttggtttaactggtgggcagaatctcacttgggtgtgccaaatgcgttatcagtgccagatgactaggattcaggaaacatgcgattcaaattctttgaagcttctcgagaatattacagaaatggacaggagcattgcaagcctcaatcgtgaagtggaagggctaaagaattgtagatcaattccagacctcaacaatggtgtggaagacgatggtgagggcaaagcatccctagccatgacattgggtgcatcttggacaggtgaaggagatcatgttagcaacaccacacaaggaggaaaacagcttgttggtttggtaggaaagcctgataaaaggaacgacatcagggagagcatggatctcgatggagttcggtcaggggcgaagctccgcaaatgaagcatgccatgacggtgcagcctcgcagggcccaagatatttggttaatggttgatcttgtgccagtatcatgcaaaagtgctgataaggctgcaccagtgttttgtcatgtggacctaacgtagtggtattattatacaaggttatcctaacttagtagcgtgtgtaaccagtggcagtgatggtgctatggttggacatgaataagaagtttctgcaacatgctatctatattggtgaaatatactttatcatatgagtggaagcaggaatgcactagctttgttcttttggcttagctcaaatgttctttgtgatgagatcatgttgacggaaatagggaaagaggcaagcggttgggagtgatcctaacttggaatgctg

SEQ ID NO: 31929 - DNA, 2886 bp, Zea Mays
atctgacccaacccgatattaaacacggatcaggtattcaggtacgagccgtaataaatcgctcgtcatccgactctactttcattctactgcttgaacaggtctactttcattctactgctatgagtagcaattccccgcgcgcgctctctccgccccggcactaggccaacggcaatcaccactcaccaggtgccaaggtgtcttgtcggccccttcaccaagtgttagtcgggtccttcgccggcgacgggcaccaccagtatggacgaatcacgaaaaagagctgtctctactgcaaatgatgaagactttggaaatgacttcctttcatcttggaagttaccaaaatcaggaaaagacacgattgacttcagtgttgactcagttcccaagagtagcaagaaattcagctttgacaacctagatgattttgggcttaatggagcctttgacaaattaccgtcctttcaaatgggcatgtctgatctggatttttctagccctgacaagaaaaaagtgaagcacaccagttcaaatgcagatctttttgaaaagaaaaaggaaactgacaaggacaatttctccttttcttttgatttcaatgagttgggaaagtttagtcttgatggaaagctaggaattgaagaaaagagtactaatagatttaatggcaaatctgaccctgtctcctcagaggttaaaaaggatacacaaagaggccttttagccaagggcaatgctatccttgaagagaataatagtaaggataaaatgcatacacttgatactcgcacttcaagaccttctcatctgacgaatcatgagaatgtgaagaatgccagtcaaccaacttcaaatatcgatgttgctgattcatctgacaagatgcaagaacataccagtgtcaatcctgcaacaatggaacaaactaaagtagactcagtgctcaatgacaatcctggagagcatcctaaagagatatatgcaatgaaggcagctgttaacataccttctcaggatttctcctgcggtgccatatctagtgaagatccaacacaagggccagcagatcatgtgaacagtaaagatgcacctatagtgaactgtggtaaagttcatgtatcgagggagagtaatgatgatgagcagtcgaatggtttacaatccagggacaccagcattattaattccaatgtgtcaagaagaccgtcgggccaatttaactcccagaatgaggttcttgaggaaagtgtttcgcttaatgaaggaagtcaagacaaccaaagttttagtggcgctcctaagaagtttttaaagaagacatcacatgggacaacaaataccgaggaagagatttcaggtcccaagattctctcttgttcagtgcagagggaaatcagaagtgttgaacctgcaccgatgaaggagagaggaagcttctctcttttatccaagtctgtacatatgaaagcaaccagggttgaactaacttcagaaacagccttaaatcaatcatccagtgcaagtaaagtgataaaaaagatgactacacatcctacagacttgaagagggaacacatgcaagctaatgcagtccctcacaaatctaaaactgctttatcaaaaacatacagcaagctagcatcaaatgggctattggccacctccatgaatgccaaagttgacacgaatgccaaattaggccttgagcctcctatctcggggaagtcgtctctactgaatgctcgaagcagcacaccacatagcgctggacataaagttgttgcaagtcatgtgcttctaaaagctagcaatacttctgattcattgcaaggtgttccttccaaagataataaatcgtcaacaatttctcaactgacaggagcaaggaatcagaagtctgaaatctgacatggccctagagaaagaatcagtacaagtgagtgggacaaagtgttccccggtaacaacatccagaatccttgactccattcctgaaggaaaacctgcattgcctagcccatccataatgcagaaagttcctgaggaatcagctctaaatccaaaagctcctaaagtgctcaaacacatcatgagatctccagctgtaagaaaatcacctagaactgttccggagttgggaaatgaaatgatatgcattctattgaaaaggaaacatgcagaagctaaagagctagcagttcgggctatcgttaacaacaatacgatgctgatgttaaaccacccgatgattgaggagaaaatttactctattcagaaatttgcgaacgacctgaaatccaagaagtacttatttgaggaagttggcaccattaactctggagcaaatgacttatccagcggagcatgggtaatgtaaatgcaacaaaagagctcaggcgtccagcgtaaatgcaatcttgaatgtgtttcaggaatatctctactgatggacgaagcgaaccttcggacgaaaaggcgtgtagagaagcttcgcacatgcgtgcgagtgaaagggtgttagctaaagttgatagcttcggcgacaatagagaggcttcgggtgcaagccaaaggaaaaggcgacgaaggccttaacccgcgcagccgaagatggagaaaatacgctactgccctaatgacgtctgtaaacattgaatggcacaattgtaatcctgtactaggtcggttcgtctcggttcgtctctcctataaatagatggacagtacctcgtataaagtacatttatccaggtgctacagcttcacatagcccagcctacgaaacaccttcgtgctatcttgcatcaagaagtcaaaggtatgattgtaagcttgtcttgtatgagaagagaaataaaatgttaaggcacacgagacgag

SEQ ID NO: 31930 - DNA, 2977 bp, Zea Mays
ctactttcattctactgctatgagtagcaattccccgcgcgcgctctctccgccccggcactaggccaacggcaatcaccactcaccaggtgccaaggtgtcttgtcggccccttcaccaagtgttagtcgggtccttcgccggcgacgggcaccaccagtatggacgaatcacgaaaaagagctgtctctactgcaaatggtaaaaatataagttcatcccttgatgaagactttggaaatgacttcctttcatcttggaagttaccaaaatcaggaaaagacacgattgacttcagtgttgactcagttcccaagagtagcaagaaattcagctttgacaacctagatgattttgggcttaatggagcctttgacaaattaccgtcctttcaaatgggcatgtctgatctggatttttctagccctgacaagaaaaaagtgaagcacaccagttcaaatgcagatctttttgaaaagaaaaaggaaactgacaaggacaatttctccttttcttttgatttcaatgagttgggaaagtttagtcttgatggaaagctaggaattgaagaaaagagtactaatagatttaatggcaaatctgaccctgtctcctcagaggttaaaaaggatacacaaagaggccttttagccaagggcaatgctatccttgaagagaataatagtaaggataaaatgcatacacttgatactcgcacttcaagaccttctcatctgacgaatcatgagaatgtgaagaatgccagtcaaccaacttcaaatatcgatgttgctgattcatctgacaagatgcaagaacataccagtgtcaatcctgcaacaatggaacaaactaaagtagactcagtgctcaatgacaatcctggagagcatcctaaagagatatatgcaatgaaggcagctgttaacataccttctcaggatttctcctgcggtgccatatctagtgaagatccaacacaagggccagcagatcatgtgaacagtaaagatgcacctatagtgaactgtggtaaagttcatgtatcgagggagagtaatgatgatgagcagtcgaatggtttacaatccagggacaccagcattattaattccaatgtgtcaagaagaccgtcgggccaatttaactcccagaatgaggttcttgaggaaagtgtttcgcttaatgaaggaagtcaagacaaccaaagttttagtggcgctcctaagaagtttttaaagaagacatcacatgggacaacaaataccgaggaagagatttcaggtcccaagattctctcttgttcagtgcagagggaaatcagaagtgttgaacctgcaccgatgaaggagagaggaagcttctctcttttatccaagtctgtacatatgaaagcaaccagggttgaactaacttcagaaacagccttaaatcaatcatccagtgcaagtaaagtgataaaaaagatgactacacatcctacagacttgaagagggaacacatgcaagctaatgcagtccctcacaaatctaaaactgctttatcaaaaacatacagcaagctagcatcaaatgggctattggccacctccatgaatgccaaagttgacacgaatgccaaattaggccttgagcctcctatctcggggaagtcgtctctactgaatgctcgaagcagcacaccacatagcgctggacataaagttgttgcaagtcatgtgcttctaaaagctagcaatacttctgattcattgcaaggtgttccttccaaagataataaatcgtcaacaatttctcaactgacaggagcaagaatcacaaaattaggaatcagaagtctgaaatctgacatggccctagagaaagaatcagtacaagtgagtgggacaaagtgttccccggtaacaacatccagaatccttgactccattcctgaaggaaaacctgcattgcctagcccatccataatgcagaaagttcctgaggaatcagctctaaatccaaaagctcctaaagtgctcaaacacatcatgagatctccagctgtaagaaaatcacctagaactgttccggagttgggaaatgaaatgattctgggaagtggaactccaaaagctcatgtggataatgcaatctcctcacgtatgccacctgggatgggagccatttcagatctagagttgcctgtgttagaaaatgatggaaacatagaaaaagctgaggcttgtagaaaggagcttgaggatatatgcattctattgaaaaggaaacatgcagaagctaaagagctagcagttcgggctatcgttaacaacaatacgatgctgatgttaaaccacccgatgattgaggagaaaatttactctattcagaaatttgcgaacgacctgaaatccaagaagtacttatttgaggaagttggcaccattaactctggagcaaatgacttatccagcggagcatgggtaatgtaaatgcaacaaaagagctcaggcgtccagcgtaaatgcaatcttgaatgtgtttcaggaatatctctactgatggacgaagcgaaccttcggacgaaaaggcgtgtagagaagcttcgcacatgcgtgcgagtgaaagggtgttagctaaagttgatagcttcggcgacaatagagaggcttcgggtgcaagccaaaggaaaaggcgacgaaggccttaacccgcgcagccgaagatggagaaaatacgctactgccctaatgacgtctgtaaacattgaatggcacaattgtaatcctgtactaggtcggttcgtctcggttcgtctctcctataaatagatggacagtacctcgtataaagtacatttatccaggtgctacagcttcacatagcccagcctacgaaacaccttcgtgctatcttgcatcaagaagtcaaaggtatgattgtaagcttgtcttgtatgagaagagaaataaaatgttaaggcacacgagacgag

SEQ ID NO: 31931 - DNA, 2711 bp, Zea Mays
ctttcattctactgctatgagtagcaattccccgcgcgcgctctctccgccccggcactaggccaacggcaatcaccactcaccaggtgccaaggtgtcttgtcggccccttcaccaagtgttagtcgggtccttcgccggcgacgggcaccaccagtatggacgaatcacgaaaaagagctgtctctactgcaaatgatgaagactttggaaatgacttcctttcatcttggaagttaccaaaatcaggaaaagacacgattgacttcagtgttgactcagttcccaagagtagcaagaaattcagctttgacaacctagatgattttgggcttaatggagcctttgacaaattaccgtcctttcaaatgggcatgtctgatctggatttttctagccctgacaagaaaaaagtgaagcacaccagttcaaatgcagatctttttgaaaagaaaaaggaaactgacaaggacaatttctccttttcttttgatttcaatgagttgggaaagtttagtcttgatggaaagctaggaattgaagaaaagagtactaatagatttaatggcaaatctgaccctgtctcctcagaggttaaaaaggatacacaaagaggccttttagccaagggcaatgctatccttgaagagaataatagtaaggataaaatgcatacacttgatactcgcacttcaagaccttctcatctgacgaatcatgagaatgtgaagaatgccagtcaaccaacttcaaatatcgatgttgctgattcatctgacaagatgcaagaacataccagtgtcaatcctgcaacaatggaacaaactaaagtagactcagtgctcaatgacaatcctggagagcatcctaaagagatatatgcaatgaaggcagctgttaacataccttctcaggatttctcctgcggtgccatatctagtgaagatccaacacaagggccagcagatcatgtgaacagtaaagatgcacctatagtgaactgtggtaaagttcatgtatcgagggagagtaatgatgatgagcagtcgaatggtttacaatccagggacaccagcattattaattccaatgtgtcaagaagaccgtcgggccaatttaactcccagaatgaggttcttgaggaaagtgtttcgcttaatgaaggaagtcaagacaaccaaagttttagtggcgctcctaagaagtttttaaagaagacatcacatgggacaacaaataccgaggaagagatttcaggtcccaagattctctcttgttcagtgcagagggaaatcagaagtgttgaacctgcaccgatgaaggagagaggaagcttctctcttttatccaagtctgtacatatgaaagcaaccagggttgaactaacttcagaaacagccttaaatcaatcatccagtgcaagtaaagtgataaaaaagatgactacacatcctacagacttgaagagggaacacatgcaagctaatgcagtccctcacaaatctaaaactgctttatcaaaaacatacagcaagctagcatcaaatgggctattggccacctccatgaatgccaaagttgacacgaatgccaaattaggccttgagcctcctatctcggggaagtcgtctctactgaatgctcgaagcagcacaccacatagcgctggacataaagttgttgcaagtcatgtgcttctaaaagctagcaatacttctgattcattgcaaggtgttccttccaaagataataaatcgtcaacaatttctcaactgacaggagcaaggtataatattcccctccagatattattttccttctaaacttacatagtggcagctaaaataatctatctgaatttagaatcacaaaattaggaatcagaagtctgaaatctgacatggccctagagaaagaatcagtacaagtgagtgggacaaagtgttccccggtaacaacatccagaatccttgactccattcctgaaggaaaacctgcattgcctagcccatccataatgcagaaagttcctgaggaatcagctctaaatccaaaagctcctaaagtgctcaaacacatcatgagatctccagctgtaagaaaatcacctagaactgttccggagttgggaaatgaaatgatatgcattctattgaaaaggaaacatgcagaagctaaagagctagcagttcgggctatcgttaacaacaatacgatgctgatgttaaaccacccgatgattgaggagaaaatttactctattcagaaatttgcgaacgacctgaaatccaagaagtacttatttgaggaagttggcaccattaactctcactgacgtgggacaaatgcagggagcaaatgacttatccagcggagcatgggtaatgtaaatgcaacaaaagagctcaggcgtccagcgtaaatgcaatcttgaagtaacttgaataactaccttcctcgtgcattctgctacatggttggcttctgtagatgcgtccgtttacactttacacagcgtagcaactgttgagtgacctaatacttctagtagtgagatatgaccttgtggactaaatgactagatgggcactgctgtactaggtagaagttgcaagagcacagtgtagacaaccatggtggttgatgactaggccgccctttctaccctgagtttgacgtatgcggtcaaaagctatagtaatttttgttgc

SEQ ID NO: 31932 - DNA, 2642 bp, Zea Mays
tttcattctactgctatgagtagcaattccccgcgcgcgctctctccgccccggcactaggccaacggcaatcaccactcaccaggtgccaaggtgtcttgtcggccccttcaccaagtgttagtcgggtccttcgccggcgacgggcaccaccagtatggacgaatcacgaaaaagagctgtctctactgcaaatggtaaaaatataagttcatcccttgatgaagactttggaaatgacttcctttcatcttggaagttaccaaaatcaggaaaagacacgattgacttcagtgttgactcagttcccaagagtagcaagaaattcagctttgacaacctagatgattttgggcttaatggagcctttgacaaattaccgtcctttcaaatgggcatgtctgatctggatttttctagccctgacaagaaaaaagtgaagcacaccagttcaaatgcagatctttttgaaaagaaaaaggaaactgacaaggacaatttctccttttcttttgatttcaatgagttgggaaagtttagtcttgatggaaagctaggaattgaagaaaagagtactaatagatttaatggcaaatctgaccctgtctcctcagaggttaaaaaggatacacaaagaggccttttagccaagggcaatgctatccttgaagagaataatagtaaggataaaatgcatacacttgatactcgcacttcaagaccttctcatctgacgaatcatgagaatgtgaagaatgccagtcaaccaacttcaaatatcgatgttgctgattcatctgacaagatgcaagaacataccagtgtcaatcctgcaacaatggaacaaactaaagtagactcagtgctcaatgacaatcctggagagcatcctaaagagatatatgcaatgaaggcagctgttaacataccttctcaggatttctcctgcggtgccatatctagtgaagatccaacacaagggccagcagatcatgtgaacagtaaagatgcacctatagtgaactgtggtaaagttcatgtatcgagggagagtaatgatgatgagcagtcgaatggtttacaatccagggacaccagcattattaattccaatgtgtcaagaagaccgtcgggccaatttaactcccagaatgaggttcttgaggaaagtgtttcgcttaatgaaggaagtcaagacaaccaaagttttagtggcgctcctaagaagtttttaaagaagacatcacatgggacaacaaataccgaggaagagatttcaggtcccaagattctctcttgttcagtgcagagggaaatcagaagtgttgaacctgcaccgatgaaggagagaggaagcttctctcttttatccaagtctgtacatatgaaagcaaccagggttgaactaacttcagaaacagccttaaatcaatcatccagtgcaagtaaagtgataaaaaagatgactacacatcctacagacttgaagagggaacacatgcaagctaatgcagtccctcacaaatctaaaactgctttatcaaaaacatacagcaagctagcatcaaatgggctattggccacctccatgaatgccaaagttgacacgaatgccaaattaggccttgagcctcctatctcggggaagtcgtctctactgaatgctcgaagcagcacaccacatagcgctggacataaagttgttgcaagtcatgtgcttctaaaagctagcaatacttctgattcattgcaaggtgttccttccaaagataataaatcgtcaacaatttctcaactgacaggagcaagaatcacaaaattaggaatcagaagtctgaaatctgacatggccctagagaaagaatcagtacaagtgagtgggacaaagtgttccccggtaacaacatccagaatccttgactccattcctgaaggaaaacctgcattgcctagcccatccataatgcagaaagttcctgaggaatcagctctaaatccaaaagctcctaaagtgctcaaacacatcatgagatctccagctgtaagaaaatcacctagaactgttccggagttgggaaatgaaatgattctgggaagtggaactccaaaagctcatgtggataatgcaatctcctcacgtatgccacctgggatgggagccatttcagatctagagttgcctgtgttagaaaatgatggaaacatagaaaaagctgaggcttgtagaaaggagcttgaggatatatgcattctattgaaaaggaaacatgcagaagctaaagagctagcagttcgggctatcgttaacaacaatacgatgctgatgttaaaccacccgatgattgaggagaaaatatcctaagggggcgtttggatcccttcattttagaggaattggaattcactcaataaaataacttatttagtttggaatttgacattccaccactttccaaagtttagatataagtctatctcaaattcatggggtggaggatgggaaatgactttatgtattagtagaatttgtttctactctgtaacttacatgacactcttcgtctcactcttctatagtaaaaatgtagcacataaatatctctgacatcttgctaataatagtatacaaatatattttgcat

SEQ ID NO: 31933 - DNA, 2880 bp, Zea Mays
tttcattctactgctatgagtagcaattccccgcgcgcgctctctccgccccggcactaggccaacggcaatcaccactcaccaggtgccaaggtgtcttgtcggccccttcaccaagtgttagtcgggtccttcgccggcgacgggcaccaccagtatggacgaatcacgaaaaagagctgtctctactgcaaatggtaaaaatataagttcatcccttgatgaagactttggaaatgacttcctttcatcttggaagttaccaaaatcaggaaaagacacgattgacttcagtgttgactcagttcccaagagtagcaagaaattcagctttgacaacctagatgattttgggcttaatggagcctttgacaaattaccgtcctttcaaatgggcatgtctgatctggatttttctagccctgacaagaaaaaagtgaagcacaccagttcaaatgcagatctttttgaaaagaaaaaggaaactgacaaggacaatttctccttttcttttgatttcaatgagttgggaaagtttagtcttgatggaaagctaggaattgaagaaaagagtactaatagatttaatggcaaatctgaccctgtctcctcagaggttaaaaaggatacacaaagaggccttttagccaagggcaatgctatccttgaagagaataatagtaaggataaaatgcatacacttgatactcgcacttcaagaccttctcatctgacgaatcatgagaatgtgaagaatgccagtcaaccaacttcaaatatcgatgttgctgattcatctgacaagatgcaagaacataccagtgtcaatcctgcaacaatggaacaaactaaagtagactcagtgctcaatgacaatcctggagagcatcctaaagagatatatgcaatgaaggcagctgttaacataccttctcaggatttctcctgcggtgccatatctagtgaagatccaacacaagggccagcagatcatgtgaacagtaaagatgcacctatagtgaactgtggtaaagttcatgtatcgagggagagtaatgatgatgagcagtcgaatggtttacaatccagggacaccagcattattaattccaatgtgtcaagaagaccgtcgggccaatttaactcccagaatgaggttcttgaggaaagtgtttcgcttaatgaaggaagtcaagacaaccaaagttttagtggcgctcctaagaagtttttaaagaagacatcacatgggacaacaaataccgaggaagagatttcaggtcccaagattctctcttgttcagtgcagagggaaatcagaagtgttgaacctgcaccgatgaaggagagaggaagcttctctcttttatccaagtctgtacatatgaaagcaaccagggttgaactaacttcagaaacagccttaaatcaatcatccagtgcaagtaaagtgataaaaaagatgactacacatcctacagacttgaagagggaacacatgcaagctaatgcagtccctcacaaatctaaaactgctttatcaaaaacatacagcaagctagcatcaaatgggctattggccacctccatgaatgccaaagttgacacgaatgccaaattaggccttgagcctcctatctcggggaagtcgtctctactgaatgctcgaagcagcacaccacatagcgctggacataaagttgttgcaagtcatgtgcttctaaaagctagcaatacttctgattcattgcaaggtgttccttccaaagataataaatcgtcaacaatttctcaactgacaggagcaagaatcacaaaattaggaatcagaagtctgaaatctgacatggccctagagaaagaatcagtacaagtgagtgggacaaagtgttccccggtaacaacatccagaatccttgactccattcctgaaggaaaacctgcattgcctagcccatccataatgcagaaagttcctgaggaatcagctctaaatccaaaagctcctaaagtgctcaaacacatcatgagatctccagctgtaagaaaatcacctagaactgttccggagttgggaaatgaaatgattctgggaagtggaactccaaaagctcatgtggataatgcaatctcctcacgtatgccacctgggatgggagccatttcagatctagagttgcctgtgttagaaaatgatggaaacatagaaaaagctgaggcttgtagaaaggagcttgaggatatatgcattctattgaaaaggaaacatgcagaagctaaagagctagcagttcgggctatcgttaacaacaatacgatgctgatgttaaaccacccgatgattgaggagaaaatttactctattcagaaatttgcgaacgacctgaaatccaagaagtacttatttgaggaagttggcaccattaactctcactgacgtgggacaaatgcagggagcaaatgacttatccagcggagcatgggtaatgtaaatgcaacaaaagagctcaggcgtccagcgtaaatgcaatcttgaagtaacttgaataactaccttcctcgtgcattctgctacatggttggcttctgtagatgcgtccgtttacactttacacagcgtagcaactgttgagtgacctaatacttctagtagtgagatatgaccttgtggactaaatgactagatgggcactgctgtactaggtaatacctggttccatctattccaattgcagttggtgacaaaacgttcacattggatttatgataggtagaagttgcaagagcacagtgtagacaaccatggtggttgatgactaggccgccctttctaccctgagtttgacgtatgcggtcaaaagctatagtaatttttgttgc

SEQ ID NO: 31934 - DNA, 2678 bp, Zea Mays
tttcattctactgctatgagtagcaattccccgcgcgcgctctctccgccccggcactaggccaacggcaatcaccactcaccaggtgccaaggtgtcttgtcggccccttcaccaagtgttagtcgggtccttcgccggcgacgggcaccaccagtatggacgaatcacgaaaaagagctgtctctactgcaaatgatgaagactttggaaatgacttcctttcatcttggaagttaccaaaatcaggaaaagacacgattgacttcagtgttgactcagttcccaagagtagcaagaaattcagctttgacaacctagatgattttgggcttaatggagcctttgacaaattaccgtcctttcaaatgggcatgtctgatctggatttttctagccctgacaagaaaaaagtgaagcacaccagttcaaatgcagatctttttgaaaagaaaaaggaaactgacaaggacaatttctccttttcttttgatttcaatgagttgggaaagtttagtcttgatggaaagctaggaattgaagaaaagagtactaatagatttaatggcaaatctgaccctgtctcctcagaggttaaaaaggatacacaaagaggccttttagccaagggcaatgctatccttgaagagaataatagtaaggataaaatgcatacacttgatactcgcacttcaagaccttctcatctgacgaatcatgagaatgtgaagaatgccagtcaaccaacttcaaatatcgatgttgctgattcatctgacaagatgcaagaacataccagtgtcaatcctgcaacaatggaacaaactaaagtagactcagtgctcaatgacaatcctggagagcatcctaaagagatatatgcaatgaaggcagctgttaacataccttctcaggatttctcctgcggtgccatatctagtgaagatccaacacaagggccagcagatcatgtgaacagtaaagatgcacctatagtgaactgtggtaaagttcatgtatcgagggagagtaatgatgatgagcagtcgaatggtttacaatccagggacaccagcattattaattccaatgtgtcaagaagaccgtcgggccaatttaactcccagaatgaggttcttgaggaaagtgtttcgcttaatgaaggaagtcaagacaaccaaagttttagtggcgctcctaagaagtttttaaagaagacatcacatgggacaacaaataccgaggaagagatttcaggtcccaagattctctcttgttcagtgcagagggaaatcagaagtgttgaacctgcaccgatgaaggagagaggaagcttctctcttttatccaagtctgtacatatgaaagcaaccagggttgaactaacttcagaaacagccttaaatcaatcatccagtgcaagtaaagtgataaaaaagatgactacacatcctacagacttgaagagggaacacatgcaagctaatgcagtccctcacaaatctaaaactgctttatcaaaaacatacagcaagctagcatcaaatgggctattggccacctccatgaatgccaaagttgacacgaatgccaaattaggccttgagcctcctatctcggggaagtcgtctctactgaatgctcgaagcagcacaccacatagcgctggacataaagttgttgcaagtcatgtgcttctaaaagctagcaatacttctgattcattgcaaggtgttccttccaaagataataaatcgtcaacaatttctcaactgacaggagcaagaatcacaaaattaggaatcagaagtctgaaatctgacatggccctagagaaagaatcagtacaagtgagtgggacaaagtgttccccggtaacaacatccagaatccttgactccattcctgaaggaaaacctgcattgcctagcccatccataatgcagaaagttcctgaggaatcagctctaaatccaaaagctcctaaagtgctcaaacacatcatgagatctccagctgtaagaaaatcacctagaactgttccggagttgggaaatgaaatgatatgcattctattgaaaaggaaacatgcagaagctaaagagctagcagttcgggctatcgttaacaacaatacgatgctgatgttaaaccacccgatgattgaggagaaaatttactctattcagaaatttgcgaacgacctgaaatccaagaagtacttatttgaggaagttggcaccattaactctggagcaaatgacttatccagcggagcatgggtaatgtaaatgcaacaaaagagctcaggcgtccagcgtaaatgcaatcttgaagtaacttgaataactaccttcctcgtgcattctgctacatggttggcttctgtagatgcgtccgtttacactttacacagcgtagcaactgttgagtgacctaatacttctagtagtgagatatgaccttgtggactaaatgactagatgggcactgctgtactaggtaatacctggttccatctattccaattgcagttggtgacaaaacgttcacattggatttatgataggtagaagttgcaagagcacagtgtagacaaccatggtggttgatgactaggccgccctttctaccctgagtttgacgtatgcggtcaaaagctatagtaatttttgttgc

SEQ ID NO: 31935 - DNA, 2941 bp, Zea Mays
tttcattctactgctatgagtagcaattccccgcgcgcgctctctccgccccggcactaggccaacggcaatcaccactcaccaggtgccaaggtgtcttgtcggccccttcaccaagtgttagtcgggtccttcgccggcgacgggcaccaccagtatggacgaatcacgaaaaagagctgtctctactgcaaatggtaaaaatataagttcatcccttgatgaagactttggaaatgacttcctttcatcttggaagttaccaaaatcaggaaaagacacgattgacttcagtgttgactcagttcccaagagtagcaagaaattcagctttgacaacctagatgattttgggcttaatggagcctttgacaaattaccgtcctttcaaatgggcatgtctgatctggatttttctagccctgacaagaaaaaagtgaagcacaccagttcaaatgcagatctttttgaaaagaaaaaggaaactgacaaggacaatttctccttttcttttgatttcaatgagttgggaaagtttagtcttgatggaaagctaggaattgaagaaaagagtactaatagatttaatggcaaatctgaccctgtctcctcagaggttaaaaaggatacacaaagaggccttttagccaagggcaatgctatccttgaagagaataatagtaaggataaaatgcatacacttgatactcgcacttcaagaccttctcatctgacgaatcatgagaatgtgaagaatgccagtcaaccaacttcaaatatcgatgttgctgattcatctgacaagatgcaagaacataccagtgtcaatcctgcaacaatggaacaaactaaagtagactcagtgctcaatgacaatcctggagagcatcctaaagagatatatgcaatgaaggcagctgttaacataccttctcaggatttctcctgcggtgccatatctagtgaagatccaacacaagggccagcagatcatgtgaacagtaaagatgcacctatagtgaactgtggtaaagttcatgtatcgagggagagtaatgatgatgagcagtcgaatggtttacaatccagggacaccagcattattaattccaatgtgtcaagaagaccgtcgggccaatttaactcccagaatgaggttcttgaggaaagtgtttcgcttaatgaaggaagtcaagacaaccaaagttttagtggcgctcctaagaagtttttaaagaagacatcacatgggacaacaaataccgaggaagagatttcaggtcccaagattctctcttgttcagtgcagagggaaatcagaagtgttgaacctgcaccgatgaaggagagaggaagcttctctcttttatccaagtctgtacatatgaaagcaaccagggttgaactaacttcagaaacagccttaaatcaatcatccagtgcaagtaaagtgataaaaaagatgactacacatcctacagacttgaagagggaacacatgcaagctaatgcagtccctcacaaatctaaaactgctttatcaaaaacatacagcaagctagcatcaaatgggctattggccacctccatgaatgccaaagttgacacgaatgccaaattaggccttgagcctcctatctcggggaagtcgtctctactgaatgctcgaagcagcacaccacatagcgctggacataaagttgttgcaagtcatgtgcttctaaaagctagcaatacttctgattcattgcaaggtgttccttccaaagataataaatcgtcaacaatttctcaactgacaggagcaagaatcacaaaattaggaatcagaagtctgaaatctgacatggccctagagaaagaatcagtacaagtgagtgggacaaagtgttccccggtaacaacatccagaatccttgactccattcctgaaggaaaacctgcattgcctagcccatccataatgcagaaagttcctgaggaatcagctctaaatccaaaagctcctaaagtgctcaaacacatcatgagatctccagctgtaagaaaatcacctagaactgttccggagttgggaaatgaaatgattctgggaagtggaactccaaaagctcatgtggataatgcaatctcctcacgtatgccacctgggatgggagccatttcagatctagagttgcctgtgttagaaaatgatggaaacatagaaaaagctgaggcttgtagaaaggagcttgaggatatatgcattctattgaaaaggaaacatgcagaagctaaagagctagcagttcgggctatcgttaacaacaatacgatgctgatgttaaaccacccgatgattgaggagaaaatttactctattcagaaatttgcgaacgacctgaaatccaagaagtacttatttgaggaagttggcaccattaactctcactgacgtgggacaaatgcagggagcaaatgacttatccagcggagcatggtgtgtttcaggaatatctctactgatggacgaagcgaaccttcggacgaaaaggcgtgtagagaagcttcgcacatgcgtgcgagtgaaagggtgttagctaaagttgatagcttcggcgacaatagagaggcttcgggtgcaagccaaaggaaaaggcgacgaaggccttaacccgcgcagccgaagatggagaaaatacgctactgccctaatgacgtctgtaaacattgaatggcacaattgtaatcctgtactaggtcggttcgtctcggttcgtctctcctataaatagatggacagtacctcgtataaagtacatttatccaggtgctacagcttcacatagcccagcctacgaaacaccttcgtgctatcttgcatcaagaagtcaaaggtatgattgtaagcttgtcttgtatgagaagagaaataaaatgttaaggcacacgagacgag

SEQ ID NO: 31936 - DNA, 2995 bp, Zea Mays
tttcattctactgctatgagtagcaattccccgcgcgcgctctctccgccccggcactaggccaacggcaatcaccactcaccaggtgccaaggtgtcttgtcggccccttcaccaagtgttagtcgggtccttcgccggcgacgggcaccaccagtatggacgaatcacgaaaaagagctgtctctactgcaaatggtaaaaatataagttcatcccttgatgaagactttggaaatgacttcctttcatcttggaagttaccaaaatcaggaaaagacacgattgacttcagtgttgactcagttcccaagagtagcaagaaattcagctttgacaacctagatgattttgggcttaatggagcctttgacaaattaccgtcctttcaaatgggcatgtctgatctggatttttctagccctgacaagaaaaaagtgaagcacaccagttcaaatgcagatctttttgaaaagaaaaaggaaactgacaaggacaatttctccttttcttttgatttcaatgagttgggaaagtttagtcttgatggaaagctaggaattgaagaaaagagtactaatagatttaatggcaaatctgaccctgtctcctcagaggttaaaaaggatacacaaagaggccttttagccaagggcaatgctatccttgaagagaataatagtaaggataaaatgcatacacttgatactcgcacttcaagaccttctcatctgacgaatcatgagaatgtgaagaatgccagtcaaccaacttcaaatatcgatgttgctgattcatctgacaagatgcaagaacataccagtgtcaatcctgcaacaatggaacaaactaaagtagactcagtgctcaatgacaatcctggagagcatcctaaagagatatatgcaatgaaggcagctgttaacataccttctcaggatttctcctgcggtgccatatctagtgaagatccaacacaagggccagcagatcatgtgaacagtaaagatgcacctatagtgaactgtggtaaagttcatgtatcgagggagagtaatgatgatgagcagtcgaatggtttacaatccagggacaccagcattattaattccaatgtgtcaagaagaccgtcgggccaatttaactcccagaatgaggttcttgaggaaagtgtttcgcttaatgaaggaagtcaagacaaccaaagttttagtggcgctcctaagaagtttttaaagaagacatcacatgggacaacaaataccgaggaagagatttcaggtcccaagattctctcttgttcagtgcagagggaaatcagaagtgttgaacctgcaccgatgaaggagagaggaagcttctctcttttatccaagtctgtacatatgaaagcaaccagggttgaactaacttcagaaacagccttaaatcaatcatccagtgcaagtaaagtgataaaaaagatgactacacatcctacagacttgaagagggaacacatgcaagctaatgcagtccctcacaaatctaaaactgctttatcaaaaacatacagcaagctagcatcaaatgggctattggccacctccatgaatgccaaagttgacacgaatgccaaattaggccttgagcctcctatctcggggaagtcgtctctactgaatgctcgaagcagcacaccacatagcgctggacataaagttgttgcaagtcatgtgcttctaaaagctagcaatacttctgattcattgcaaggtgttccttccaaagataataaatcgtcaacaatttctcaactgacaggagcaagaatcacaaaattaggaatcagaagtctgaaatctgacatggccctagagaaagaatcagtacaagtgagtgggacaaagtgttccccggtaacaacatccagaatccttgactccattcctgaaggaaaacctgcattgcctagcccatccataatgcagaaagttcctgaggaatcagctctaaatccaaaagctcctaaagtgctcaaacacatcatgagatctccagctgtaagaaaatcacctagaactgttccggagttgggaaatgaaatgattctgggaagtggaactccaaaagctcatgtggataatgcaatctcctcacgtatgccacctgggatgggagccatttcagatctagagttgcctgtgttagaaaatgatggaaacatagaaaaagctgaggcttgtagaaaggagcttgaggatatatgcattctattgaaaaggaaacatgcagaagctaaagagctagcagttcgggctatcgttaacaacaatacgatgctgatgttaaaccacccgatgattgaggagaaaatttactctattcagaaatttgcgaacgacctgaaatccaagaagtacttatttgaggaagttggcaccattaactctcactgacgtgggacaaatgcagggagcaaatgacttatccagcggagcatgggtaatgtaaatgcaacaaaagagctcaggcgtccagcgtaaatgcaatcttgaatgtgtttcaggaatatctctactgatggacgaagcgaaccttcggacgaaaaggcgtgtagagaagcttcgcacatgcgtgcgagtgaaagggtgttagctaaagttgatagcttcggcgacaatagagaggcttcgggtgcaagccaaaggaaaaggcgacgaaggccttaacccgcgcagccgaagatggagaaaatacgctactgccctaatgacgtctgtaaacattgaatggcacaattgtaatcctgtactaggtcggttcgtctcggttcgtctctcctataaatagatggacagtacctcgtataaagtacatttatccaggtgctacagcttcacatagcccagcctacgaaacaccttcgtgctatcttgcatcaagaagtcaaaggtatgattgtaagcttgtcttgtatgagaagagaaataaaatgttaaggcacacgagacgag

SEQ ID NO: 31937 - DNA, 2525 bp, Zea Mays
tttctaacgtattaccccctttttccttgaatgtggtctgagtttgttgacagtatggacgaatcacgaaaaagagctgtctctactgcaaatggtaaaaatataagttcatcccttgatgaagactttggaaatgacttcctttcatcttggaagttaccaaaatcaggaaaagacacgattgacttcagtgttgactcagttcccaagagtagcaagaaattcagctttgacaacctagatgattttgggcttaatggagcctttgacaaattaccgtcctttcaaatgggcatgtctgatctggatttttctagccctgacaagaaaaaagtgaagcacaccagttcaaatgcagatctttttgaaaagaaaaaggaaactgacaaggacaatttctccttttcttttgatttcaatgagttgggaaagtttagtcttgatggaaagctaggaattgaagaaaagagtactaatagatttaatggcaaatctgaccctgtctcctcagaggttaaaaaggatacacaaagaggccttttagccaagggcaatgctatccttgaagagaataatagtaaggataaaatgcatacacttgatactcgcacttcaagaccttctcatctgacgaatcatgagaatgtgaagaatgccagtcaaccaacttcaaatatcgatgttgctgattcatctgacaagatgcaagaacataccagtgtcaatcctgcaacaatggaacaaactaaagtagactcagtgctcaatgacaatcctggagagcatcctaaagagatatatgcaatgaaggcagctgttaacataccttctcaggatttctcctgcggtgccatatctagtgaagatccaacacaagggccagcagatcatgtgaacagtaaagatgcacctatagtgaactgtggtaaagttcatgtatcgagggagagtaatgatgatgagcagtcgaatggtttacaatccagggacaccagcattattaattccaatgtgtcaagaagaccgtcgggccaatttaactcccagaatgaggttcttgaggaaagtgtttcgcttaatgaaggaagtcaagacaaccaaagttttagtggcgctcctaagaagtttttaaagaagacatcacatgggacaacaaataccgaggaagagatttcaggtcccaagattctctcttgttcagtgcagagggaaatcagaagtgttgaacctgcaccgatgaaggagagaggaagcttctctcttttatccaagtctgtacatatgaaagcaaccagggttgaactaacttcagaaacagccttaaatcaatcatccagtgcaagtaaagtgataaaaaagatgactacacatcctacagacttgaagagggaacacatgcaagctaatgcagtccctcacaaatctaaaactgctttatcaaaaacatacagcaagctagcatcaaatgggctattggccacctccatgaatgccaaagttgacacgaatgccaaattaggccttgagcctcctatctcggggaagtcgtctctactgaatgctcgaagcagcacaccacatagcgctggacataaagttgttgcaagtcatgtgcttctaaaagctagcaatacttctgattcattgcaaggtgttccttccaaagataataaatcgtcaacaatttctcaactgacaggagcaaggaatcagaagtctgaaatctgacatggccctagagaaagaatcagtacaagtgagtgggacaaagtgttccccggtaacaacatccagaatccttgactccattcctgaaggaaaacctgcattgcctagcccatccataatgcagaaagttcctgaggaatcagctctaaatccaaaagctcctaaagtgctcaaacacatcatgagatctccagctgtaagaaaatcacctagaactgttccggagttgggaaatgaaatgattctgggaagtggaactccaaaagctcatgtggataatgcaatctcctcacgtatgccacctgggatgggagccatttcagatctagagttgcctgtgttagaaaatgatggaaacatagaaaaagctgaggcttgtagaaaggagcttgaggatatatgcattctattgaaaaggaaacatgcagaagctaaagagctagcagttcgggctatcgttaacaacaatacgatgctgatgttaaaccacccgatgattgaggagaaaatatcctaagggggcgtttggatcccttcattttagaggaattggaattcactcaataaaataacttatttagtttggaatttgacattccaccactttccaaagtttagatataagtctatctcaaattcatggggtggaggatgggaaatgactttatgtattagtagaatttgtttctactctgtaacttacatgacactcttcgtctcactcttctatagtaaaaatgtagcacataaatatctctgacatcttgctaataatagtatacaaatatattttgcat

SEQ ID NO: 31938 - DNA, 2763 bp, Zea Mays
tttctaacgtattaccccctttttccttgaatgtggtctgagtttgttgacagtatggacgaatcacgaaaaagagctgtctctactgcaaatggtaaaaatataagttcatcccttgatgaagactttggaaatgacttcctttcatcttggaagttaccaaaatcaggaaaagacacgattgacttcagtgttgactcagttcccaagagtagcaagaaattcagctttgacaacctagatgattttgggcttaatggagcctttgacaaattaccgtcctttcaaatgggcatgtctgatctggatttttctagccctgacaagaaaaaagtgaagcacaccagttcaaatgcagatctttttgaaaagaaaaaggaaactgacaaggacaatttctccttttcttttgatttcaatgagttgggaaagtttagtcttgatggaaagctaggaattgaagaaaagagtactaatagatttaatggcaaatctgaccctgtctcctcagaggttaaaaaggatacacaaagaggccttttagccaagggcaatgctatccttgaagagaataatagtaaggataaaatgcatacacttgatactcgcacttcaagaccttctcatctgacgaatcatgagaatgtgaagaatgccagtcaaccaacttcaaatatcgatgttgctgattcatctgacaagatgcaagaacataccagtgtcaatcctgcaacaatggaacaaactaaagtagactcagtgctcaatgacaatcctggagagcatcctaaagagatatatgcaatgaaggcagctgttaacataccttctcaggatttctcctgcggtgccatatctagtgaagatccaacacaagggccagcagatcatgtgaacagtaaagatgcacctatagtgaactgtggtaaagttcatgtatcgagggagagtaatgatgatgagcagtcgaatggtttacaatccagggacaccagcattattaattccaatgtgtcaagaagaccgtcgggccaatttaactcccagaatgaggttcttgaggaaagtgtttcgcttaatgaaggaagtcaagacaaccaaagttttagtggcgctcctaagaagtttttaaagaagacatcacatgggacaacaaataccgaggaagagatttcaggtcccaagattctctcttgttcagtgcagagggaaatcagaagtgttgaacctgcaccgatgaaggagagaggaagcttctctcttttatccaagtctgtacatatgaaagcaaccagggttgaactaacttcagaaacagccttaaatcaatcatccagtgcaagtaaagtgataaaaaagatgactacacatcctacagacttgaagagggaacacatgcaagctaatgcagtccctcacaaatctaaaactgctttatcaaaaacatacagcaagctagcatcaaatgggctattggccacctccatgaatgccaaagttgacacgaatgccaaattaggccttgagcctcctatctcggggaagtcgtctctactgaatgctcgaagcagcacaccacatagcgctggacataaagttgttgcaagtcatgtgcttctaaaagctagcaatacttctgattcattgcaaggtgttccttccaaagataataaatcgtcaacaatttctcaactgacaggagcaaggaatcagaagtctgaaatctgacatggccctagagaaagaatcagtacaagtgagtgggacaaagtgttccccggtaacaacatccagaatccttgactccattcctgaaggaaaacctgcattgcctagcccatccataatgcagaaagttcctgaggaatcagctctaaatccaaaagctcctaaagtgctcaaacacatcatgagatctccagctgtaagaaaatcacctagaactgttccggagttgggaaatgaaatgattctgggaagtggaactccaaaagctcatgtggataatgcaatctcctcacgtatgccacctgggatgggagccatttcagatctagagttgcctgtgttagaaaatgatggaaacatagaaaaagctgaggcttgtagaaaggagcttgaggatatatgcattctattgaaaaggaaacatgcagaagctaaagagctagcagttcgggctatcgttaacaacaatacgatgctgatgttaaaccacccgatgattgaggagaaaatttactctattcagaaatttgcgaacgacctgaaatccaagaagtacttatttgaggaagttggcaccattaactctcactgacgtgggacaaatgcagggagcaaatgacttatccagcggagcatgggtaatgtaaatgcaacaaaagagctcaggcgtccagcgtaaatgcaatcttgaagtaacttgaataactaccttcctcgtgcattctgctacatggttggcttctgtagatgcgtccgtttacactttacacagcgtagcaactgttgagtgacctaatacttctagtagtgagatatgaccttgtggactaaatgactagatgggcactgctgtactaggtaatacctggttccatctattccaattgcagttggtgacaaaacgttcacattggatttatgataggtagaagttgcaagagcacagtgtagacaaccatggtggttgatgactaggccgccctttctaccctgagtttgacgtatgcggtcaaaagctatagtaatttttgttgc

SEQ ID NO: 31939 - DNA, 2755 bp, Zea Mays
tttctaacgtattaccccctttttccttgaatgtggtctgagtttgttgacagtatggacgaatcacgaaaaagagctgtctctactgcaaatggtaaaaatataagttcatcccttgatgaagactttggaaatgacttcctttcatcttggaagttaccaaaatcaggaaaagacacgattgacttcagtgttgactcagttcccaagagtagcaagaaattcagctttgacaacctagatgattttgggcttaatggagcctttgacaaattaccgtcctttcaaatgggcatgtctgatctggatttttctagccctgacaagaaaaaagtgaagcacaccagttcaaatgcagatctttttgaaaagaaaaaggaaactgacaaggacaatttctccttttcttttgatttcaatgagttgggaaagtttagtcttgatggaaagctaggaattgaagaaaagagtactaatagatttaatggcaaatctgaccctgtctcctcagaggttaaaaaggatacacaaagaggccttttagccaagggcaatgctatccttgaagagaataatagtaaggataaaatgcatacacttgatactcgcacttcaagaccttctcatctgacgaatcatgagaatgtgaagaatgccagtcaaccaacttcaaatatcgatgttgctgattcatctgacaagatgcaagaacataccagtgtcaatcctgcaacaatggaacaaactaaagtagactcagtgctcaatgacaatcctggagagcatcctaaagagatatatgcaatgaaggcagctgttaacataccttctcaggatttctcctgcggtgccatatctagtgaagatccaacacaagggccagcagatcatgtgaacagtaaagatgcacctatagtgaactgtggtaaagttcatgtatcgagggagagtaatgatgatgagcagtcgaatggtttacaatccagggacaccagcattattaattccaatgtgtcaagaagaccgtcgggccaatttaactcccagaatgaggttcttgaggaaagtgtttcgcttaatgaaggaagtcaagacaaccaaagttttagtggcgctcctaagaagtttttaaagaagacatcacatgggacaacaaataccgaggaagagatttcaggtcccaagattctctcttgttcagtgcagagggaaatcagaagtgttgaacctgcaccgatgaaggagagaggaagcttctctcttttatccaagtctgtacatatgaaagcaaccagggttgaactaacttcagaaacagccttaaatcaatcatccagtgcaagtaaagtgataaaaaagatgactacacatcctacagacttgaagagggaacacatgcaagctaatgcagtccctcacaaatctaaaactgctttatcaaaaacatacagcaagctagcatcaaatgggctattggccacctccatgaatgccaaagttgacacgaatgccaaattaggccttgagcctcctatctcggggaagtcgtctctactgaatgctcgaagcagcacaccacatagcgctggacataaagttgttgcaagtcatgtgcttctaaaagctagcaatacttctgattcattgcaaggtgttccttccaaagataataaatcgtcaacaatttctcaactgacaggagcaagaatcacaaaattaggaatcagaagtctgaaatctgacatggccctagagaaagaatcagtacaagtgagtgggacaaagtgttccccggtaacaacatccagaatccttgactccattcctgaaggaaaacctgcattgcctagcccatccataatgcagaaagttcctgaggaatcagctctaaatccaaaagctcctaaagtgctcaaacacatcatgagatctccagctgtaagaaaatcacctagaactgttccggagttgggaaatgaaatgattctgggaagtggaactccaaaagctcatgtggataatgcaatctcctcacgtatgccacctgggatgggagccatttcagatctagagttgcctgtgttagaaaatgatggaaacatagaaaaagctgaggcttgtagaaaggagcttgaggatatatgcattctattgaaaaggaaacatgcagaagctaaagagctagcagttcgggctatcgttaacaacaatacgatgctgatgttaaaccacccgatgattgaggagaaaatttactctattcagaaatttgcgaacgacctgaaatccaagaagtacttatttgaggaagttggcaccattaactctggagcaaatgacttatccagcggagcatgggtaatgtaaatgcaacaaaagagctcaggcgtccagcgtaaatgcaatcttgaagtaacttgaataactaccttcctcgtgcattctgctacatggttggcttctgtagatgcgtccgtttacactttacacagcgtagcaactgttgagtgacctaatacttctagtagtgagatatgaccttgtggactaaatgactagatgggcactgctgtactaggtaatacctggttccatctattccaattgcagttggtgacaaaacgttcacattggatttatgataggtagaagttgcaagagcacagtgtagacaaccatggtggttgatgactaggccgccctttctaccctgagtttgacgtatgcggtcaaaagctatagtaatttttgttgc

SEQ ID NO: 31940 - DNA, 2599 bp, Zea Mays
tttctaacgtattaccccctttttccttgaatgtggtctgagtttgttgacagtatggacgaatcacgaaaaagagctgtctctactgcaaatggtaaaaatataagttcatcccttgatgaagactttggaaatgacttcctttcatcttggaagttaccaaaatcaggaaaagacacgattgacttcagtgttgactcagttcccaagagtagcaagaaattcagctttgacaacctagatgattttgggcttaatggagcctttgacaaattaccgtcctttcaaatgggcatgtctgatctggatttttctagccctgacaagaaaaaagtgaagcacaccagttcaaatgcagatctttttgaaaagaaaaaggaaactgacaaggacaatttctccttttcttttgatttcaatgagttgggaaagtttagtcttgatggaaagctaggaattgaagaaaagagtactaatagatttaatggcaaatctgaccctgtctcctcagaggttaaaaaggatacacaaagaggccttttagccaagggcaatgctatccttgaagagaataatagtaaggataaaatgcatacacttgatactcgcacttcaagaccttctcatctgacgaatcatgagaatgtgaagaatgccagtcaaccaacttcaaatatcgatgttgctgattcatctgacaagatgcaagaacataccagtgtcaatcctgcaacaatggaacaaactaaagtagactcagtgctcaatgacaatcctggagagcatcctaaagagatatatgcaatgaaggcagctgttaacataccttctcaggatttctcctgcggtgccatatctagtgaagatccaacacaagggccagcagatcatgtgaacagtaaagatgcacctatagtgaactgtggtaaagttcatgtatcgagggagagtaatgatgatgagcagtcgaatggtttacaatccagggacaccagcattattaattccaatgtgtcaagaagaccgtcgggccaatttaactcccagaatgaggttcttgaggaaagtgtttcgcttaatgaaggaagtcaagacaaccaaagttttagtggcgctcctaagaagtttttaaagaagacatcacatgggacaacaaataccgaggaagagatttcaggtcccaagattctctcttgttcagtgcagagggaaatcagaagtgttgaacctgcaccgatgaaggagagaggaagcttctctcttttatccaagtctgtacatatgaaagcaaccagggttgaactaacttcagaaacagccttaaatcaatcatccagtgcaagtaaagtgataaaaaagatgactacacatcctacagacttgaagagggaacacatgcaagctaatgcagtccctcacaaatctaaaactgctttatcaaaaacatacagcaagctagcatcaaatgggctattggccacctccatgaatgccaaagttgacacgaatgccaaattaggccttgagcctcctatctcggggaagtcgtctctactgaatgctcgaagcagcacaccacatagcgctggacataaagttgttgcaagtcatgtgcttctaaaagctagcaatacttctgattcattgcaaggtgttccttccaaagataataaatcgtcaacaatttctcaactgacaggagcaagaatcacaaaattaggaatcagaagtctgaaatctgacatggccctagagaaagaatcagtacaagtgagtgggacaaagtgttccccggtaacaacatccagaatccttgactccattcctgaaggaaaacctgcattgcctagcccatccataatgcagaaagttcctgaggaatcagctctaaatccaaaagctcctaaagtgctcaaacacatcatgagatctccagctgtaagaaaatcacctagaactgttccggagttgggaaatgaaatgatatgcattctattgaaaaggaaacatgcagaagctaaagagctagcagttcgggctatcgttaacaacaatacgatgctgatgttaaaccacccgatgattgaggagaaaatttactctattcagaaatttgcgaacgacctgaaatccaagaagtacttatttgaggaagttggcaccattaactctggagcaaatgacttatccagcggagcatgggtaatgtaaatgcaacaaaagagctcaggcgtccagcgtaaatgcaatcttgaagtaacttgaataactaccttcctcgtgcattctgctacatggttggcttctgtagatgcgtccgtttacactttacacagcgtagcaactgttgagtgacctaatacttctagtagtgagatatgaccttgtggactaaatgactagatgggcactgctgtactaggtaatacctggttccatctattccaattgcagttggtgacaaaacgttcacattggatttatgataggtagaagttgcaagagcacagtgtagacaaccatggtggttgatgactaggccgccctttctaccctgagtttgacgtatgcggtcaaaagctatagtaatttttgttgc

SEQ ID NO: 31941 - DNA, 3400 bp, Zea Mays
tacgtgcgctgcgcgcttccaatgccgcgcccgccgcttgctcgagctcgacgggatgccgcgtccaagcccgccgctctccgagtccctcttcaactccctcatcgcctcccgctcccgcaccggtcgcgttgtcgacgccctctcgctcctcacgcgcatgcttgctgccggcgtcgccccgaccgcgttcaccttctcaccgatcctcgcctcgccttccgccaccgcctgctgtgccgcgcagctgcacccgcacattctcaagaggggcctgctccactgcgagccctactcggggacctcgctagtggggttcttcgggcgaagcgggcgcttcgacgaggcgctcaaggtgttcggtgaaatgaccgtaaggagcgttgtcacctggaattgtctcatctattcgtttgtgcagtttggacacagccgcgctgcagtgtcctggttcagggagctcgtgagaagtggcgatggcttgtcagatggctcgtttgttgccatattgccttcgtttgggttgccagagcaagttcatggtgtaatgaacaaaattggaatgggttccctctcagcagttgcaaatgcattgctgaattcatactgtacttgtggtgcaatagatgtggcagagaagctattcaatgagataatgtttagagatgtggtttgttggaatacaatgataactggttttgcaaggagtcatgtcccagagagagcttttgagcttttcttgagtatgcaacgtcagggcatttttccaaatgaaattacatttgccagtgttctgtatgcttgcaccgttatagatggacacaaacatgggagatttgttcatgcgaaaattatcaagcacaatctcagcacaagtgtgtccgtgaacacttcattggttggtttctatgcaaattgtagtaggggtgatgctcataaagtgcttgaaggggttcatggaaatagcaccacgtgttggaatgctctgatttctggtcactctgattgtgatgatccaacttatttggttattgtgagacacatgctgcaatcagggattaaaccaaatgaagttactttgtcatctctcaaggatccatcactattggatctccagcaggttcactcattggtcataagattgggtcatggtggtaatgactatgtttcaagtgctatcatatcatcgtatgcttcacatggcattatttttgatgccttatcttatggagctgcactggatccagactcatgtagtgtttctatgaatgttttagctggtgtctgtaacaaagctcacatgtaccaagaaactaaggacctacttctacataagcgagatcgagatactatttcatggagcatactcattactgcttgcgcacggaatggtgatttcattgaagcttttggatttttcaggcagatgaggatctttgggcaccgttttgatagttatgtatgtgtgagcttgctgggcatttgtaccaaaaacaatagcctttatcttggtaagttgattcatggacttttcatcaagaccaattccagttgctctgacagttatgttgataatatgttgctagatatgtatgctaaatgtggtagaattgaagactgtctcagagtctttgaggaaatggaagacaggaaccttatatcatggacaactgtgatttcaggacttggacttaatggtttttctcgtaaggccttggcattgtttaaagccatggaaaaggatggctgcaaacctgacaaagtagcaattctagcagtcctgtcatcttgtagacatggtaggcttgtgcaggaggggatgaagatattcaaaaatttgaaagctgattattcaattgaagctgatatggagcattacatttgtgtggtggacatgctatgcaagtgtggttatttgaaggaagctgaggtcgtgattagaggcatgcctttccaaccaagcactgccatatgtcgcacattcctccaaggatgcaagacatatggtgttacagaggcacaagtttttagccagccgtggatcaaatagaattcctgttgcatggagggttaaacaaggataaggaaaaggtgagaaggatggctgctatttcggtgacctgggaacatagtcctcaagattcagccatttacgtctcaatgacaatgctcctctgggcacctgaatctgatacttttagtttctgaaagttacaagggaagggaattgtgcatgtccaaggaactgtacgattacttatattcaagtaatctatggaatgtgaagaactgaagaaccatgccatggcttaaattgtagtgagtgtgaagtatctactattatattcagttccatttatttattgaaaaacctcagttccatcagtaagggtgccaaaaggagggtaaaaggaaaacgctgattgttttggatttgccaaggtgcacctcagctgtgtacagccgatagagaggttgaagcaactggaatgggttcatatgaggaggtcagccggtcgttgcaagttaggatgtggctaatcggttgcaaagacgataaagcacaagtctagtacagacacacctactgacaccctgaggtacctggggcttttgacgaagcatgcacattggcaagtcaatcgagcaataacggtcactaggacacaggtcctgtttggaacggctgaaactattatgaaaaagctggcttgcgtctggctgtcctgaaaaactgttatctggagaagcacctgtctgaacgagctaggtatttaacagtctgattttttgatgggttgaagagatgctaaagatgtgtatcgaagccgaagccggagcctccttcacccgagccggagctgcaaatcgtggtcccgcctcatatatggaaaagaactctggcttctccaagtaaacaaaagcacttctccttgactccttgcatggtcgttcggtgtggctcctccggctttgccgctttggtatcgaagctgccgacggagacggagccggagtgccaccaaacaggccccaagtcttgatgtaaattgtgcaacgtctagaattgaaaatgctatacatctggccagtgcatccgactcccgtccgactgccagttgcatctttattttgctactgcacttctgcgccacttgatattctcggtcgaacgagagtcggacggctgggtcgtacgtatagcaaggttcgtctagaatatcctcgagtgttacgaaagcagcccaagtaactagtaatagattgttcatgtttgtaaactatgaaatgaaaaaaaaaacaactattgacatatatttagatatatgtatttatatgctgtattccattagtacattcttgcggacacaataaaatgacaaaagatcttggtcctatc

SEQ ID NO: 31942 - DNA, 3640 bp, Zea Mays
tacgtgcgctgcgcgcttccaatgccgcgcccgccgcttgctcgagctcgacgggatgccgcgtccaagcccgccgctctccgagtccctcttcaactccctcatcgcctcccgctcccgcaccggtcgcgttgtcgacgccctctcgctcctcacgcgcatgcttgctgccggcgtcgccccgaccgcgttcaccttctcaccgatcctcgcctcgccttccgccaccgcctgctgtgccgcgcagctgcacccgcacattctcaagaggggcctgctccactgcgagccctactcggggacctcgctagtggggttcttcgggcgaagcgggcgcttcgacgaggcgctcaaggtgttcggtgaaatgaccgtaaggagcgttgtcacctggaattgtctcatctattcgtttgtgcagtttggacacagccgcgctgcagtgtcctggttcagggagctcgtgagaagtggcgatggcttgtcagatggctcgtttgttgccatattgccttcgtttgggttgccagagcaagttcatggtgtaatgaacaaaattggaatgggttccctctcagcagttgcaaatgcattgctgaattcatactgtacttgtggtgcaatagatgtggcagagaagctattcaatgagataatgtttagagatgtggtttgttggaatacaatgataactggttttgcaaggagtcatgtcccagagagagcttttgagcttttcttgagtatgcaacgtcagggcatttttccaaatgaaattacatttgccagtgttctgtatgcttgcaccgttatagatggacacaaacatgggagatttgttcatgcgaaaattatcaagcacaatctcagcacaagtgtgtccgtgaacacttcattggttggtttctatgcaaattgtagtaggggtgatgctcataaagtgcttgaaggggttcatggaaatagcaccacgtgttggaatgctctgatttctggtcactctgattgtgatgatccaacttatttggttattgtgagacacatgctgcaatcagggattaaaccaaatgaagttactttgtcatctctcaaggatccatcactattggatctccagcaggttcactcattggtcataagattgggtcatggtggtaatgactatgtttcaagtgctatcatatcatcgtatgcttcacatggcattatttttgatgccttatcttatggagctgcactggatccagactcatgtagtgtttctatgaatgttttagctggtgtctgtaacaaagctcacatgtaccaagaaactaaggacctacttctacataagcgagatcgagatactatttcatggagcatactcattactgcttgcgcacggaatggtgatttcattgaagcttttggatttttcaggcagatgaggatctttgggcaccgttttgatagttatgtatgtgtgagcttgctgggcatttgtaccaaaaacaatagcctttatcttggtaagttgattcatggacttttcatcaagaccaattccagttgctctgacagttatgttgataatatgttgctagatatgtatgctaaatgtggtagaattgaagactgtctcagagtctttgaggaaatggaagacaggaaccttatatcatggacaactgtgatttcaggacttggacttaatggtttttctcgtaaggccttggcattgtttaaagccatggaaaaggatggctgcaaacctgacaaagtagcaattctagcagtcctgtcatcttgtagacatggtaggcttgtgcaggaggggatgaagatattcaaaaatttgaaagctgattattcaattgaagctgatatggagcattacatttgtgtggtggacatgctatgcaagtgtggttatttgaaggaagctgaggtcgtgattagaggcatgcctttccaaccaagcactgccatatgtcgcacattcctccaaggatgcaagacatatggtgttacagaggcacaagtttttagccagccgtggatcaaatagaattcctgttgcatggagggttaaacaaggataaggaaaaggtgagaaggatggctgctatttcggtgacctgggaacatagtcctcaagattcagccatttacgtctcaatgacaatgctcctctgggcacctgaatctgatacttttagtttctgaaagttacaagggaagggaattgtgcatgtccaaggaactgtacgattacttatattcaagtaatctatggaatgtgaagaactgaagaaccatgccatggcttaaattgtagtgagtgtgaagtatctactattatattcagttccatttatttattgaaaaacctcagttccatcagtaagggtgccaaaaggagggtaaaaggaaaacgctgattgttttggatttgccaaggtgcacctcagctgtgtacagccgatagagaggttgaagcaactggaatgggttcagtaagttatctttgttactatgcttgaatctagctgatgttaacctgttcaagtgcttcaaaatgattggaactttgagaatacctagtataatttatatcatgtgtctttcctactcaatgtatatcagaaacgtggattgctttttgacaaacaactcattcttatctgtcatctgtgaccccttggtttgctttggaatgattatcccacagaattattcatgttgtcttttcgcagtatgaggaggtcagccggtcgttgcaagttaggatgtggctaatcggttgcaaagacgataaagcacaagtctagtacagacacacctactgacaccctgaggtacctggggcttttgacgaagcatgcacattggcaagtcaatcgagcaataacggtcactaggacacaggtcctgtttggaacggctgaaactattatgaaaaagctggcttgcgtctggctgtcctgaaaaactgttatctggagaagcacctgtctgaacgagctaggtatttaacagtctgattttttgatgggttgaagagatgctaaagatgtgtatcgaagccgaagccggagcctccttcacccgagccggagctgcaaatcgtggtcccgcctcatatatggaaaagaactctggcttctccaagtaaacaaaagcacttctccttgactccttgcatggtcgttcggtgtggctcctccggctttgccgctttggtatcgaagctgccgacggagacggagccggagtgccaccaaacaggccccaagtcttgatgtaaattgtgcaacgtctagaattgaaaatgctatacatctggccagtgcatccgactcccgtccgactgccagttgcatctttattttgctactgcacttctgcgccacttgatattctcggtcgaacgagagtcggacggctgggtcgtacgtatagcaaggttcgtctagaatatcctcgagtgttacgaaagcagcccaagtaactagtaatagattgttcatgtttgtaaactatgaaatgaaaaaaaaaacaactattgacatatatttagatatatgtatttatatgctgtattccattagtacattcttgcggacacaataaaatgacaaaagatcttggtcctatc

SEQ ID NO: 31943 - DNA, 2959 bp, Zea Mays
cgcgcttccaatgccgcgcccgccgcttgctcgagctcgacgggatgccgcgtccaagcccgccgctctccgagtccctcttcaactccctcatcgcctcccgctcccgcaccggtcgcgttgtcgacgccctctcgctcctcacgcgcatgcttgctgccggcgtcgccccgaccgcgttcaccttctcaccgatcctcgcctcgccttccgccaccgcctgctgtgccgcgcagctgcacccgcacattctcaagaggggcctgctccactgcgagccctactcggggacctcgctagtggggttcttcgggcgaagcgggcgcttcgacgaggcgctcaaggtgttcggtgaaatgaccgtaaggagcgttgtcacctggaattgtctcatctattcgtttgtgcagtttggacacagccgcgctgcagtgtcctggttcagggagctcgtgagaagtggcgatggcttgtcagatggctcgtttgttgccatattgccttcgtttgggttgccagagcaagttcatggtgtaatgaacaaaattggaatgggttccctctcagcagttgcaaatgcattgctgaattcatactgtacttgtggtgcaatagatgtggcagagaagctattcaatgagataatgtttagagatgtggtttgttggaatacaatgataactggttttgcaaggagtcatgtcccagagagagcttttgagcttttcttgagtatgcaacgtcagggcatttttccaaatgaaattacatttgccagtgttctgtatgcttgcaccgttatagatggacacaaacatgggagatttgttcatgcgaaaattatcaagcacaatctcagcacaagtgtgtccgtgaacacttcattggttggtttctatgcaaattgtagtaggggtgatgctcataaagtgcttgaaggggttcatggaaatagcaccacgtgttggaatgctctgatttctggtcactctgattgtgatgatccaacttatttggttattgtgagacacatgctgcaatcagggattaaaccaaatgaagttactttgtcatctctcaaggatccatcactattggatctccagcaggttcactcattggtcataagattgggtcatggtggtaatgactatgtttcaagtgctatcatatcatcgtatgcttcacatggcattatttttgatgccttatcttatggagctgcactggatccagactcatgtagtgtttctatgaatgttttagctggtgtctgtaacaaagctcacatgtaccaagaaactaaggacctacttctacataagcgagatcgagatactatttcatggagcatactcattactgcttgcgcacggaatggtgatttcattgaagcttttggatttttcaggcagatgaggatctttgggcaccgttttgatagttatgtatgtgtgagcttgctgggcatttgtaccaaaaacaatagcctttatcttggtaagttgattcatggacttttcatcaagaccaattccagttgctctgacagttatgttgataatatgttgctagatatgtatgctaaatgtggtagaattgaagactgtctcagagtctttgaggaaatggaagacaggaaccttatatcatggacaactgtgatttcaggacttggacttaatggtttttctcgtaaggccttggcattgtttaaagccatggaaaaggatggctgcaaacctgacaaagtagcaattctagcagtcctgtcatcttgtagacatggtaggcttgtgcaggaggggatgaagatattcaaaaatttgaaagctgattattcaattgaagctgatatggagcattacatttgtgtggtggacatgctatgcaagtgtggttatttgaaggaagctgaggtcgtgattagaggcatgcctttccaaccaagcactgccatatgtcgcacattcctccaaggatgcaagacatatggtgttacagaggcacaagtttttagccagccgtggatcaaatagaattcctgttgcatggagtatgaggaggtcagccggtcgttgcaagttaggatgtggctaatcggttgcaaagacgataaagcacaagtctagtacagacacacctactgacaccctgaggtacctggggcttttgacgaagcatgcacattggcaagtcaatcgagcaataacggtcactaggacacaggtcctgtttggaacggctgaaactattatgaaaaagctggcttgcgtctggctgtcctgaaaaactgttatctggagaagcacctgtctgaacgagctaggtatttaacagtctgattttttgatgggttgaagagatgctaaagatgtgtatcgaagccgaagccggagcctccttcacccgagccggagctgcaaatcgtggtcccgcctcatatatggaaaagaactctggcttctccaagtaaacaaaagcacttctccttgactccttgcatggtcgttcggtgtggctcctccggctttgccgctttggtatcgaagctgccgacggagacggagccggagtgccaccaaacaggccccaagtcttgatgtaaattgtgcaacgtctagaattgaaaatgctatacatctggccagtgcatccgactcccgtccgactgccagttgcatctttattttgctactgcacttctgcgccacttgatattctcggtcgaacgagagtcggacggctgggtcgtacgtatagcaaggttcgtctagaatatcctcgagtgttacgaaagcagcccaagtaactagtaatagattgttcatgtttgtaaactatgaaatgaaaaaaaaaacaactattgacatatatttagatatatgtatttatatgctgtattccattagtacattcttgcggacacaataaaatgacaaaagatcttggtcctatc

SEQ ID NO: 31944 - DNA, 5699 bp, Zea Mays
aattattgtaaaatacttttaatattcaaaaacctaattgaacagtcagacgagtgtgcggcaaaagctgaagcaaacaaacgcaaacggctcatcccattcccatcacatgattcccaactcagcgccgcatcgcgtcaccgcaatctcgcagtcatccccccaaattcccatgtactgctcttgctcctgataatggcttgatttctcagtccgcactcgtcactgaggctgggcgctgacgccttccccgtttttgcagctccgcgaccgctagccgtgaggatgagcctcctccgcaaccgccgcgccgccgccgccgcggctgcagcggcggcggcggcgggaggaggggggtacccggagccgccggcttacaacatcatcccgatccacgacgtggtgatgcacggggagcacccgtcgctgcggttcccggaggtgcgcgcggccgtggaggcgctggcgcacgcggcggacctgccgccgcctccgctagcccgcgcctgggacgccttccgtgccgacctcttcgactggctcggcgccaccttcggcttccagctcgacaacgtccgcaaccagcgggagcacctcgtgctcctcctcgccaacgcgcagctccgcgcaggcggcaccctccccaccgaccaccccgccgacgtgctgcaccactccatcgcgcgggacatccggaggaagctcctcaagaactacaagacctggtgctcctacctcggcaagaggccgcacgtccatgtgcccagcggcggacgccgtgtcgctcagggggtcggccctgacacacgccgcgacctactgtacaccgccctctacctcctcatctggggcgaggcggccaatttgaggttcatgccggagtgcctctgctacatcttccactacatggcactcgatctcaaccatgtcatcgaccagtcgattgatatcgagactgggcgaccatcagttcctgcggtgcacggtgtggatgctttccttgacaaggttgtgaagccgatatatgacgtgctcgaggctgaggtgaagttcagccggaatgggaccaagccacactcggcctggaggaactatgatgatgtgaatgagtacttctggagccgcagagttttcaggcggctccagtggcccctgtcaccagcgaggagcttctttataaagccaggaaaccccgggcgtattggcaagactggttttgttgagcagaggtcgttctggaatgtgtaccgcagctttgatcgggtatgggtgatgctcattctgttctttcaagcagcaatgatcgttgcatgggatggccacactccgtggtttagcctacgctaccgtgacatccagatccgggtgctgtctgtgttcatcacctgggctgcgctgcgcattgtgcaggcagtgcttgatgcaggcacacaatacagcctcgtgaggacggatactatatttctcgcagtacggatggtgctcaaggtgcttgttgctgttgggtggactatcacattcattgtgctctatgttcgaatgtggaatcagaggtggcatgaccgcaggtggtctttttctgccaattccagggtgttaaactaccttgaggcagctgctgtgtttctcatcccacaggtgcttgcacttgtgctcttcatcgtcccatggattcggaattttctggagaaaaccaattggcgaattctatatgtgctcacctggtggttccagacccgtacatttgttggacgtggtgtgagggagggccttattgataacattaagtataccacattctgggtgtgccttctcactgctaaatttagctttagttactttctccagattaggccgatggtgaagccaacaaagactattctcagcctccatgacattcggcgtaactggtttgagttcatgcctcacacagagcgaattgctgtaatctttctgtgggctccagttgttcttatttatctcatggatattcagatatggtatgcgatcttctcatcacttactggggcacttatcgggctgttctcacatctgggggagattcgcagtgttgagcaactgcgcttgagattccagttctttgcaagtgcaatgcagttcaatttgatgccagaggaacacctggatgctgtgcacggtggcctccgaagcaagctgtatgatgctatcaatcggctgaagctgagatatggctttggtcggccgtataggaagattgaagctaacgaggtggaagctaagaggtttgcgctgatatggaatgagattattcagacatttagagaagaggacatcattagtgacaatgaagttgagcttcttgagctaccaccagttgtgtggaaaattcgtgtggtgcggtggccatgcttcctgctaaataatgagctgcttcttgctcttagtcaggcaaaagagctagtagctgatgacaggacacactggtcaaggatacgtaacaatgagtacaggcgttgtgctgtcattgaagcttatgacagcatacgtcacttactgctggagatcattgaggatggaactgttgagcacataattttcagtcagctgttctttgcatttgatgctgcaatggagaatgggaaattttgcgaagaatataaaatagaactgttgcctgaaatccattcatctgtaatcgccttagtggaacttctactgaaagagaagaaggatcagaccaagatagtaaataccttgcagactctttatgtctttgcaattcatgattttccaaagaacaaaaaggatatggaacaactgaggcgagagaggctagcaccatcaacactagaggattcccgtctcctctttgaggatgtcataaaatgcccaggcaatgatgatgttagcttctacaaacaggtgaggcgcctccatacaattctcacctccagggattctatgaacaatgtcccaaagaatcctgaggctcgacggcggataactttcttcagcaactctctattcatgaatatgcctcgcgctccaacagttgagaagatgatggcattcagtgttttaaccccatactacaatgaagatgtgatgtacaacaaggaccaacttcgccgtgagaatgaagatggtgtctcaattttgttttatcttcaaaagatatatgaagatgattggggaaactttttagaacgtatgcagagggatggaatgactgatgacagtgaaatttgggctgggaaatatcaggaactccgactctgggcctcgtatagaggacagaccttagcacggactgttaggggaatgatgtactaccacagagctctcaagatgcttgcttttcttgataccgcctccgaggtagacatcacagagggtactaaacatcttgcatcctttggttcagttaggcatgagaatgatgtgtatcccatgaatggtggtttccggcggcaaccacaaaggaggttagacagaggaaccagtactgtaagccaactgtttaaaggtcaggaagatggtgctgctctcatgaagtacacctacgttgtcacttgccagatatatggaaagcagaaaattgctaaagatcaacgcgcagaagatattttaactctaatgaagaaaaatgaggcacttcgtgttgcttatgttgacgaggtccatcaacgaggctatactgaatactattctgtcctggtaaagtttgaccagagcttacagagggaggttgagatataccggattaggttaccaggtgaactgaagcttggggaaggaaaacctgaaaaccagaaccatgccatcatattcacaagaggtgatgcagttcagacgattgacatgaaccaggataatttttttgaagaggccctcaaaatgcgtaacctgttagagcagtacaactattatcatgggagcagaaaaccaacacttctgggagttagggaacatgttttcactggatcggtctcttcgcttgcttggttcatgtctgcacaggagacaagctttgttacccttggtcagcgagtcctagctaatccgttgaaggttcggatgcattatgggcatcctgatgtatttgatcgcctctggtttttgactcggggtggtttaagtaaggcatcaagagtgatcaatatcagtgaggacatctttgctggtttcaactgtaccttacgtggtggcaatgttagtcaccatgagtatattcaggttggtaagggccgtgatgttggcctcaatcagatatcaatgtttgaagcaaaggtttctagtggcaacggtgagcagacccttagtagggatgtctacaggcttggtcatagactggatttctttcggatgctctctgtgttttatacaacagtagggttctacttcaacacaatgctggtggtcttgacagtttatacatttgtttggggacgcctgtatctagctctcagtggtcttgaggctggtatccagggcagtgctaattcaaccaacaacaaagccttgggtactgttcttaatcagcagttcatcatacagcttggcttcttcactgcattgccaatgattatagagaactctcttgaacaaggtttcctacctgctatctgggatttcttcacaatgcaaatgaatttttcatctgtgttctacacattttccatgggaactaagagccattactatggccggacaatccttcatggtggtgcaaaataccgtgctactggccgtggttttgttgtgcagcacaagagttttgctgaaaattacaggctgtatgctaggagccacttcataaaggcaatagagcttggaataatattgactgtgtatgctgcacacagtgttattgccaagaatacacttgtttacataattatgaatatatctagctggtttctggtggtatcatggattatggctccatttgcttttaatccgtctggttttgattggttgaaaacagtgtacgattttgatgatttcatgaactggatatggtatcctggtggtctcttttctaagcctgagcagagctgggaagtgtggtggtatgaagagcaagatcatctacggaccactggtctttggggaaagattttggagatactgttagatctcaggtacttctttttccagtatggggttgtataccagctgaagatagcaaacaatagcagaagtattgctgtctatctgctttcctggatatgtgtggctgtgatttttggtctgttcgtgctaatgtcctatgctcgagacaagtatgccgcaaagcagcacctttactaccgggttgttcaaactgctgtcatcactcttgtagtgctagtgctggttttgtttctgaagttcacggaatttcaaatcattgacatcttcactagtcttttggcatttattcctactggttggggcttgatttcgatcgctcaagtaattcggccattcatcgaatccactgtggtctgggacagtattatttctgtggctcgtttgtatgagatactgcttggagtgttcattatggcaccagttgcattgctgtcctggttgccgggatttcaagaaatgcagacaagggtacttttcaatgaaggtttcagcaggggcctccagatatcccgtattcttactgggaaaagaacaaatacagtttgaggagcagaatatccctgtatagcatattggataat

SEQ ID NO: 31945 - DNA, 6122 bp, Zea Mays
aattattgtaaaatacttttaatattcaaaaacctaattgaacagtcagacgagtgtgcggcaaaagctgaagcaaacaaacgcaaacggctcatcccattcccatcacatgattcccaactcagcgccgcatcgcgtcaccgcaatctcgcagtcatccccccaaattcccatgtactgctcttgctcctgataatggcttgatttctcagtccgcactcgtcactgaggctgggcgctgacgccttccccgtttttgcagctccgcgaccgctagccgtgaggatgagcctcctccgcaaccgccgcgccgccgccgccgcggctgcagcggcggcggcggcgggaggaggggggtacccggagccgccggcttacaacatcatcccgatccacgacgtggtgatgcacggggagcacccgtcgctgcggttcccggaggtgcgcgcggccgtggaggcgctggcgcacgcggcggacctgccgccgcctccgctagcccgcgcctgggacgccttccgtgccgacctcttcgactggctcggcgccaccttcggcttccagctcgacaacgtccgcaaccagcgggagcacctcgtgctcctcctcgccaacgcgcagctccgcgcaggcggcaccctccccaccgaccaccccgccgacgtgctgcaccactccatcgcgcgggacatccggaggaagctcctcaagaactacaagacctggtgctcctacctcggcaagaggccgcacgtccatgtgcccagcggcggacgccgtgtcgctcagggggtcggccctgacacacgccgcgacctactgtacaccgccctctacctcctcatctggggcgaggcggccaatttgaggttcatgccggagtgcctctgctacatcttccactacatggcactcgatctcaaccatgtcatcgaccagtcgattgatatcgagactgggcgaccatcagttcctgcggtgcacggtgtggatgctttccttgacaaggttgtgaagccgatatatgacgtgctcgaggctgaggtgaagttcagccggaatgggaccaagccacactcggcctggaggaactatgatgatgtgaatgagtacttctggagccgcagagttttcaggcggctccagtggcccctgtcaccagcgaggagcttctttataaagccaggaaaccccgggcgtattggcaagactggttttgttgagcagaggtcgttctggaatgtgtaccgcagctttgatcgggtatgggtgatgctcattctgttctttcaagcagcaatgatcgttgcatgggatggccacactccgtggtttagcctacgctaccgtgacatccagatccgggtgctgtctgtgttcatcacctgggctgcgctgcgcattgtgcaggcagtgcttgatgcaggcacacaatacagcctcgtgaggacggatactatatttctcgcagtacggatggtgctcaaggtgcttgttgctgttgggtggactatcacattcattgtgctctatgttcgaatgtggaatcagaggtggcatgaccgcaggtggtctttttctgccaattccagggtgttaaactaccttgaggcagctgctgtgtttctcatcccacaggtgcttgcacttgtgctcttcatcgtcccatggattcggaattttctggagaaaaccaattggcgaattctatatgtgctcacctggtggttccagacccgtacatttgttggacgtggtgtgagggagggccttattgataacattaagtataccacattctgggtgtgccttctcactgctaaatttagctttagttactttctccagattaggccgatggtgaagccaacaaagactattctcagcctccatgacattcggcgtaactggtttgagttcatgcctcacacagagcgaattgctgtaatctttctgtgggctccagttgttcttatttatctcatggatattcagatatggtatgcgatcttctcatcacttactggggcacttatcgggctgttctcacatctgggggagattcgcagtgttgagcaactgcgcttgagattccagttctttgcaagtgcaatgcagttcaatttgatgccagaggaacacctggatgctgtgcacggtggcctccgaagcaagctgtatgatgctatcaatcggctgaagctgagatatggctttggtcggccgtataggaagattgaagctaacgaggtggaagctaagaggtttgcgctgatatggaatgagattattcagacatttagagaagaggacatcattagtgacaatgaagttgagcttcttgagctaccaccagttgtgtggaaaattcgtgtggtgcggtggccatgcttcctgctaaataatgagctgcttcttgctcttagtcaggcaaaagagctagtagctgatgacaggacacactggtcaaggatacgtaacaatgagtacaggcgttgtgctgtcattgaagcttatgacagcatacgtcacttactgctggagatcattgaggatggaactgttgagcacataattttcagtcagctgttctttgcatttgatgctgcaatggagaatgggaaattttgcgaagaatataaaatagaactgttgcctgaaatccattcatctgtaatcgccttagtggaacttctactgaaagagaagaaggatcagaccaagatagtaaataccttgcagactctttatgtctttgcaattcatgattttccaaagaacaaaaaggatatggaacaactgaggcgagagaggctagcaccatcaacactagaggattcccgtctcctctttgaggatgtcataaaatgcccaggcaatgatgatgttagcttctacaaacaggtgaggcgcctccatacaattctcacctccagggattctatgaacaatgtcccaaagaatcctgaggctcgacggcggataactttcttcagcaactctctattcatgaatatgcctcgcgctccaacagttgagaagatgatggcattcagtgttttaaccccatactacaatgaagatgtgatgtacaacaaggaccaacttcgccgtgagaatgaagatggtgtctcaattttgttttatcttcaaaagatatatgaagatgattggggaaactttttagaacgtatgcagagggatggaatgactgatgacagtgaaatttgggctgggaaatatcaggaactccgactctgggcctcgtatagaggacagaccttagcacggactgttaggggaatgatgtactaccacagagctctcaagatgcttgcttttcttgataccgcctccgaggtagacatcacagagggtactaaacatcttgcatcctttggttcagttaggcatgagaatgatgtgtatcccatgaatggtggtttccggcggcaaccacaaaggaggttagacagaggaaccagtactgtaagccaactgtttaaaggtcaggaagatggtgctgctctcatgaagtacacctacgttgtcacttgccagatatatggaaagcagaaaattgctaaagatcaacgcgcagaagatattttaactctaatgaagaaaaatgaggcacttcgtgttgcttatgttgacgaggtccatcaacgaggctatactgaatactattctgtcctggtaaagtttgaccagagcttacagagggaggttgagatataccggattaggttaccaggtgaactgaagcttggggaaggaaaacctgaaaaccagaaccatgccatcatattcacaagaggtgatgcagttcagacgattgacatgaaccaggataatttttttgaagaggccctcaaaatgcgtaacctgttagagcagtacaactattatcatgggagcagaaaaccaacacttctgggagttagggaacatgttttcactggatcggtctcttcgcttgcttggttcatgtctgcacaggagacaagctttgttacccttggtcagcgagtcctagctaatccgttgaaggttcggatgcattatgggcatcctgatgtatttgatcgcctctggtttttgactcggggtggtttaagtaaggcatcaagagtgatcaatatcagtgaggacatctttgctggtttcaactgtaccttacgtggtggcaatgttagtcaccatgagtatattcaggttggtaagggccgtgatgttggcctcaatcagatatcaatgtttgaagcaaaggtttctagtggcaacggtgagcagacccttagtagggatgtctacaggcttggtcatagactggatttctttcggatgctctctgtgttttatacaacagtagggttctacttcaacacaatgctggtggtcttgacagtttatacatttgtttggggacgcctgtatctagctctcagtggtcttgaggctggtatccagggcagtgctaattcaaccaacaacaaagccttgggtactgttcttaatcagcagttcatcatacagcttggcttcttcactgcattgccaatgattatagagaactctcttgaacaaggtttcctacctgctatctgggatttcttcacaatgcaaatgaatttttcatctgtgttctacacattttccatgggaactaagagccattactatggccggacaatccttcatggtggtgcaaaataccgtgctactggccgtggttttgttgtgcagcacaagagttttgctgaaaattacaggctgtatgctaggagccacttcataaaggcaatagagcttggaataatattgactgtgtatgctgcacacagtgttattgccaagaatacacttgtttacataattatgaatatatctagctggtttctggtggtatcatggattatggctccatttgcttttaatccgtctggttttgattggttgaaaacagtgtacgattttgatgatttcatgaactggatatggtatcctggtggtctcttttctaagcctgagcagagctgggaagtgtggtggtatgaagagcaagatcatctacggaccactggtctttggggaaagattttggagatactgttagatctcaggtacttctttttccagtatggggttgtataccagctgaagatagcaaacaatagcagaagtattgctgtctatctgctttcctggatatgtgtggctgtgatttttggtctgttcgtgctaatgtcctatgctcgagacaagtatgccgcaaagcagcacctttactaccgggttgttcaaactgctgtcatcactcttgtagtgctagtgctggttttgtttctgaagttcacggaatttcaaatcattgacatcttcactagtcttttggcatttattcctactggttggggcttgatttcgatcgctcaagtaattcggccattcatcgaatccactgtggtctgggacagtattatttctgtggctcgtttgtatgagatactgcttggagtgttcattatggcaccagttgcattgctgtcctggttgccgggatttcaagaaatgcagacaagggtacttttcaatgaaggtttcagcaggggcctccagatatcccgtattcttactgggaaaagaacaaatacagtttgaggttctgacccagattgttgcggcggtgaaggtgaagcagcggtgctctatctcctatgtacagcttagcaattcagtgtggaagggctttgtgcttactgatatagcttagatccatattgaactcttccagtagcttttatagctatctagtttaggagtccagatttgtgattttggcgatttaggtgttcagttcttttgtacattggttgagctagttgtgtgtagctgattctattgcagcaccaccggtgagctctagtgacctatttgttgacctctgctggaagttgcatcttttgtgctagcaactgtgtcgtgactcgtgagtgctattgctctgctgaaggtataaaagttgctggaaaggatgttcctggatgtgaccgatcagatgagcgatccattttttttagtatttcactgaagtgcgctccaactcaatccaggcgcct

SEQ ID NO: 31946 - DNA, 3366 bp, Zea Mays
gtgccgtcctgcactctttccccgagggccgaggccctggcgggtggcctcctgctgggggaacagtggcacctaaagcagcagcctgccgcagctgccttgcagcggccgcgcacggtggccagtagcgtgcaacagcagcgcagagcgcagcgccgtgccactccgcaacgacgcagcagtagcagcgccccacaccctggtgcggcggtgccccacggcaaaaggaaacagcccgtccaatccatcccctcaccccattgcctctccctctccctcacccgcacctcaccactcctcggcctcacttcttcacaagttcacatcagcagcagctcacgaaacaggagcgtcataaagacatggtcgtcgcaggatagcctcagacccagcgacgcagcggcagcgacccaggaagcaacagcgaccggcatcgatcgcggcagccgaggcggggggacgggaggagggagggagcggtcgccgcaggagcagagcggcacggcatggggtcctgagtgactgactgactgacgactgagtgtctgactgagaaggagatggctggagcgcgacggccccggagccattaatggggcgctcatcctcctcgtcctcccactcctcgcctcccccccgccaggtcgcggtcggctccgctttttaaccggcttgtcctggagcggggcgaacggcgaacctcacgggcgccggaacacgaaccggaaccctagtggtggtggtggtggcgcgccccatgggcatcgacctcaacatggcggacggcgagagccaggagcgccgcccgccgccggcggtgtgccgggagctgtggcacgcgtgcgcggggcccgtggttgcgctaccgcggcggggcagcctggtcgtgtacctgccgcaaggccacctagccgcggccggcggcggcaacgtcgctgtggacctgccgccgcacgtggcgtgccgcgtcgcggatgtcgagttatgcgcggatgcggcgacggacgaggtgtacgcgcggctggcgctggtcgcggagggcgaggcatttgggagaaatctgcgtggtggtggagtcgatggggacgatgacatggaggattttgatgttgaaaggaagtcccggatgttgcacatgttctgcaaaacgcttacagcctctgacacaagcacacatggagggttctctgttcctcgtcgtgctgctgaggactgtttcccgcctctggattataatcagctcaggccttctcaagagctggttgccaaggatttgcatggagccaagtggaaatttcgtcatatatataggggtcagcctcgtaggcatctcttgactactggatggagttcatttgtcaataaaaagaaactggtttctggggatgcggtcttatttctccgaggtgatgatggtgaactaaggctgggcgtacggagggccattcagcttaaaaatgaggccctttttgacgatttcagttgcgacagtacaaaacggcatacattgttggctgtagctgattccttgaagcacaaaagtgtttttcacatttcttacaatccaagagctactgcttcagaatatattataccacaccataagttcctgaagagcctaaatcttccattctgtattggagcaaggatcaacttacagtgccataatgaagatgttagtgaaaggcgatctggaatggttgttcatgtcagtgaaatagatcccatgaaatggccaggctcgaagtggagaagcctgctggtaagatgggaggatggtgttgaatgtaacggccaagatagagtatctccatgggagattgagatagctggtggctctgtctctgttgctcattctgtgtccgcatctagctctaaaagaaccaagttgtgtcctcagggaaatttggacgttccaacaatgtggaatgggaatggttgtactgactccgtggaaactggaaagtttcccagggtcttgcaaggtcaagatttgatgagttttaggactcgtcatgttccgtctgctcctcaaactgttgaggctgcaaaacttcaatcttctggtgctagtaggttcctcagtaatgcacgtggctgcgcattgggtggtccaacaagcagactcgcagtgcataactctgattttacctaccaatctgtaggcttcaatgaatctattggattctcagaggtcttgcaaggtcaagaaatttctcgggcagttcctatgttccaaggaatgatgtctgaggcttgttcactaaaaggaggatatgggctgcatagttatatgcgtaccccagttgctgttactggattgtcagccacaactcaagagtgttctctcacactatctactccgccaggagcacaagttccttctgtctaccctgataatatttttaaccgaactgtggttcgacagcttggactggcaagcaagtttgatggtggagctacaaatgcccagcagtctgtcccatttgataggccgagggaaatttggagcaagccacagcatgaaatatctgatcaaacgaaaatggatcactttgagactagaagagcttcagcacctggagatgatgctgctaagcatgggtctggtggagaggtggttcgcaaaactagctgcagactttttggtttctcgttgactgagaagatcttgccagcagatgatgatggcatcaaggaagtgacctatgagcctgagtgccagaatccacggatgctggacctgttcgggtacaactgctcagccccaagtgctgctcttccagctctgtgtgctgccccctttggaatgtgatgctacttcaataacgctgctgagtatttccatgtactcttagaagttttactttcctaatacccaagtgtatgtcataagctgccttttgacatcattccccctgttggtctgcctcaagcgaagcagtcatttgcacaagtaaacaaaggatcgttgatgatccacttctcgccatgcctcaccctatcgctaagatattgtaattagtcttaggatacgaagaggcagtacattgtaactgactaacttctgtggctgatccttcagaaaagttgtgcgatgaagcaaacaattttctttagaagttcttcgctggcagattttagattcatgtggggaggtttgtcagctcagctttaatgtactggttatgtatctttaaatcagctgctgtacgactttttttttagctccaagccctggttgcagtcgcctaggccgtgtgattgtatcagtatgtaagacatgctatattttaatattcttatcgatatttattctgatgcattgtgtgtgaatattctgttcttcatcgcatgcaatgcaag

SEQ ID NO: 31947 - DNA, 3048 bp, Zea Mays
cccgtccaatccatcccctcaccccattgcctctccctctccctcacccgcacctcaccactcctcggcctcacttcttcacaagttcacatcagcagcagctcacgaaacaggagcgtcataaagacatggtcgtcgcaggatagcctcagacccagcgacgcagcggcagcgacccaggaagcaacagcgaccggcatcgatcgcggcagccgaggcggggggacgggaggagggagggagcggtcgccgcaggagcagagcggcacggcatggggtcctgagtgactgactgactgacgactgagtgtctgactgagaaggagatggctggagcgcgacggccccggagccattaatggggcgctcatcctcctcgtcctcccactcctcgcctcccccccgccaggtcgcggtcggctccgctttttaaccggcttgtcctggagcggggcgaacggcgaacctcacgggcgccggaacacgaaccggaaccctagtggtggtggtggtggcgcgccccatgggcatcgacctcaacatggcggacggcgagagccaggagcgccgcccgccgccggcggtgtgccgggagctgtggcacgcgtgcgcggggcccgtggttgcgctaccgcggcggggcagcctggtcgtgtacctgccgcaaggccacctagccgcggccggcggcggcaacgtcgctgtggacctgccgccgcacgtggcgtgccgcgtcgcggatgtcgagttatgcgcggatgcggcgacggacgaggtgtacgcgcggctggcgctggtcgcggagggcgaggcatttgggagaaatctgcgtggtggtggagtcgatggggacgatgacatggaggattttgatgttgaaaggaagtcccggatgttgcacatgttctgcaaaacgcttacagcctctgacacaagcacacatggagggttctctgttcctcgtcgtgctgctgaggactgtttcccgcctctggattataatcagctcaggccttctcaagagctggttgccaaggatttgcatggagccaagtggaaatttcgtcatatatataggggtcagcctcgtaggcatctcttgactactggatggagttcatttgtcaataaaaagaaactggtttctggggatgcggtcttatttctccgaggtgatgatggtgaactaaggctgggcgtacggagggccattcagcttaaaaatgaggccctttttgacgatttcagttgcgacagtacaaaacggcatacattgttggctgtagctgattccttgaagcacaaaagtgtttttcacatttcttacaatccaagagctactgcttcagaatatattataccacaccataagttcctgaagagcctaaatcttccattctgtattggagcaaggatcaacttacagtgccataatgaagatgttagtgaaaggcgatctggaatggttgttcatgtcagtgaaatagatcccatgaaatggccaggctcgaagtggagaagcctgctggtaagatgggaggatggtgttgaatgtaacggccaagatagagtatctccatgggagattgagatagctggtggctctgtctctgttgctcattctgtgtccgcatctagctctaaaagaaccaagttgtgtcctcagggaaatttggacgttccaacaatgtatgttacagggaatgggaatggttgtactgactccgtggaaactggaaagtttcccagggtcttgcaaggtcaagatttgatgagttttaggactcgtcatgttccgtctgctcctcaaactgttgaggctgcaaaacttcaatcttctggtgctagcttcaatgaatctattggattctcagaggtcttgcaaggtcaagaaatttctcgggcagttcctatgttccaaggaatgatgtctgaggcttgttcactaaaaggaggatatgggctgcatagttatatgcgtaccccagttgctgttactggattgtcagccacaactcaagagtgttctctcacactatctactccgccaggagcacaagttccttctgtctaccctgataatatttttaaccgaactgtggttcgacagcttggactggcaagcaagtttgatggtggagctacaaatgcccagcagtctgtcccatttgataggccgagggaaatttggagcaagccacagcatgaaatatctgatcaaacgaaaatggatcactttgagactagaagagcttcagcacctggagatgatgctgctaagcatgggtctggtggagaggtggttcgcaaaactagctgcagactttttggtttctcgttgactgagaagatcttgccagcagatgatgatggcatcaaggaagtgacctatgagcctgagtgccagaatccacggatgctggacctgttcgggtacaactgctcagccccaagtgctgctcttccagctctgtgtgctgccccctttggaatgtgatgctacttcaataacgctgctgagtatttccatgtactcttagaagttttactttcctaatacccaagtgtatgtcataagctgccttttgacatcattccccctgttggtctgcctcaagcgaagcagtcatttgcacaagtaaacaaaggatcgttgatgatccacttctcgccatgcctcaccctatcgctaagatattgtaattagtcttaggatacgaagaggcagtacattgtaactgactaacttctgtggctgatccttcagaaaagttgtgcgatgaagcaaacaattttctttagaagttcttcgctggcagattttagattcatgtggggaggtttgtcagctcagctttaatgtactggttatgtatctttaaatcagctgctgtacgactttttttttagctccaagccctggttgcagtcgcctaggccgtgtgattgtatcagtatgtaagacatgctatattttaatattcttatcgatatttattctgatgcattgtgtgtgaatattctgttcttcatcgcatgcaatgcaag

SEQ ID NO: 31948 - DNA, 1536 bp, Zea Mays
cttcttctccatttgcttttttccctaaagtttctccgtcctggcggctgagggctgctgcttcgtccctggtggcggctgagggctgctgcttcgtccctgatggcgcctgattgcctgggcgcgatccgcccgtgcttcccatagcgtactccgtccctggcgcccccagtgaggtccgtccgtggcgctccgcctcccgtcgtcttccgtcaccacgctctggtcgtatccccgccgtagcgtcgtccagtgctgccctgcagaccgcacatctgtccacctgctgtgtggtttggttccctccatggattctaccaatccgaaccataaagatgacgagttcccatagaattcgaccgcgaacgggacaaattttggttccaatatgtacaaccagctgaagaaaccggttatattatggcaattgagaccttagatttaagtactattgtaatccgtatggttcttgctattaatttctaggcatatgaaacaaataccgatgagcgtgcaattcctatatattaaagctatgtagctagacgcacagccacataggccacgtcgttcaaatttttgtaagccatccgatacaagatcgttggttaccaggcgcgggagcaaaggtagccaaccacacgacgggactcttccagatggagacgaaacaccacatggcgggggaaggaaaagagcgatcagatctcagacgccgtcgtccgtctccgccaagctgcatcgcctcaaacgctttgtcccggccatcacgccggccatggccgccatgtcgaagaaggcgactctccatcccttccgagttccgagttcatgctcccctccgcccctggcatcatgccacgtcccgcggaccgtactatcgcctccacagccgtggtcgctcggccacacgtaccggtcgcttcgcctgccgtcgctgttgcgacagccgtgatacctgccttcatcagcaacacgtcccaaaccgactaagcgtcccgggccaccgcgatacttcatttccgaaatcgctgcggtggcagcagttatgcctgccttgctccaaatatatagcactgtgagacgagtagcaaatcaagttgaagccatcggaaattgtcaaacctcttttttctctctctttttggggtgaagtctatgtgggaacactgaacctgcaaccgagaccgtagcgattcgacaatatcactagaggatcatacttctacttagggatggcaaatttacccgcgggttcggatatccgacccatcgggttcggattcgggtacgtaatttgatccacgggtcttgtccgtacccgacccgtgatacaatcggatcgggtacgggttttatctcttgcccgtgggtacccggtggatattcaaaatttgtgatacagctttttagcccaccaaaaaaatcagcccaatgacctacctcatcagcccacggcgacacgagtgctgggctgctgtcccttagcgcaggtactggcctagctcgtcgcaattatgagtagtgagctagtat

SEQ ID NO: 31949 - DNA, 1666 bp, Zea Mays
tgcttacacaaaattcccgctcactgtcttacgcctccaaaaccctagcccgtgctcggccggcgacgaggatgcctggtatgccgacggacggtggcggcgcaatggtaccttttacaggggagcctggccaaggggcgcccccgccggcacccgtgcggccaatccgccacggcgtggcgccgcccatcttccgcatctacgtctcctggtccagcggcaaccttctgcaggtcgcgtgcctccgcccgccgaattcggacggtggcggcggcacggaggaggtcgttgggagtgtggtggaggtgaatctcggcgacggtggcagcggtggctcggaggccgaggagaaaattgacgaggcggagatgcggaggatcgagtacgggtcagtgccggccttcgcgctgctgcagagcaggaagaacaccctcgcagatgttgctactatgtcgcacgtgccctcagtccctgatcatgcagaatggtggcaatatgtgcttgaatacagcaaaaccattggcagtctccttgggaacccagacccttctggtttcatgattgaagaacccaagacaattcttaaggttagggagaaacccacaagtttaagggctgcttgggagttgctggagatattctatgttgataaacgtttgcaaggctggcttcctgagcgtcttgttgattggttagccgattttgacagcctgctgtcaacgatggcgagcacggtgtactctaagctcagcaatttccagaaaaaactcgttaacttacagattgttgaagacgatcctgattactggaatggtttgtcagcagcactttcggttggatggcttgatattgtggtgaatatgctacggtttcatggatcgtaccaattagatcagatggatagccgtgagacagaaaatggattggtcgaggctgttgctgttcttgtatcaatgatgccccgcatgagaccgaatttgccaactggtaaattaggccagtgctgcaaaacaagacctgattttatcaaggcatgggaaaagtggcgaggtcaagtaactaaactggagtgcagtgcattttggatccagtgcggccaccaaaaaacccgtgatggtttgaagaatttgcttcatattatgatggggaacataaaggaaattactgctgctacttcccattggctggagctgtttgcttctcattttctttacataaaaccatttactgtgggttttgaagggatgcaccatttagcacagaaatgcatacagcttatgccatcctctggcactaatggattaacaggcctcattatcggtgttatgtcagaaaatccagaggttgtcttggcagaatgcacaaaaaattttggcccttggctggtcacacatgctatggaacttctgacagctgataatgactatgcggatattatgttgcatgaagagcgacctaacttaggcggtataagcatagaggaacttcaccgattagtctatgctcaagttttatgttgtcatcctttaacttggcagtcttgcagaagggaaggggccacttagcacaggggcacgccagttgccggctcgctggctaggcggccgctcaatgtgcctccgaccatggagtgcggagccgtggacagcctctagtggctagcata

SEQ ID NO: 31950 - DNA, 2816 bp, Zea Mays
tgcttacacaaaattcccgctcactgtcttacgcctccaaaaccctagcccgtgctcggccggcgacgaggatgcctggtatgccgacggacggtggcggcgcaatggtaccttttacaggggagcctggccaaggggcgcccccgccggcacccgtgcggccaatccgccacggcgtggcgccgcccatcttccgcatctacgtctcctggtccagcggcaaccttctgcaggtcgcgtgcctccgcccgccgaattcggacggtggcggcggcacggaggaggtcgttgggagtgtggtggaggtgaatctcggcgacggtggcagcggtggctcggaggccgaggagaaaattgacgaggcggagatgcggaggatcgagtacgggtcagtgccggccttcgcgctgctgcagagcaggaagaacaccctcgcagatgttgctactatgtcgcacgtgccctcagtccctgatcatgcagaatggtggcaatatgtgcttgaatacagcaaaaccattggcagtctccttgggaacccagacccttctggtttcatgattgaagaacccaagacaattcttaaggttagggagaaacccacaagtttaagggctgcttgggagttgctggagatattctatgttgataaacgtttgcaaggctggcttcctgagcgtcttgttgattggttagccgattttgacagcctgctgtcaacgatggcgagcacggtgtactctaagctcagcaatttccagaaaaaactcgttaacttacagattgttgaagacgatcctgattactggaatggtttgtcagcagcactttcggttggatggcttgatattgtggtgaatatgctacggtttcatggatcgtaccaattagatcagatggatagccgtgagacagaaaatggattggtcgaggctgttgctgttcttgtatcaatgatgccccgcatgagaccgaatttgccaactggtaaattaggccagtgctgcaaaacaagacctgattttatcaaggcatgggaaaagtggcgaggtcaagtaactaaactggagtgcagtgcattttggatccagtgcggccaccaaaaaacccgtgatggtttgaagaatttgcttcatattatgatggggaacataaaggaaattactgctgctacttcccattggctggagctgtttgcttctcattttctttacataaaaccatttactgtgggttttgaagggatgcaccatttagcacagaaatgcatacagcttatgccatcctctggcactaatggattaacaggcctcattatcggtgttatgtcagaaaatccagaggttgtcttggcagaatgcacaaaaaattttggcccttggctggtcacacatgctatggaacttctgacagctgataatgactatgcggatattatgttgcatgaagagcgacctaacttaggcggtataagcatagaggaacttcaccgattagtctatgctcaagttttatgttgtcatcctttaacttggcagatcgcgccgacttatctgtcctcatgtctaaaccaaggcctaggactcttggagattctacttcttaagcaacccatacaagataattgcctagtactcaagactttggaaatttgccgattgtacgaactggagaatgttagtacaatcatcatgaagattgctggcatttatcgttggaagcatggacgaaaaggaactggtgtatactggttccagcaagctcgtgataaagtttgtcttgatagaattgctcaacagttattcgaacacattgggaagtcagtgacagacgatagttttaagcaatgggaagggctgctcgagctccttggttctgacattggtagtgcaggcggtcttgagttccttcacaggtctctgcaacaagctctagacagaaggtgtggtgaggctgctcgacaaactgtggattttttaatacagcttatgaaaaacccatccacacctcaacgtttctggctaccccttctacatgattcggtggagctacttaatagcaaactcagccctcttatggatgttgctgagacgacattgttgctcaacaagctgcaagagctgtcaatggccaagctgcgccctgatttttccagtaatcacctaccaagccatgcgatgagctctgtgagattggctctggcatcaaatctggcacgtgccgttcttgaagaccgtagtccaagcacactttagcacaggagtatgacgtccagtttgctggtggattgtgaccatgtttgcttggggcctcctgacaattcaaatgatcgggtttgagaaagattgaccatgtaacatacattgtactctgcttgcttgcttagtgcatttgtgtcgcgaatgcatgcatcatgctgagcgctgtggtttgaaggaaagaaataaaggatcgacatgttgcttgaaaacatctcttcacgggagcgttttcttgaaaaagaatataacaaaatggcctgaccagtcgattgcttttctccgtttgcaaacagtataagagcaacttcaagaggctctctatattatttctaatatatataaatatatatttaaaaaaaatacttttcaacaacttatctaaatatagccatattctattctggatttctcctagtcaaatatatagaatgtgaatgtgtctctagagtgtacacaagatatagaaacacggttagagattaaaaaaatatagaaaatggtttttatgtaaatgattctaaatgataatttatagtatgtttggtttaaagaatg

SEQ ID NO: 31951 - DNA, 2880 bp, Zea Mays
tgcttacacaaaattcccgctcactgtcttacgcctccaaaaccctagcccgtgctcggccggcgacgaggatgcctggtatgccgacggacggtggcggcgcaatggtaccttttacaggggagcctggccaaggggcgcccccgccggcacccgtgcggccaatccgccacggcgtggcgccgcccatcttccgcatctacgtctcctggtccagcggcaaccttctgcaggtcgcgtgcctccgcccgccgaattcggacggtggcggcggcacggaggaggtcgttgggagtgtggtggaggtgaatctcggcgacggtggcagcggtggctcggaggccgaggagaaaattgacgaggcggagatgcggaggatcgagtacgggtcagtgccggccttcgcgctgctgcagagcaggaagaacaccctcgcagatgttgctactatgtcgcacgtgccctcagtccctgatcatgcagaatggtggcaatatgtgcttgaatacagcaaaaccattggcagtctccttgggaacccagacccttctggtttcatgattgaagaacccaagacaattcttaaggttagggagaaacccacaagtttaagggctgcttgggagttgctggagatattctatgttgataaacgtttgcaaggctggcttcctgagcgtcttgttgattggttagccgattttgacagcctgctgtcaacgatggcgagcacggtgtactctaagctcagcaatttccagaaaaaactcgttaacttacagattgttgaagacgatcctgattactggaatggtttgtcagcagcactttcggttggatggcttgatattgtggtgaatatgctacggtttcatggatcgtaccaattagatcagatggatagccgtgagacagaaaatggattggtcgaggctgttgctgttcttgtatcaatgatgccccgcatgagaccgaatttgccaactggtaaattaggccagtgctgcaaaacaagacctgattttatcaaggcatgggaaaagtggcgaggtcaagtaactaaactggagtgcagtgcattttggatccagtgcggccaccaaaaaacccgtgatggtttgaagaatttgcttcatattatgatggggaacataaaggaaattactgctgctacttcccattggctggagctgtttgcttctcattttctttacataaaaccatttactgtgggttttgaagggatgcaccatttagcacagaaatgcatacagcttatgccatcctctggcactaatggattaacaggcctcattatcggtgttatgtcagaaaatccagaggttgtcttggcagaatgcacaaaaaattttggcccttggctggtcacacatgctatggaacttctgacagctgataatgactatgcggatattatgttgcatgaagagcgacctaacttaggcggtataagcatagaggaacttcaccgattagtctatgctcaagttttatgttgtcatcctttaacttggcagcatggatccatccaatgataaataggaaataggttccaaccgagtgatcgcgccgacttatctgtcctcatgtctaaaccaaggcctaggactcttggagattctacttcttaagcaacccatacaagataattgcctagtactcaagactttggaaatttgccgattgtacgaactggagaatgttagtacaatcatcatgaagattgctggcatttatcgttggaagcatggacgaaaaggaactggtgtatactggttccagcaagctcgtgataaagtttgtcttgatagaattgctcaacagttattcgaacacattgggaagtcagtgacagacgatagttttaagcaatgggaagggctgctcgagctccttggttctgacattggtagtgcaggcggtcttgagttccttcacaggtaccgggatttcaagaggtctctgcaacaagctctagacagaaggtgtggtgaggctgctcgacaaactgtggattttttaatacagcttatgaaaaacccatccacacctcaacgtttctggctaccccttctacatgattcggtggagctacttaatagcaaactcagccctcttatggatgttgctgagacgacattgttgctcaacaagctgcaagagctgtcaatggccaagctgcgccctgatttttccagtaatcacctaccaagccatgcgatgagctctgtgagattggctctggcatcaaatctggcacgtgccgttcttgaagaccgtagtccaagcacactttagcacaggagtatgacgtccagtttgctggtggattgtgaccatgtttgcttggggcctcctgacaattcaaatgatcgggtttgagaaagattgaccatgtaacatacattgtactctgcttgcttgcttagtgcatttgtgtcgcgaatgcatgcatcatgctgagcgctgtggtttgaaggaaagaaataaaggatcgacatgttgcttgaaaacatctcttcacgggagcgttttcttgaaaaagaatataacaaaatggcctgaccagtcgattgcttttctccgtttgcaaacagtataagagcaacttcaagaggctctctatattatttctaatatatataaatatatatttaaaaaaaatacttttcaacaacttatctaaatatagccatattctattctggatttctcctagtcaaatatatagaatgtgaatgtgtctctagagtgtacacaagatatagaaacacggttagagattaaaaaaatatagaaaatggtttttatgtaaatgattctaaatgataatttatagtatgtttggtttaaagaatg

SEQ ID NO: 31952 - DNA, 2827 bp, Zea Mays
tgcttacacaaaattcccgctcactgtcttacgcctccaaaaccctagcccgtgctcggccggcgacgaggatgcctggtatgccgacggacggtggcggcgcaatggtaccttttacaggggagcctggccaaggggcgcccccgccggcacccgtgcggccaatccgccacggcgtggcgccgcccatcttccgcatctacgtctcctggtccagcggcaaccttctgcaggtcgcgtgcctccgcccgccgaattcggacggtggcggcggcacggaggaggtcgttgggagtgtggtggaggtgaatctcggcgacggtggcagcggtggctcggaggccgaggagaaaattgacgaggcggagatgcggaggatcgagtacgggtcagtgccggccttcgcgctgctgcagagcaggaagaacaccctcgcagatgttgctactatgtcgcacgtgccctcagtccctgatcatgcagaatggtggcaatatgtgcttgaatacagcaaaaccattggcagtctccttgggaacccagacccttctggtttcatgattgaagaacccaagacaattcttaaggttagggagaaacccacaagtttaagggctgcttgggagttgctggagatattctatgttgataaacgtttgcaaggctggcttcctgagcgtcttgttgattggattttgacagcctgctgtcaacgatggcgagcacggtgtactctaagctcagcaatttccagaaaaaactcgttaacttacagattgttgaagacgatcctgattactggaatggtttgtcagcagcactttcggttggatggcttgatattgtggtgaatatgctacggtttcatggatcgtaccaattagatcagatggatagccgtgagacagaaaatggattggtcgaggctgttgctgttcttgtatcaatgatgccccgcatgagaccgaatttgccaactggtaaattaggccagtgctgcaaaacaagacctgattttatcaaggcatgggaaaagtggcgaggtcaagtaactaaactggagtgcagtgcattttggatccagtgcggccaccaaaaaacccgtgatggtttgaagaatttgcttcatattatgatggggaacataaaggaaattactgctgctacttcccattggctggagctgtttgcttctcattttctttacataaaaccatttactgtgggttttgaagggatgcaccatttagcacagaaatgcatacagcttatgccatcctctggcactaatggattaacaggcctcattatcggtgttatgtcagaaaatccagaggttgtcttggcagaatgcacaaaaaattttggcccttggctggtcacacatgctatggaacttctgacagctgataatgactatgcggatattatgttgcatgaagagcgacctaacttaggcggtataagcatagaggaacttcaccgattagtctatgctcaagttttatgttgtcatcctttaacttggcagatcgcgccgacttatctgtcctcatgtctaaaccaaggcctaggactcttggagattctacttcttaagcaacccatacaagataattgcctagtactcaagactttggaaatttgccgattgtacgaactggagaatgttagtacaatcatcatgaagattgctggcatttatcgttggaagcatggacgaaaaggaactggtgtatactggttccagcaagctcgtgataaagtttgtcttgatagaattgctcaacagttattcgaacacattgggaagtcagtgacagacgatagttttaagcaatgggaagggctgctcgagctccttggttctgacattggtagtgcaggcggtcttgagttccttcacaggtaccgggatttcaagaggtctctgcaacaagctctagacagaaggtgtggtgaggctgctcgacaaactgtggattttttaatacagcttatgaaaaacccatccacacctcaacgtttctggctaccccttctacatgattcggtggagctacttaatagcaaactcagccctcttatggatgttgctgagacgacattgttgctcaacaagctgcaagagctgtcaatggccaagctgcgccctgatttttccagtaatcacctaccaagccatgcgatgagctctgtgagattggctctggcatcaaatctggcacgtgccgttcttgaagaccgtagtccaagcacactttagcacaggagtatgacgtccagtttgctggtggattgtgaccatgtttgcttggggcctcctgacaattcaaatgatcgggtttgagaaagattgaccatgtaacatacattgtactctgcttgcttgcttagtgcatttgtgtcgcgaatgcatgcatcatgctgagcgctgtggtttgaaggaaagaaataaaggatcgacatgttgcttgaaaacatctcttcacgggagcgttttcttgaaaaagaatataacaaaatggcctgaccagtcgattgcttttctccgtttgcaaacagtataagagcaacttcaagaggctctctatattatttctaatatatataaatatatatttaaaaaaaatacttttcaacaacttatctaaatatagccatattctattctggatttctcctagtcaaatatatagaatgtgaatgtgtctctagagtgtacacaagatatagaaacacggttagagattaaaaaaatatagaaaatggtttttatgtaaatgattctaaatgataatttatagtatgtttggtttaaagaatg

SEQ ID NO: 31953 - DNA, 2799 bp, Zea Mays
tgcttacacaaaattcccgctcactgtcttacgcctccaaaaccctagcccgtgctcggccggcgacgaggatgcctggtatgccgacggacggtggcggcgcaatggtaccttttacaggggagcctggccaaggggcgcccccgccggcacccgtgcggccaatccgccacggcgtggcgccgcccatcttccgcatctacgtctcctggtccagcggcaaccttctgcaggtcgcgtgcctccgcccgccgaattcggacggtggcggcggcacggaggaggtcgttgggagtgtggtggaggtgaatctcggcgacggtggcagcggtggctcggaggatcgagtacgggtcagtgccggccttcgcgctgctgcagagcaggaagaacaccctcgcagatgttgctactatgtcgcacgtgccctcagtccctgatcatgcagaatggtggcaatatgtgcttgaatacagcaaaaccattggcagtctccttgggaacccagacccttctggtttcatgattgaagaacccaagacaattcttaaggttagggagaaacccacaagtttaagggctgcttgggagttgctggagatattctatgttgataaacgtttgcaaggctggcttcctgagcgtcttgttgattggttagccgattttgacagcctgctgtcaacgatggcgagcacggtgtactctaagctcagcaatttccagaaaaaactcgttaacttacagattgttgaagacgatcctgattactggaatggtttgtcagcagcactttcggttggatggcttgatattgtggtgaatatgctacggtttcatggatcgtaccaattagatcagatggatagccgtgagacagaaaatggattggtcgaggctgttgctgttcttgtatcaatgatgccccgcatgagaccgaatttgccaactggtaaattaggccagtgctgcaaaacaagacctgattttatcaaggcatgggaaaagtggcgaggtcaagtaactaaactggagtgcagtgcattttggatccagtgcggccaccaaaaaacccgtgatggtttgaagaatttgcttcatattatgatggggaacataaaggaaattactgctgctacttcccattggctggagctgtttgcttctcattttctttacataaaaccatttactgtgggttttgaagggatgcaccatttagcacagaaatgcatacagcttatgccatcctctggcactaatggattaacaggcctcattatcggtgttatgtcagaaaatccagaggttgtcttggcagaatgcacaaaaaattttggcccttggctggtcacacatgctatggaacttctgacagctgataatgactatgcggatattatgttgcatgaagagcgacctaacttaggcggtataagcatagaggaacttcaccgattagtctatgctcaagttttatgttgtcatcctttaacttggcagatcgcgccgacttatctgtcctcatgtctaaaccaaggcctaggactcttggagattctacttcttaagcaacccatacaagataattgcctagtactcaagactttggaaatttgccgattgtacgaactggagaatgttagtacaatcatcatgaagattgctggcatttatcgttggaagcatggacgaaaaggaactggtgtatactggttccagcaagctcgtgataaagtttgtcttgatagaattgctcaacagttattcgaacacattgggaagtcagtgacagacgatagttttaagcaatgggaagggctgctcgagctccttggttctgacattggtagtgcaggcggtcttgagttccttcacaggtaccgggatttcaagaggtctctgcaacaagctctagacagaaggtgtggtgaggctgctcgacaaactgtggattttttaatacagcttatgaaaaacccatccacacctcaacgtttctggctaccccttctacatgattcggtggagctacttaatagcaaactcagccctcttatggatgttgctgagacgacattgttgctcaacaagctgcaagagctgtcaatggccaagctgcgccctgatttttccagtaatcacctaccaagccatgcgatgagctctgtgagattggctctggcatcaaatctggcacgtgccgttcttgaagaccgtagtccaagcacactttagcacaggagtatgacgtccagtttgctggtggattgtgaccatgtttgcttggggcctcctgacaattcaaatgatcgggtttgagaaagattgaccatgtaacatacattgtactctgcttgcttgcttagtgcatttgtgtcgcgaatgcatgcatcatgctgagcgctgtggtttgaaggaaagaaataaaggatcgacatgttgcttgaaaacatctcttcacgggagcgttttcttgaaaaagaatataacaaaatggcctgaccagtcgattgcttttctccgtttgcaaacagtataagagcaacttcaagaggctctctatattatttctaatatatataaatatatatttaaaaaaaatacttttcaacaacttatctaaatatagccatattctattctggatttctcctagtcaaatatatagaatgtgaatgtgtctctagagtgtacacaagatatagaaacacggttagagattaaaaaaatatagaaaatggtttttatgtaaatgattctaaatgataatttatagtatgtttggtttaaagaatg

SEQ ID NO: 31954 - DNA, 2926 bp, Zea Mays
gacagaatcccaaatttctcccagggatcagaaaaaaaaaactgccggcaaaaacaaattgtacaatctcctcgcggcggacgatgctaggtggtcgatgctgcgctcgcggtgtgtccgactgcccgagccaatgccggagccccagtcctctgtggcgtcaagcggaagcgtagatcgcctccgcaacgccttcggcggagtgctgtgcatcttcaccctccttctcatcggcgtcctcgccttctccatccgactattctccgtgatcaaatacgaaagcgtcatccacgagttcgatccctacttcaattaccgcgttacccagttcttgtcaaagaatggcatatatgaattctggaactggtttgatgaccgaacatggtatcctcttgggcgtgttattggtggcactgtctatcctggtttgacacttactgctggtacaatatggtggttgttgaattcccttaacatcccattgtcggtggagactgtctgtgtattcactgctccagttttctcagtcaatgcgtcctgggcaacttacctattaaccaaggaaacaaagggccccggtgctggtttgatggcagcaactattctagcaatggtcccatcatacatctcaagatctgttgctggcagctacgataatgaagctgtagctatatttgctttaatattcacattttatctatatgtaaagacactaaacactggatcactcttttatgcggcacttaattctctctcgtacttctacatggtttgttcttggggaggctacacattcatcatcaatcttatcccaatgcatgttctcttgtgtattgtgactggtcgttactcttcacgactttatattgcttatgctccccttgttgtgcttggaacacttctggcagcatcggtacctgttgttggttttaatgcagtaatgacgtcagagcactttgcatcatttctggtgtttataatcctccatgtggttgctcttgtttattacatcaaaggacttttaactccccgactgttcaaagtggccatgacatttgttataaccgttggattggctgtttgttttgctgctgcagcaatactcattgcattgattgcatctagcccaacaaaaggctggagtggtcgcagtttgagtctgctggatccaacctatgcaagcaagtacatccctataattgctagtgtgagcgaacaccaaccaccaacctggccttcttattttatggatatcaatgtgcttgcctttttagttcctgctgggatcgtatcatgcttcttaccattatctgatgcaagctcatttttggtcctgtacttggtaacctcagtgtatttctctggagtaatggtccgacttatgctggtccttgctcctgctgcatgcattttgtctgggattgctctgtctgaagcttttggtgtccttacaagatcaatgaaatttcagcgtccaacactggatgatggctcttttacagccggggatgggagttctgatactcctacgaactctgaaatgggtttgaaggaaaaaacatccaagaaaaatcggaagaaagacaaagagtcagagggaagttcacctgttgatcatagaaccgaagaaaagcttttagtactgccttgtgggccatctgctgtgggcataatgctgctgaccatactttctggtttttacgtgatccattgtgtgtgggctgctgcagaagcatattcagcaccttcaattgtgctaacatctcgttcacatgatgggtttcatgtttttgatgatttccgcgaagcttatggatggctgcgccataacacagatgcagatgacaaggttgcatcttggtgggactatggttatcagacaactgcaatggcaaacagaactgttattgtggacaataatacatggaataacacgcacattgcaacagttgggactgcaatggcatctccagaaaaagtagcatgggagatcttcaattctttagatgtcaaatatgtgcttgttatctttggagggcttattggctacccaagtgatgatattaataagttcctctggatggttcgaatcggaggtggtgtattccctcaaataaaggaagcagattaccttaaggatggcaactaccgtgttgatgctcatagtaccccaaccatgttgaattccctcatgtacaagctttgctattacagattcgtcgaaactgatggtaagggctttgatagagtgagaagatatgaaatagggaagaaacattttaaacttacgcattttgaggaggttttcacaactcaccattggctggttcggatttacaaactgaaacctcagaagaacagagtcagagggaaactgaaatttaaatctagtttaaaagcaagttttatgcgtaaaactggtggaaagaagagcccatggaaatagagactacaaaggcagggtgctggagtcactagtcagcacagttactatcctgagaaaaccatgaattcatcaaaaggagttagattaaaagcatagcattggtgtgttctttgttattgtcatggagcagattataggggtgcttcatgttttttttggcatttgatctccttaatggcattataggggtctgatgaaatttgtggtaggttctcgagtgaggttttatccccattttaaacaaaatggactttgtttataggaacctgactgagcgcctggccgtttggaaacatctttaaaggttgtttggtttgaagaaatggtggcctatcttttcttttaggctaccttttggaaggaaggattttttcccctatttcctgcattttttctgtaaaaatgaaatgattgtgaaatgtcaaatacgattctgtggaagttctgctttccaagagccttaccgcaggtgcgaagcag

SEQ ID NO: 31955 - DNA, 2793 bp, Zea Mays
agaaaaaaaaaactgccggcaaaaacaaattgtacaatctcctcgcggcggacgatgctaggtggtcgatgctgcgctcgcggtgtgtccgactgcccgagccaatgccggagccccagtcctctgtggcgtcaagcggaagcgtagatcgcctccgcaacgccttcggcggagtgctgtgcatcttcaccctccttctcatcggcgtcctcgccttctccatccgactattctccgtgatcaaatacgaaagcgtcatccacgagttcgatccctacttcaattaccgcgttacccagttcttgtcaaagaatggcatatatgaattctggaactggtttgatgaccgaacatggtatcctcttgggcgtgttattggtggcactgtctatcctggtttgacacttactgctggtacaatatggtggttgttgaattcccttaacatcccattgtcggtggagactgtctgtgtattcactgctccagttttctcagtcaatgcgtcctgggcaacttacctattaaccaaggaaacaaagggccccggtgctggtttgatggcagcaactattctagcaatggtcccatcatacatctcaagatctgttgctggcagctacgataatgaagctgtagctatatttgctttaatattcacattttatctatatgtaaagacactaaacactggatcactcttttatgcggcacttaattctctctcgtacttctacatggtttgttcttggggaggctacacattcatcatcaatcttatcccaatgcatgttctcttgtgtattgtgactggtcgttactcttcacgactttatattgcttatgctccccttgttgtgcttggaacacttctggcagcatcggtacctgttgttggttttaatgcagtaatgacgtcagagcactttgcatcatttctgggctgtttgttttgctgctgcagcaatactcattgcattgattgcatctagcccaacaaaaggctggagtggtcgcagtttgagtctgctggatccaacctatgcaagcaagtacatccctataattgctagtgtgagcgaacaccaaccaccaacctggccttcttattttatggatatcaatgtgcttgcctttttagttcctgctgggatcgtatcatgcttcttaccattatctgatgcaagctcatttttggtcctgtacttggtaacctcagtgtatttctctggagtaatggtccgacttatgctggtccttgctcctgctgcatgcattttgtctgggattgctctgtctgaagcttttggtgtccttacaagatcaatgaaatttcagcgtccaacactggatgatggctcttttacagccggggatgggagttctgatactcctacgaactctgaaatgggtttgaaggaaaaaacatccaagaaaaatcggaagaaagacaaagagtcagagggaagttcacctgttgatcatagaaccgaagaaaagcttttagtactgccttgtgggccatctgctgtgggcataatgctgctgaccatactttctggtttttacgtgatccattgtgtgtgggctgctgcagaagcatattcagcaccttcaattgtgctaacatctcgttcacatgatgggtttcatgtttttgatgatttccgcgaagcttatggatggctgcgccataacacagatgcagatgacaaggttgcatcttggtgggactatggttatcagacaactgcaatggcaaacagaactgttattgtggacaataatacatggaataacacgcacattgcaacagttgggactgcaatggcatctccagaaaaagtagcatgggagatcttcaattctttagatgtcaaatatgtgcttgttatctttggagggcttattggctacccaagtgatgatattaataagttcctctggatggttcgaatcggaggtggtgtattccctcaaataaaggaagcagattaccttaaggatggcaactaccgtgttgatgctcatagtaccccaaccatgttgaattccctcatgtacaagctttgctattacagattcgtcgaaactgatggtaagggctttgatagagtgagaagatatgaaatagggaagaaacattttaaacttacgcattttgaggaggttttcacaactcaccattggctggttcggatttacaaactgaaacctcagaagaacagagtcagagggaaactgaaatttaaatctagtttaaaagcaagttttatgcgtaaaactggtggaaagaagagcccatggaaatagagactacaaaggcagggtgctggagtcactagtcagcacagttactatcctgagaaaaccatgaattcatcaaaaggagttagattaaaagcatagcattggtgtgttctttgttattgtcatggagcagattataggggtgcttcatgttttttttggcatttgatctccttaatggcattataggggtctgatgaaatttgtggtaggttctcgagtgaggttttatccccattttaaacaaaatggactttgtttataggaacctgactgagcgcctggccgtttggaaacatctttaaaggttgtttggtttgaagaaatggtggcctatcttttcttttaggctaccttttggaaggaaggattttttcccctatttcctgcattttttctgtaaaaatgaaatgattgtgaaatgtcaaatacgattctgtggaagttctgctttccaagagccttaccgcaggtgcgaagcag

SEQ ID NO: 31956 - DNA, 2783 bp, Zea Mays
gaaaaaaaaaactgccggcaaaaacaaattgtacaatctcctcgcggcggacgatgctaggtggtcgatgctgcgctcgcggtgtgtccgactgcccgagccaatgccggagccccagtcctctgtggcgtcaagcggaagcgtagatcgcctccgcaacgccttcggcggagtgctgtgcatcttcaccctccttctcatcggcgtcctcgccttctccatccgactattctccgtgatcaaatacgaaagcgtcatccacgagttcgatccctacttcaattaccgcgttacccagttcttgtcaaagaatggcatatatgaattctggaactggtttgatgaccgaacatggtatcctcttgggcgtgttattggtggcactgtctatcctggtttgacacttactgctggtacaatatggtggttgttgaattcccttaacatcccattgtcggtggagactgtctgtgtattcactgctccagttttctcagtcaatgcgtcctgggcaacttacctattaaccaagggccccggtgctggtttgatggcagcaactattctagcaatggtcccatcatacatctcaagatctgttgctggcagctacgataatgaagctgtagctatatttgctttaatattcacattttatctatatgtaaagacactaaacactggatcactcttttatgcggcacttaattctctctcgtacttctacatggtttgttcttggggaggctacacattcatcatcaatcttatcccaatgcatgttctcttgtgtattgtgactggtcgttactcttcacgactttatattgcttatgctccccttgttgtgcttggaacacttctggcagcatcggtacctgttgttggttttaatgcagtaatgacgtcagagcactttgcatcatttctgggctgtttgttttgctgctgcagcaatactcattgcattgattgcatctagcccaacaaaaggctggagtggtcgcagtttgagtctgctggatccaacctatgcaagcaagtacatccctataattgctagtgtgagcgaacaccaaccaccaacctggccttcttattttatggatatcaatgtgcttgcctttttagttcctgctgggatcgtatcatgcttcttaccattatctgatgcaagctcatttttggtcctgtacttggtaacctcagtgtatttctctggagtaatggtccgacttatgctggtccttgctcctgctgcatgcattttgtctgggattgctctgtctgaagcttttggtgtccttacaagatcaatgaaatttcagcgtccaacactggatgatggctcttttacagccggggatgggagttctgatactcctacgaactctgaaatgggtttgaaggaaaaaacatccaagaaaaatcggaagaaagacaaagagtcagagggaagttcacctgttgatcatagaaccgaagaaaagcttttagtactgccttgtgggccatctgctgtgggcataatgctgctgaccatactttctggtttttacgtgatccattgtgtgtgggctgctgcagaagcatattcagcaccttcaattgtgctaacatctcgttcacatgatgggtttcatgtttttgatgatttccgcgaagcttatggatggctgcgccataacacagatgcagatgacaaggttgcatcttggtgggactatggttatcagacaactgcaatggcaaacagaactgttattgtggacaataatacatggaataacacgcacattgcaacagttgggactgcaatggcatctccagaaaaagtagcatgggagatcttcaattctttagatgtcaaatatgtgcttgttatctttggagggcttattggctacccaagtgatgatattaataagttcctctggatggttcgaatcggaggtggtgtattccctcaaataaaggaagcagattaccttaaggatggcaactaccgtgttgatgctcatagtaccccaaccatgttgaattccctcatgtacaagctttgctattacagattcgtcgaaactgatggtaagggctttgatagagtgagaagatatgaaatagggaagaaacattttaaacttacgcattttgaggaggttttcacaactcaccattggctggttcggatttacaaactgaaacctcagaagaacagagtcagagggaaactgaaatttaaatctagtttaaaagcaagttttatgcgtaaaactggtggaaagaagagcccatggaaatagagactacaaaggcagggtgctggagtcactagtcagcacagttactatcctgagaaaaccatgaattcatcaaaaggagttagattaaaagcatagcattggtgtgttctttgttattgtcatggagcagattataggggtgcttcatgttttttttggcatttgatctccttaatggcattataggggtctgatgaaatttgtggtaggttctcgagtgaggttttatccccattttaaacaaaatggactttgtttataggaacctgactgagcgcctggccgtttggaaacatctttaaaggttgtttggtttgaagaaatggtggcctatcttttcttttaggctaccttttggaaggaaggattttttcccctatttcctgcattttttctgtaaaaatgaaatgattgtgaaatgtcaaatacgattctgtggaagttctgctttccaagagccttaccgcaggtgcgaagcag

SEQ ID NO: 31957 - DNA, 2732 bp, Zea Mays
gaaaaaaaaaactgccggcaaaaacaaattgtacaatctcctcgcggcggacgatgctaggtggtcgatgctgcgctcgcggtgtgtccgactgcccgagccaatgccggagccccagtcctctgtggcgtcaagcggaagcgtagatcgcctccgcaacgccttcggcggagtgctgtgcatcttcaccctccttctcatcggcgtcctcgccttctccatccgactattctccgtgatcaaatacgaaagcgtcatccacgagttcgatccctacttcaattaccgcgttacccagttcttgtcaaagaatggcatatatgaattctggaactggtttgatgaccgaacatggtatcctcttgggcgtgttattggtggcactgtctatcctggtttgacacttactgctggtacaatatggtggttgttgaattcccttaacatcccattgtcggtggagactgtctgtgtattcactgctccagttttctcagtcaatgcgtcctgggcaacttacctattaaccaaggaaacaaagggccccggtgctggtttgatggcagcaactattctagcaatggtcccatcatacatctcaagatctgttgctggcagctacgataatgaagctgtagctatatttgctttaatattcacattttatctatatgtaaaggtttgttcttggggaggctacacattcatcatcaatcttatcccaatgcatgttctcttgtgtattgtgactggtcgttactcttcacgactttatattgcttatgctccccttgttgtgcttggaacacttctggcagcatcggtacctgttgttggttttaatgcagtaatgacgtcagagcactttgcatcatttctgggctgtttgttttgctgctgcagcaatactcattgcattgattgcatctagcccaacaaaaggctggagtggtcgcagtttgagtctgctggatccaacctatgcaagcaagtacatccctataattgctagtgtgagcgaacaccaaccaccaacctggccttcttattttatggatatcaatgtgcttgcctttttagttcctgctgggatcgtatcatgcttcttaccattatctgatgcaagctcatttttggtcctgtacttggtaacctcagtgtatttctctggagtaatggtccgacttatgctggtccttgctcctgctgcatgcattttgtctgggattgctctgtctgaagcttttggtgtccttacaagatcaatgaaatttcagcgtccaacactggatgatggctcttttacagccggggatgggagttctgatactcctacgaactctgaaatgggtttgaaggaaaaaacatccaagaaaaatcggaagaaagacaaagagtcagagggaagttcacctgttgatcatagaaccgaagaaaagcttttagtactgccttgtgggccatctgctgtgggcataatgctgctgaccatactttctggtttttacgtgatccattgtgtgtgggctgctgcagaagcatattcagcaccttcaattgtgctaacatctcgttcacatgatgggtttcatgtttttgatgatttccgcgaagcttatggatggctgcgccataacacagatgcagatgacaaggttgcatcttggtgggactatggttatcagacaactgcaatggcaaacagaactgttattgtggacaataatacatggaataacacgcacattgcaacagttgggactgcaatggcatctccagaaaaagtagcatgggagatcttcaattctttagatgtcaaatatgtgcttgttatctttggagggcttattggctacccaagtgatgatattaataagttcctctggatggttcgaatcggaggtggtgtattccctcaaataaaggaagcagattaccttaaggatggcaactaccgtgttgatgctcatagtaccccaaccatgttgaattccctcatgtacaagctttgctattacagattcgtcgaaactgatggtaagggctttgatagagtgagaagatatgaaatagggaagaaacattttaaacttacgcattttgaggaggttttcacaactcaccattggctggttcggatttacaaactgaaacctcagaagaacagagtcagagggaaactgaaatttaaatctagtttaaaagcaagttttatgcgtaaaactggtggaaagaagagcccatggaaatagagactacaaaggcagggtgctggagtcactagtcagcacagttactatcctgagaaaaccatgaattcatcaaaaggagttagattaaaagcatagcattggtgtgttctttgttattgtcatggagcagattataggggtgcttcatgttttttttggcatttgatctccttaatggcattataggggtctgatgaaatttgtggtaggttctcgagtgaggttttatccccattttaaacaaaatggactttgtttataggaacctgactgagcgcctggccgtttggaaacatctttaaaggttgtttggtttgaagaaatggtggcctatcttttcttttaggctaccttttggaaggaaggattttttcccctatttcctgcattttttctgtaaaaatgaaatgattgtgaaatgtcaaatacgattctgtggaagttctgctttccaagagccttaccgcaggtgcgaagcag

SEQ ID NO: 31958 - DNA, 2433 bp, Zea Mays
gaaaaaaaaaactgccggcaaaaacaaattgtacaatctcctcgcggcggacgatgctaggtggtcgatgctgcgctcgcggtgtgtccgactgcccgagccaatgccggagccccagtcctctgtggcgtcaagcggaagcgtagatcgcctccgcaacgccttcggcggagtgctgtgcatcttcaccctccttctcatcggcgtcctcgccttctccatccgactattctccgtgatcaaatacgaaagcgtcatccacgagttcgatccctacttcaattaccgcgttacccagttcttgtcaaagaatggcatatatgaattctggaactggtttgatgaccgaacatggtatcctcttgggcgtgttattggtggcactgtctatcctggtttgacacttactgctggtacaatatggtggttgttgaattcccttaacatcccattgtcggtggagactgtctgtgtattcactgctccagttttctcagtcaatgcgtcctgggcaacttacctattaaccaaggaaacaaagggccccggtgctggtttgatggcagcaactattctagcaatgggctgtttgttttgctgctgcagcaatactcattgcattgattgcatctagcccaacaaaaggctggagtggtcgcagtttgagtctgctggatccaacctatgcaagcaagtacatccctataattgctagtgtgagcgaacaccaaccaccaacctggccttcttattttatggatatcaatgtgcttgcctttttagttcctgctgggatcgtatcatgcttcttaccattatctgatgcaagctcatttttggtcctgtacttggtaacctcagtgtatttctctggagtaatggtccgacttatgctggtccttgctcctgctgcatgcattttgtctgggattgctctgtctgaagcttttggtgtccttacaagatcaatgaaatttcagcgtccaacactggatgatggctcttttacagccggggatgggagttctgatactcctacgaactctgaaatgggtttgaaggaaaaaacatccaagaaaaatcggaagaaagacaaagagtcagagggaagttcacctgttgatcatagaaccgaagaaaagcttttagtactgccttgtgggccatctgctgtgggcataatgctgctgaccatactttctggtttttacgtgcttatggatggctgcgccataacacagatgcagatgacaaggttgcatcttggtgggactatggttatcagacaactgcaatggcaaacagaactgttattgtggacaataatacatggaataacacgcacattgcaacagttgggactgcaatggcatctccagaaaaagtagcatgggagatcttcaattctttagatgtcaaatatgtgcttgttatctttggagggcttattggctacccaagtgatgatattaataagttcctctggatggttcgaatcggaggtggtgtattccctcaaataaaggaagcagattaccttaaggatggcaactaccgtgttgatgctcatagtaccccaaccatgttgaattccctcatgtacaagctttgctattacagattcgtcgaaactgatggtaagggctttgatagagtgagaagatatgaaatagggaagaaacattttaaacttacgcattttgaggaggtggagtgcttttattctttttttttcttccaatttggatgtgaaaagtcccctattgcttgaataatgcattccttgtgtttccatgctgctggatacaggttttcacaactcaccattggctggttcggatttacaaactgaaacctcagaagaacagagtcagagggaaactgaaatttaaatctagtttaaaagcaagttttatgcgtaaaactggtggaaagaagagcccatggaaatagagactacaaaggcagggtgctggagtcactagtcagcacagttactatcctgagaaaaccatgaattcatcaaaaggagttagattaaaagcatagcattggtgtgttctttgttattgtcatggagcagattataggggtgcttcatgttttttttggcatttgatctccttaatggcattataggggtctgatgaaatttgtggtaggttctcgagtgaggttttatccccattttaaacaaaatggactttgtttataggaacctgactgagcgcctggccgtttggaaacatctttaaaggttgtttggtttgaagaaatggtggcctatcttttcttttaggctaccttttggaaggaaggattttttcccctatttcctgcattttttctgtaaaaatgaaatgattgtgaaatgtcaaatacgattctgtggaagttctgctttccaagagccttaccgcaggtgcgaagcag

SEQ ID NO: 31959 - DNA, 3177 bp, Zea Mays
gaaaaaaaaaactgccggcaaaaacaaattgtacaatctcctcgcggcggacgatgctaggtggtcgatgctgcgctcgcggtgtgtccgactgcccgagccaatgccggagccccagtcctctgtggcgtcaagcggaagcgtagatcgcctccgcaacgccttcggcggagtgctgtgcatcttcaccctccttctcatcggcgtcctcgccttctccatccgactattctccgtgatcaaatacgaaagcgtcatccacgagttcgatccctacttcaattaccgcgttacccagttcttgtcaaagaatggcatatatgaattctggaactggtttgatgaccgaacatggtatcctcttgggcgtgttattggtggcactgtctatcctggtttgacacttactgctggtacaatatggtggttgttgaattcccttaacatcccattgtcggtggagactgtctgtgtattcactgctccagttttctcagtcaatgcgtcctgggcaacttacctattaaccaaggaaacaaagggccccggtgctggtttgatggcagcaactattctagcaatggtcccatcatacatctcaagatctgttgctggcagctacgataatgaagctgtagctatatttgctttaatattcacattttatctatatgtaaagacactaaacactggatcactcttttatgcggcacttaattctctctcgtacttctacatggtttgttcttggggaggctacacattcatcatcaatcttatcccaatgcatgttctcttgtgtattgtgactggtcgttactcttcacgactttatattgcttatgctccccttgttgtgcttggaacacttctggcagcatcggtacctgttgttggttttaatgcagtaatgacgtcagagcactttgcatcatttctggtatattgattgtgtatctactagggatgcgagttgcacttcttttgagtcatggggtcaacccaagacttgctaaaatgaataagaatgacattacacataattatttagggagagaaatgaactaaattagctgacctagaaagcaccatttggtacccatttgcatccctgatctacctacgtgttaccctttacttcctagcttctcccatttcagtaaaaccttggctgcaaactaattcatctcccccctatcctctctattatttcaaaaacaggtgtttataatcctccatgtggttgctcttgtttattacatcaaaggacttttaactccccgactgttcaaagtggccatgacatttgttataaccgttggattggctgtttgttttgctgctgcagcaatactcattgcattgattgcatctagcccaacaaaaggctggagtggtcgcagtttgagtctgctggatccaacctatgcaagcaagtacatccctataattgctagtgtgagcgaacaccaaccaccaacctggccttcttattttatggatatcaatgtgcttgcctttttagttcctgctgggatcgtatcatgcttcttaccattatctgatgcaagctcatttttggtcctgtacttggtaacctcagtgtatttctctggagtaatggtccgacttatgctggtccttgctcctgctgcatgcattttgtctgggattgctctgtctgaagcttttggtgtccttacaagatcaatgaaatttcagcgtccaacactggatgatggctcttttacagccggggatgggagttctgatactcctacgaactctgaaatgggtttgaaggaaaaaacatccaagaaaaatcggaagaaagacaaagagtcagagggaagttcacctgttgatcatagaaccgaagaaaagcttttagtactgccttgtgggccatctgctgtgggcataatgctgctgaccatactttctggtttttacgtgatccattgtgtgtgggctgctgcagaagcatattcagcaccttcaattgtgctaacatctcgttcacatgatgggtttcatgtttttgatgatttccgcgaagcttatggatggctgcgccataacacagatgcagatgacaaggttgcatcttggtgggactatggttatcagacaactgcaatggcaaacagaactgttattgtggacaataatacatggaataacacgcacattgcaacagttgggactgcaatggcatctccagaaaaagtagcatgggagatcttcaattctttagatgtcaaatatgtgcttgttatctttggagggcttattggctacccaagtgatgatattaataagttcctctggatggttcgaatcggaggtggtgtattccctcaaataaaggaagcagattaccttaaggatggcaactaccgtgttgatgctcatagtaccccaaccatgttgaattccctcatgtacaagctttgctattacagattcgtcgaaactgatggtaagggctttgatagagtgagaagatatgaaatagggaagaaacattttaaacttacgcattttgaggaggttttcacaactcaccattggctggttcggatttacaaactgaaacctcagaagaacagagtcagagggaaactgaaatttaaatctagtttaaaagcaagttttatgcgtaaaactggtggaaagaagagcccatggaaatagagactacaaaggcagggtgctggagtcactagtcagcacagttactatcctgagaaaaccatgaattcatcaaaaggagttagattaaaagcatagcattggtgtgttctttgttattgtcatggagcagattataggggtgcttcatgttttttttggcatttgatctccttaatggcattataggggtctgatgaaatttgtggtaggttctcgagtgaggttttatccccattttaaacaaaatggactttgtttataggaacctgactgagcgcctggccgtttggaaacatctttaaaggttgtttggtttgaagaaatggtggcctatcttttcttttaggctaccttttggaaggaaggattttttcccctatttcctgcattttttctgtaaaaatgaaatgattgtgaaatgtcaaatacgattctgtggaagttctgctttccaagagccttaccgcaggtgcgaagcag

SEQ ID NO: 31960 - DNA, 2316 bp, Zea Mays
gaaaaaaaaaactgccggcaaaaacaaattgtacaatctcctcgcggcggacgatgctaggtggtcgatgctgcgctcgcggtgtgtccgactgcccgagccaatgccggagccccagtcctctgtggcgtcaagcggaagcgtagatcgcctccgcaacgccttcggcggagtgctgtgcatcttcaccctccttctcatcggcgtcctcgccttctccatccgactattctccgtgatcaaatacgaaagcgtcatccacgagttcgatccctacttcaattaccgcgttacccagttcttgtcaaagaatggcatatatgaattctggaactggtttgatgaccgaacatggtatcctcttgggcgtgttattggtggcactgtctatcctggtttgacacttactgctggaaacaaagggccccggtgctggtttgatggcagcaactattctagcaatgggctgtttgttttgctgctgcagcaatactcattgcattgattgcatctagcccaacaaaaggctggagtggtcgcagtttgagtctgctggatccaacctatgcaagcaagtacatccctataattgctagtgtgagcgaacaccaaccaccaacctggccttcttattttatggatatcaatgtgcttgcctttttagttcctgctgggatcgtatcatgcttcttaccattatctgatgcaagctcatttttggtcctgtacttggtaacctcagtgtatttctctggagtaatggtccgacttatgctggtccttgctcctgctgcatgcattttgtctgggattgctctgtctgaagcttttggtgtccttacaagatcaatgaaatttcagcgtccaacactggatgatggctcttttacagccggggatgggagttctgatactcctacgaactctgaaatgggtttgaaggaaaaaacatccaagaaaaatcggaagaaagacaaagagtcagagggaagttcacctgttgatcatagaaccgaagaaaagcttttagtactgccttgtgggccatctgctgtgggcataatgctgctgaccatactttctggtttttacgtgatccattgtgtgtgggctgctgcagaagcatattcagcaccttcaattgtgctaacatctcgttcacatgatgggtttcatgtttttgatgatttccgcgaagcttatggatggctgcgccataacacagatgcagatgacaaggttgcatcttggtgggactatggttatcagacaactgcaatggcaaacagaactgttattgtggacaataatacatggaataacacgcacattgcaacagttgggactgcaatggcatctccagaaaaagtagcatgggagatcttcaattctttagatgtcaaatatgtgcttgttatctttggagggcttattggctacccaagtgatgatattaataagttcctctggatggttcgaatcggaggtggtgtattccctcaaataaaggaagcagattaccttaaggatggcaactaccgtgttgatgctcatagtaccccaaccatgttgaattccctcatgtacaagctttgctattacagattcgtcgaaactgatggtaagggctttgatagagtgagaagatatgaaatagggaagaaacattttaaacttacgcattttgaggaggttttcacaactcaccattggctggttcggatttacaaactgaaacctcagaagaacagagtcagagggaaactgaaatttaaatctagtttaaaagcaagttttatgcgtaaaactggtggaaagaagagcccatggaaatagagactacaaaggcagggtgctggagtcactagtcagcacagttactatcctgagaaaaccatgaattcatcaaaaggagttagattaaaagcatagcattggtgtgttctttgttattgtcatggagcagattataggggtgcttcatgttttttttggcatttgatctccttaatggcattataggggtctgatgaaatttgtggtaggttctcgagtgaggttttatccccattttaaacaaaatggactttgtttataggaacctgactgagcgcctggccgtttggaaacatctttaaaggttgtttggtttgaagaaatggtggcctatcttttcttttaggctaccttttggaaggaaggattttttcccctatttcctgcattttttctgtaaaaatgaaatgattgtgaaatgtcaaatacgattctgtggaagttctgctttccaagagccttaccgcaggtgcgaagcag

SEQ ID NO: 31961 - DNA, 1522 bp, Zea Mays
cccacaaacacacacacacagaccatggtgatggaggagacgatagacgacagtgagatgagtttgtcgaacatggtgctgggcttcctggaagatttcgagagggacgagcgacggccggagaacgacgacgacaacaacgaggaagagggctccagcggcggcgacaccgccgagagcaaggccttctggcagacccaacacttgcagctgcgcgaggcactggccaagggcagcccagccgagagcaggatccgcgcggacacggaggaggccgtcaagagcatgcgcgccgcggcctgctcctgctcctgcacggggcggcccgccgcccgggactgccggccgtgcatgctccggcacgtcgccgaccggctgcgcgacgccggctacgacagcgcgctctgcaaatccaagtggacgcgctcgccggatatcccttcaggtaacctgcgtctcgcgcgtcgtgattataacttcgtcttttcgttctttctaccgcaataaacgcaacgttgaggaatatcctgtacaagctcacatggttcacatggacttggtcatcctcctatgacactgacagacgccgcttcccagctgatactcctacacagccgccctaacaaacattccaacaaacagccagccaaatgccaggaacgcgtctctttctccgacggttcagcgttagcggaggcgtccacaccaaccctctaggcgagcacagctacgtggaggtggcggtgcagacgaggagcggcaagtccgtgcgcgtggtggtggagctcagcttccgcgccgagttcgaggtggcgcgcgccagcgccggctaccgcgcgctggtgaccgcgctgcccgaggtgttcgtcggccgggccgaccggctgcgcggcgtcgtcaaggtcatgtgcgccgcggccaagcagtgcatgaaggataacaacatgcacatgggaccctggaggaagcacaagtacatgcaggccaagtggctcggcacgcccgagcggggagcggcggcggtggcggcggcggagacgccggtggtggcggttccgtcggtgacggtcggctcgccagagaagcagaccaagttcagggcgtccatgctgaccttcgactttggccggaccgcgctggaggtcgcgtgatgaacgcacatacgctgccggtcgagcggcattagtagttctctaaatatagacagaggaggtaactttcgagaagaaaaaaaagttatatagagtgtacctgggttttaggtttttgtcaggattcagaaagctgaatctgtaatatcaatcgagctaggtgtaaacagataaggcgagcttgtcacgcgtactccgatcgcgtcactgtaatggaaatgaagctaaaagatcatgggtgtcggttcacatgtcagtaacgaaatggataactgataacgttaaattatatttgttaagtctaatcgtaatcgataccacactgaaaatatataccggctaatttaaacttattactgccgttattcgag

SEQ ID NO: 31962 - DNA, 2290 bp, Zea Mays
gaacgttgctggagatgaagaagatatagaggactgtatattttagagggcactgtaaaggacaaagaatattcttttactctgcgtttggatgctggtattgaggcccagattttggaattggaattggtaaagccgaatttcagcgtttggatgctcacggaattcggaactggaaatccatcccaattcccctgatcaattctatttccctcagatttggtattcctagatcaattcaattccaccacgtgaatgcctacatccaaacgaagcattaggggatgaaatttagaggacgttgttggagacagcctcactcctcaccaccacaagtgaagtcaccgacgcacgcacggctgcagcgcgctcctactctcccgcgatcgccaccggggaaggggcaatagaataaagtgagggcagccaatgcaggccgccgtcaacaccaccactgtcggcgctcacccgcacccaacaaagtcctcgttcctccgtccgtcccctccttgccgcgtctacttccacgcttctccacgcccgaaccttagggcgatcgccatggccagcaagtcgcagctgcaggaccaactgatcatcactcgccccgacgactggcacctccatcttcgcgaaggcggtgtcctcgaggctgtagtgccacacagcgcgaggcattttgggagggccatcatcatgcccaacctgaagccgccggtgaccacaacggcacgggccgtggagtacagggaggagataatgagggcgctgccgccagggagtagcttcgagccgctcatgacactatacctcacagacaacacaagcccagaggagatcaagctcgcaagaaagagtggtataatttttgctgtgaagttgtatcctgctggagcaactaccaattcccaagatggtgtcactgatatatttgggaagtgcttgccggtcctcgaggagatggtcaggcaggaaatgccgttgcttgttcatggagaagtcacagatccacatgttgacacatttgaccgcgagaaggttttcattgacaaaatattagcaccacttgtacaaaaacttccgcagctgaaaattgtcatggaacatatcacaactatggatgcagtgaacttcatagaatcatgtgaagaaggtcatgttgctgcaacagtgactccccagcatctcctcctcaataggaatgctttatttcagggtggcttgcagccacacaattattgcttgccagtactgaaaagagagactcatagacaagctattgtgtctgctgtaacaaatgggagtagacggtacttccttggtactgacagcgctccccatgataaacggaacaaagagtgttcctgtggatgtgctggaatatatagcgctcctgttgccttgtctctttatgtgaaggtatttgaagaggctggtgcccttgataaactagaagcatttacaagcttcaatggccctgatttttatggcctcccaaggaacacttcaaagattatcttgagaaagaatgcctggaaagttcctgctacttataaacacagttcaggggagattgtgcctatgtttaatggcagcacccttgaatggcttccatctgatcagcctaaagagtaaacagtatacattattggacccagcacttgggggaatcaatagtgcaattctggaagtagctaaaaggccatattgtatgtttatcaaggctagtctactgatctagacaccatagcatctgtggtttctaaggtgacaaggcgaccaggcaagagctgggtgtgtctggacgcctagatggcacaaggtgctacttttccccaaggcgagctgggtatgcttggacacctagcctctgaaacatgctaccacatccataataatgtaatgaataaatatcagcatttcagttacatagccgtataaccttctagtccggacataatatttctatgtttttgttactctgtgtctgaataaatagatttctactttaaaattgtctttaaataaatcaatctctaggaggctaaacggtccatcagcctatctatttttcttgaagtctcctcgtgtttactgcacctcccatctcctaatctaatattgagtttctgcagttagatgtgtgtagtatatgctataattagtgtgcaattggaacgtttttcaatcaatgtgcactctagtcaatgaaggttagtatgattttttctctatcatactaatctcttctaaacttattagaaatctactctctccgtccaaaaataaa

SEQ ID NO: 31963 - DNA, 2554 bp, Zea Mays
gaacgttgctggagatgaagaagatatagaggactgtatattttagagggcactgtaaaggacaaagaatattcttttactctgcgtttggatgctggtattgaggcccagattttggaattggaattggtaaagccgaatttcagcgtttggatgctcacggaattcggaactggaaatccatcccaattcccctgatcaattctatttccctcagatttggtattcctagatcaattcaattccaccacgtgaatgcctacatccaaacgaagcattaggggatgaaatttagaggacgttgttggagacagcctcactcctcaccaccacaagtgaagtcaccgacgcacgcacggctgcagcgcgctcctactctcccgcgatcgccaccggggaaggggcaatagaataaagtgagggcagccaatgcaggccgccgtcaacaccaccactgtcggcgctcacccgcacccaacaaagtcctcgttcctccgtccgtcccctccttgccgcgtctacttccacgcttctccacgcccgaaccttagggcgatcgccatggccagcaagtcgcagctgcaggaccaactgatcatcactcgccccgacgactggcacctccatcttcgcgaaggcggtgtcctcgaggctgtagtgccacacagcgcgaggcattttgggagggccatcatcatgcccaacctgaagccgccggtgaccacaacggcacgggccgtggagtacagggaggagataatgagggcgctgccgccagggagtagcttcgagccgctcatgacactatacctcacagacaacacaagcccagaggagatcaagctcgcaagaaagagtggtataatttttgctgtgaagttgtatcctgctggagcaactaccaattcccaagatggtgtcactgatatatttgggaagtgcttgccggtcctcgaggagatggtcaggcaggaaatgccgttgcttgttcatggagaagtcacagatccacatgttgacacatttgaccgcgagaaggttttcattgacaaaatattagcaccacttgtacaaaaacttccgcagctgaaaattgtcatggaacatatcacaactatggatgcagtgaacttcatagaatcatgtgaagaaggtcatgttgctgcaacagtgactccccagcatctcctcctcaataggaatgctttatttcagggtggcttgcagccacacaattattgcttgccagtactgaaaagagagactcatagtatgttgcgatggcctcctataagaaatgctaccatttgttataaaaatgcagaatcatattccttttggttcaccaaataactagagtttcttcagaaattatgaaacagcttcttaaacatgatgataatgatgttttgtcttacataacaatttatagtcttacatttgtctgttgcctggttaaatttgggtatcagctatcatttcaattaactgtaatgtaaatttttttctgttatgtatttgaaccatcacccaggacaagctattgtgtctgctgtaacaaatgggagtagacggtacttccttggtactgacagcgctccccatgataaacggaacaaagagtgttcctgtggatgtgctggaatatatagcgctcctgttgccttgtctctttatgtgaaggtatttgaagaggctggtgcccttgataaactagaagcatttacaagcttcaatggccctgatttttatggcctcccaaggaacacttcaaagattatcttgagaaagaatgcctggaaagttcctgctacttataaacacagttcaggggagattgtgcctatgtttaatggcagcacccttgaatggcttccatctgatcagcctaaagagtaaacagtatacattattggacccagcacttgggggaatcaatagtgcaattctggaagtagctaaaaggccatattgtatgtttatcaaggctagtctactgatctagacaccatagcatctgtggtttctaaggtgacaaggcgaccaggcaagagctgggtgtgtctggacgcctagatggcacaaggtgctacttttccccaaggcgagctgggtatgcttggacacctagcctctgaaacatgctaccacatccataataatgtaatgaataaatatcagcatttcagttacatagccgtataaccttctagtccggacataatatttctatgtttttgttactctgtgtctgaataaatagatttctactttaaaattgtctttaaataaatcaatctctaggaggctaaacggtccatcagcctatctatttttcttgaagtctcctcgtgtttactgcacctcccatctcctaatctaatattgagtttctgcagttagatgtgtgtagtatatgctataattagtgtgcaattggaacgtttttcaatcaatgtgcactctagtcaatgaaggttagtatgattttttctctatcatactaatctcttctaaacttattagaaatctactctctccgtccaaaaataaa

SEQ ID NO: 31964 - DNA, 1909 bp, Zea Mays
tccaaacgaagcattaggggatgaaatttagaggacgttgttggagacagcctcactcctcaccaccacaagtgaagtcaccgacgcacgcacggctgcagcgcgctcctactctcccgcgatcgccaccggggaaggggcaatagaataaagtgagggcagccaatgcaggccgccgtcaacaccaccactgtcggcgctcacccgcacccaacaaagtcctcgttcctccgtccgtcccctccttgccgcgtctacttccacgcttctccacgcccgaaccttagggcgatcgccatggccagcaagtcgcagctgcaggaccaactgatcatcactcgccccgacgactggcacctccatcttcgcgaaggcggtgtcctcgaggctgtagtgccacacagcgcgaggcattttgggagggccatcatcatgcccaacctgaagccgccggtgaccacaacggcacgggccgtggagtacagggaggagataatgagggcgctgccgccagggagtagcttcgagccgctcatgacactatacctcacagacaacacaagcccagaggagatcaagctcgcaagaaagagtggtataatttttgctgtgaagttgtatcctgctggagcaactaccaattcccaagatggtgtcactgatatatttgggaagtgcttgccggtcctcgaggagatggtcaggcaggaaatgccgttgcttgttcatggagaagtcacagatccacatgttgacacatttgaccgcgagaaggttttcattgacaaaatattagcaccacttgtacaaaaacttccgcagctgaaaattgtcatggaacatatcacaactatggatgcagtgaacttcatagaatcatgtgaagaaggacaagctattgtgtctgctgtaacaaatgggagtagacggtacttccttggtactgacagcgctccccatgataaacggaacaaagagtgttcctgtggatgtgctggaatatatagcgctcctgttgccttgtctctttatgtgaaggtatttgaagaggctggtgcccttgataaactagaagcatttacaagcttcaatggccctgatttttatggcctcccaaggaacacttcaaagattatcttgagaaagaatgcctggaaagttcctgctacttataaacacagttcaggggagattgtgcctatgtttaatggcagcacccttgaatggcttccatctgatcagcctaaagagtaaacagtatacattattggacccagcacttgggggaatcaatagtgcaattctggaagtagctaaaaggccatattgtatgtttatcaaggctagtctactgatctagacaccatagcatctgtggtttctaaggtgacaaggcgaccaggcaagagctgggtgtgtctggacgcctagatggcacaaggtgctacttttccccaaggcgagctgggtatgcttggacacctagcctctgaaacatgctaccacatccataataatgtaatgaataaatatcagcatttcagttacatagccgtataaccttctagtccggacataatatttctatgtttttgttactctgtgtctgaataaatagatttctactttaaaattgtctttaaataaatcaatctctaggaggctaaacggtccatcagcctatctatttttcttgaagtctcctcgtgtttactgcacctcccatctcctaatctaatattgagtttctgcagttagatgtgtgtagtatatgctataattagtgtgcaattggaacgtttttcaatcaatgtgcactctagtcaatgaaggttagtatgattttttctctatcatactaatctcttctaaacttattagaaatctactctctccgtccaaaaataaa

SEQ ID NO: 31965 - DNA, 1672 bp, Zea Mays
aggtggccttaccacaaagaactttcacgttcagttttgaacaaaaaaaagtacagaatgaaatttcgagctataatactttggttctcctttacattttccatatcaaaatttcttcgtggtcaacacaaacctcctgatagtgtttacaattattttctgctcttctttccatacactgaccccagaaacaatcacttggatcaacataaaacaatctcatcagagcaatattctgtaaatcactcggtcctgactaaaatttggaatagagtgacatagaccagctcaccatctcatctatttaatctgaagagagaagtaacattcaaatgcatcataattcataggccaaatatcctgcaataacatgcaaatacagttttggaggtcagtgctgtgatcctattagacaataataaactacatcagataacgaatgcaggtgtctgaagtaatttcagagctacagattcatgtgcatctgtcatgcgattggaatcatgaatccaaactagaatcatcagattttaatctcataccatgtgattggttacctgtaccgtcttgttctgcatcatcacatgggttgaccatgtttaagcacttgtttggttgactgcacacgagggacataatctacatgaacagatgcaaaacaagctatttggagaccatttggctgcatccattcacatgtcagaaacaaccgtatccatccggccagcctcacgcgggcatgactggcggatacaaatctaatttacaggcattgatcaaacaccttggaacttggaagcatggccatgctggcaggatggtagtctagtggacacaatactgaagatatccatggttggactctagatctccccgttgtgctgctcagccgctggtaggcaccgctcacttcctacaggagcatctatttcgtaagaaacagaaacaaggatatgtggttagagcgagcagtgttgtgaaatgctgaatagacagtgcccttcctctgtgcagaagcaacatataagcgtcttggatttgggtcagagaagatgaaacaaacataggagtctgaaaaaacaatgtcaatgatttttttttctcaaacacgcgagagtctaacacaagacaaaacacagaccagacacacgctcacgcacaaaacacacacccaaaacccactcacagacacacactaaactaaagcaacataaagaaatgtcaatgattttaatgtcaacagtgaaaatgacttatggaacattataaggtttccccgttgatgtcaagcatgatgaaggtggagataagcgtgtttggggaaaaaaagctgtagatacaacaatcaaggattgaatcaaacaatatagatgctaaatataaaaaaatctactagaccttgttcggttattccttttcatatagattagtgtgtattgaaattgattgagatgaatattgacttactataaatttaaacggattcaataccacgcaatccatatcccataagggtgacgtggacaagttacaaggctgccgagggccgctggtctcccgagaaatagaagtgtcaccatgtattcctcccactaccatacacatccaaattgtcatcaccatcgtcgcggattgaactcagcagtgctcgtagctcgcgagcactcacgat

SEQ ID NO: 31966 - DNA, 1568 bp, Zea Mays
cttggttccaataagctctgactaggcacagaccagcacacggccacagtaccacacagaacagtagcaccgggctccgggcaccagggcaggcgaattcctaggttcgctggagcctggtccgagggatggccgccgcctcgctcgcgttggcgagtcctctccggcttctcctccgcgtccgtcacccgcgcggagccatcgccgtcccgtgctacttcatctcgcgagcgagggatttggcggtgaaaggaagcgtggacaggaattcagcggaggaagtcaggaacattctgaatatggcagaaagggcttcccaacgaagaaatgtttttcacaccaattttcttactccacctatagtgaaagaggctatgctggcacttgaaaagtttgcagataccaaagcagtagctcagggtggctaccctcaggctgagaggtgccgaatatctgttggacacccggacgtcatgacaagtaacccagatgtggttgctgctttgaggaataacaagggagaaagttggagatattcttttgcagggggaacgaggtgcccaggtccttgttgacccagaacttgttgactatctgatttctacccttgaaaaggtggggaaagttggtgtttcatgcactcagattcctttgcttgctctagaatatgaaccaccaaggaccaattcatttaaaactgtagaatcatcgctcagggttgatgcccttgccagtgcaggatttaaaatctcacgcacgaagcttgctagcttgataagttctggtgatgttcgtgtgaattggacaccaacaacaaaaaatggagttaccctcaaatctggagatgttgtttctgttagtgggatgggaaggttaaagattggggaaattgtgactacgaggaaaggaaaatatgcggttgagttgattcgctatttgtaatcatggaactggtctactttcatgtctgaaactctgaatttaacggttgaagcaaaagtcccgtggctcctgtgtttttttgggtcaaattattagctactatctcacgaaaaacatactcagaatccttgtacactgaagtattgctgtatttttagctaaatattatctatatgtcgctgtgtttggttagatgtaggaatgggagtttagaggtttgtttgtttggtggggataagagttttgactggatggggatgggagaatagggggtaaactcccaccaaatttttacgtggaaggtggatgcccccgcactgtccatcatgatttatgacgcaattttttactctcaagtctcaaaccctcacataaacaaaggtcatgaagtcattttccaactatcacttttgatgctttcacaaaccaacttccaagtgaatttcctccgccaacatctattgctactgctgaatccaatgctcttgccacttgccagaggcaccgtatgtggttgcccatgtttagagtcagagagagtaccatgggccttctggctgaaagaagctgcaaccactctcctgttcttaacaacacaatatgctattttttgtgttctcttttac

SEQ ID NO: 31967 - DNA, 1219 bp, Zea Mays
cacggccacagtaccacacagaacagtagcaccgggctccgggcaccagggcaggcgaattcctaggttcgctggagcctggtccgagggatggccgccgcctcgctcgcgttggcgagtcctctccggcttctcctccgcgtccgtcacccgcgcggagccatcgccgtcccgtgctacttcatctcgcgaggacggtatagcaccgccattgccgttgcagcagcgagggatttggcggtgaaaggaagcgtggacaggaattcagcggaggaagtcaggaacattctgaatatggcagaaagggcttcccaacgaagaaatgtttttcacaccaattttcttactccacctatagtgaaagaggctatgctggcacttgaaaagtttgcagataccaaagcagtagctcagggtggctaccctcaggctgagaggtgccgaatatctgttggacacccggacgtcatgacaagtaacccagatgtggttgctgctttgagggaatttccggttggaatcttgttctcatggtgactttcttggtgctattcttgggacaggaataacaagggagaaagttggagatattcttttgcagggggaacgaggtgcccaggtccttgttgacccagaacttgttgactatctgatttctacccttgaaaaggtggggaaagttggtgtttcatgcactcagattcctttgcttgctctagaatatgaaccaccaaggaccaattcatttaaaactgtagaatcatcgctcagggttgatgcccttgccagtgcaggatttaaaatctcacgcacgaagcttgctagcttgataagttctggtgatgttcgtgtgaattggacaccaacaacaaaaaatggagttaccctcaaatctggagatgttgtttctgttagtgggatgggaaggttaaagattggggaaattgtgactacgaggaaaggaaaatatgcggttgagttgattcgctatttgtaatcatggaactggtctactttcatgtctgaaactctgaatttaacggtcaagaatttcataaagtcgtcagtgtacattcattatttcaaataataagcaccaaagggccaggttgctttggatcttccatcgcttctgtgttatcaccaacatagtcttgtacaactctgcaatatcgaatcacttctacttctgttagtactttctgatctgaagcttaaa

SEQ ID NO: 31968 - DNA, 2092 bp, Zea Mays
cacggccacagtaccacacagaacagtagcaccgggctccgggcaccagggcaggcgaattcctaggttcgctggagcctggtccgagggatggccgccgcctcgctcgcgttggcgagtcctctccggcttctcctccgcgtccgtcacccgcgcggagccatcgccgtcccgtgctacttcatctcgcgaggacggtatagcaccgccattgccgttgcagcagcgagggatttggcggtgaaaggaagcgtggacaggaattcagcggaggaagtcaggaacattctgaatatggcagaaagggcttcccaacgaagaaatgtttttcacaccaattttcttactccacctatagtgaaagaggctatgctggcacttgaaaagtttgcagataccaaagcagtagctcagggtggctaccctcaggctgagaggtgccgaatatctgttggacacccggacgtcatgacaagtaacccagatgtggttgctgctttgaggaataacaagggagaaagttggagatattcttttgcagggggaacgaggtgcccaggtccttgttgacccagaacttgttgactatctgatttctacccttgaaaaggtggggaaagttggtgtttcatgcactcagattcctttgcttgctctagaatatgaaccaccaaggaccaattcatttaaaactgtagaatcatcgctcagggttgatgcccttgccagtgcaggatttaaaatctcacgcacgaagcttgctagcttgataagttctggtgatgttcgtgtgaattggacaccaacaacaaaaaatggagttaccctcaaatctggagatgttgtttctgttagtgggatgggaaggttaaagattggggaaattgtgactacgaggaaaggaaaatatgcggttgagttgattcgctatttgtaatcatggaactggtctactttcatgtctgaaactctgaatttaacggtacacattttctcctatatgtgatgagaatcatgtattaagtattacttctcagtgaagttgaaagtgatgcacaaatctgagtatatttgtagtattcattgactgctttagcttcgtaatgcaaatattcttataggtcaagaatttcataaagtcgtcagtgtacattcattatttcaaataataagcaccaaagggccaggttgctttggatcttccatcgcttctgtgttatcaccaacatagtcttgtacaactctgcaatatcgaatcacttctacttctgttagtactttctgatctgaagcttaaaagaaaatgagataagatacatccaacaatatctaacgagctgctacatgtgaagttgtcatgcgaaaagcaggatgtcacatgtttgtaaaggtaggttttgtgatgtatccatccttgtggaactttggatgcactatgttgacagccagcgaggagctgtttattgtttgtttgatctttgaagcccagcaattaattggccaggcacaatagctacagctaccttacagttttctttggagatgggagcacgagcagcgaaacccaacggtgcttgaaatgttttcggtgagttgaatcaatggaaaaggttaagggcgaactgcactttccggaaaagattcatgctcgtttggacacttccacgagaagtttactttgagccggtgcgaagatatactaaactagagccttgtccctgcactgtcaagtcccagtttgcttgctccagctgcttgggtacctttttgtatctctcgcagtccaactagtggaaaataacacttgttttttttaagggaaagcaaaggcttctccggatgtgccatttgtaaggcaagattaatgtgtgacaaaattgactaaaggctaaataaggttccaaaatacgtcaagtttccttggtttctacgctcgccaatacttaaaaaacacacaatcccaatgcttgcctttttcttgtcctagctttgccaataggaacctcacaatcacaatgcctccttattacccaacgaagatttgaccagttcggcgggttcgagacaattttacgtgctatgggcccatgac

SEQ ID NO: 31969 - DNA, 3062 bp, Zea Mays
cacggccacagtaccacacagaacagtagcaccgggctccgggcaccagggcaggcgaattcctaggttcgctggagcctggtccgagggatggccgccgcctcgctcgcgttggcgagtcctctccggcttctcctccgcgtccgtcacccgcgcggagccatcgccgtcccgtgctacttcatctcgcgaggacggtatagcaccgccattgccgttgcagcagcgagggatttggcggtgaaaggaagcgtggacaggaattcagcggaggaagtcaggaacattctgaatatggcagaaagggcttcccaacgaagaaatgtttttcacaccaattttcttactccacctatagtgaaagaggctatgctggcacttgaaaagtttgcagataccaaagcagtagctcagggtggctaccctcaggctgagaggtgccgaatatctgttggacacccggacgtcatgacaagtaacccagatgtggttgctgctttgaggaataacaagggagaaagttggagatattcttttgcagggggaacgaggtgcccaggtccttgttgacccagaacttgttgactatctgatttctacccttgaaaaggtggggaaagttggtgtttcatgcactcagattcctttgcttgctctagaatatgaaccaccaaggaccaattcatttaaaactgtagaatcatcgctcagggttgatgcccttgccagtgcaggatttaaaatctcacgcacgaagcttgctagcttgataagttctggtgatgttcgtgtgaattggacaccaacaacaaaaaatggagttaccctcaaatctggagatgttgtttctgttagtgggatgggaaggttaaagattggggaaattgtgactacgaggaaaggaaaatatgcggttgagttgattcgctatttgtaatcatggaactggtctactttcatgtctgaaactctgaatttaacggtacacattttctcctatatgtgatgagaatcatgtattaagtattacttctcagtgaagttgaaagtgatgcacaaatctgagtatatttgtagtattcattgactgctttagcttcgtaatgcaaatattcttataggtcaagaatttcataaagtcgtcagtgtacattcattatttcaaataataagcaccaaagggccaggttgctttggatcttccatcgcttctgtgttatcaccaacatagtcttgtacaactctgcaatatcgaatcacttctacttctgttagtactttctgatctgaagcttaaaagaaaatgagataaggtataagtcttcacaactgaaaagagaactcttttttcttctgatccagcttgtgtcttgtcatagtaaatagcataccctttttcttgtttgaaatctcactaggctgcctgcatcataagttcataacacgtgaaatgattatgacgagatgacagaaacctttcgcaaatgggaaagtcgacagctaccagtcatagatccatacgcctttcaatgctaataggcttgacagagaactattgctttttacttattctgtggttcttgattgcaaaatcatcacgaagttcaatatccaaagctgcaaattgtgcaaggtcgtagtattgcttcatttgacttgtctcaaggttactcacgcggagcttgttttcttgggaacaggttgaagcaaaagtcccgtggctcctgtgtttttttgggtcaaattattagctactatctcacgaaaaacatactcagaatccttgtacactgaagtattgctgtatttttagctaaatattatctatatgtcgctgtgtttggttagatgtaggaatgggagtttagaggtttgtttgtttggtggggataagagttttgactggatggggatgggagaatagggggtaaactcccaccaaatttttacgtggaaggtggatgcccccgcactgtccatcatgatttatgacgcaattttttactctcaagtctcaaaccctcacataaacaaaggtcatgaagtcattttccaactatcacttttgatgctttcacaaaccaacttccaagtgaatttcctccgccaacatctattgctactgctgaatccaatgctcttgccacttgccagaggcaccgtatgtggttgcccatgtttagagtcagagagagtaccatgggccttctggctgaaagaagctgcaaccactctcctgttcttaacaacacaatatgctattttttgtgttctcttttacagatacatccaacaatatctaacgagctgctacatgtgaagttgtcatgcgaaaagcaggatgtcacatgtttgtaaaggtaggttttgtgatgtatccatccttgtggaactttggatgcactatgttgacagccagcgaggagctgtttattgtttgtttgatctttgaagcccagcaattaattggccaggcacaatagctacagctaccttacagttttctttggagatgggagcacgagcagcgaaacccaacggtgcttgaaatgttttcggtgagttgaatcaatggaaaaggttaagggcgaactgcactttccggaaaagattcatgctcgtttggacacttccacgagaagtttactttgagccggtgcgaagatatactaaactagagccttgtccctgcactgtcaagtcccagtttgcttgctccagctgcttgggtacctttttgtatctctcgcagtccaactagtggaaaataacacttgttttttttaagggaaagcaaaggcttctccggatgtgccatttgtaaggcaagattaatgtgtgacaaaattgactaaaggctaaataaggttccaaaatacgtcaagtttccttggtttctacgctcgccaatacttaaaaaacacacaatcccaatgcttgcctttttcttgtcctagctttgccaataggaacctcacaatcacaatgcctccttattacccaacgaagatttgaccagttcggcgggttcgagacaattttacgtgctatgggcccatgac

SEQ ID NO: 31970 - DNA, 2243 bp, Zea Mays
cacggccacagtaccacacagaacagtagcaccgggctccgggcaccagggcaggcgaattcctaggttcgctggagcctggtccgagggatggccgccgcctcgctcgcgttggcgagtcctctccggcttctcctccgcgtccgtcacccgcgcggagccatcgccgtcccgtgctacttcatctcgcgaggacggtatagcaccgccattgccgttgcagcagcgagggatttggcggtgaaaggaagcgtggacaggaattcagcggaggaagtcaggaacattctgaatatggcagaaagggcttcccaacgaagaaatgtttttcacaccaattttcttactccacctatagtgaaagaggctatgctggcacttgaaaagtttgcagataccaaagcagtagctcagggtggctaccctcaggctgagaggtgccgaatatctgttggacacccggacgtcatgacaagtaacccagatgtggttgctgctttgagcatctcagggaatttccggttggaatcttgttctcatggtgactttcttggtgctattcttgggacaggaataacaagggagaaagttggagatattcttttgcagggggaacgaggtgcccaggtccttgttgacccagaacttgttgactatctgatttctacccttgaaaaggtggggaaagttggtgtttcatgcactcagattcctttgcttgctctagaatatgaaccaccaaggaccaattcatttaaaactgtagaatcatcgctcagggttgatgcccttgccagtgcaggatttaaaatctcacgcacgaagcttgctagcttgataagttctggtgatgttcgtgtgaattggacaccaacaacaaaaaatggagttaccctcaaatctggagatgttgtttctgttagtgggatgggaaggttaaagattggggaaattgtgactacgaggaaaggaaaatatgcggttgagttgattcgctatttgtaatcatggaactggtctactttcatgtctgaaactctgaatttaacgtcaaaactgcctattcatcccctctagtcggcgtcctagatcctacaagcggtatcaaatcttaggattccattatttgtggatttaaccatcccagagttggactcaatgggtagtggaaacaacatgcatgttgggaaaccaccacatttcgatgggaataactatgattattggaaaataagaatgacagtgcatttgagagcaatgggaggaagcatttgtagaattgtgggagatggatttgtggtgctcaagcaagatgaaccaaccgtaaatgatgagcaaaatattcttgtcaatgatcaagcaatgaatgtgctctatgatgctttagatatcaatgagttcaatagaatcaaaactctcacaacaactcatgagatttggactaagttgatggaaattcatgaggggacaactattaaaaagagtgctaagctctatgtctacaaatgaaagtttgggcaattcatcatgaaggaggatgagagcatacccgacaggttcaactggttgaatgaaattgtgaatgaactcaagggtcttgatttggatgtgcctgatgtggacttctcccataagttgattaggtcacttccgaaaaagtatgacaaaattgtcacaatgttagtgataagtgatttgaacaatacatcaccaaccgaggttttgggagaaattctcacccaatacatcttcaagaaatctcaaggcgatgcaataactttggcaaagaaagtgaagggcgaatcaatagcactcaaagctaaagcatccaaagttattgaaaagaaagaatgtgatgatgaagaaagtggaagttagagtgatgaagaaattgctctctttgtgaaaagattcaacaagttcatgtagaagaagacaggttaaccaaggagaggtcaatcttcaagaaagaatgcttttaatgatagaaagtgctttgagtgtggggaacctactcacattgccacaaatttcccaagcaagaaaaagaagaacaaagatggagaagataagaagaataagaaattttacaagaagaaggatgtcaaagtctatcttgttggatgggattcagatgctagctcggatgacgatgatgatacttcatccaaggtcaacgccaacattaccatcaaggagtcgccttcgctcttctcatctccacattgtcttatggaaaaggg

SEQ ID NO: 31971 - DNA, 1521 bp, Zea Mays
tcatctcgcgagcgagggatttggcggtgaaaggaagcgtggacaggaattcagcggaggaagtcaggaacattctgaatatggcagaaagggcttcccaacgaagaaatgtttttcacaccaattttcttactccacctatagtgaaagaggctatgctggcacttgaaaagtttgcagataccaaagcagtagctcagggtggctaccctcaggctgagaggtgccgaatatctgttggacacccggacgtcatgacaagtaacccagatgtggttgctgctttgagcatctcagggaatttccggttggaatcttgttctcatggtgactttcttggtgctattcttgggacaggaataacaagggagaaagttggagatattcttttgcagggggaacgaggtgcccaggtccttgttgacccagaacttgttgactatctgatttctacccttgaaaaggtggggaaagttggtgtttcatgcactcagattcctttgcttgctctagaatatgaaccaccaaggaccaattcatttaaaactgtagaatcatcgctcagggttgatgcccttgccagtgcaggatttaaaatctcacgcacgaagcttgctagcttgataagttctggtgatgttcgtgtgaattggacaccaacaacaaaaaatggagttaccctcaaatctggagatgttgtttctgttagtgggatgggaaggttaaagattggggaaattgtgactacgaggaaaggaaaatatgcggttgagttgattcgctatttgtaatcatggaactggtctactttcatgtctgaaactctgaatttaacgatacatccaacaatatctaacgagctgctacatgtgaagttgtcatgcgaaaagcaggatgtcacatgtttgtaaagcccagcaattaattggccaggcacaatagctacagctaccttacagttttctttggagatgggagcacgagcagcgaaacccaacggtgcttgaaatgttttcggtgagttgaatcaatggaaaaggttaagggcgaactgcactttccggaaaagattcatgctcgtttggacacttccacgagaagtttactttgagccggtgcgaagatatactaaactagagccttgtccctgcactgtcaagtcccagtttgcttgctccagctgcttgggtacctttttgtatctctcgcagtccaactagtggaaaataacacttgttttttttaagggaaagcaaaggcttctccggatgtgccatttgtaaggcaagattaatgtgtgacaaaattgactaaaggctaaataaggttccaaaatacgtcaagtttccttggtttctacgctcgccaatacttaaaaaacacacaatcccaatgcttgcctttttcttgtcctagctttgccaataggaacctcacaatcacaatgcctccttattacccaacgaagatttgaccagttcggcgggttcgagacaattttacgtgctatgggcccatgac

SEQ ID NO: 31972 - DNA, 1355 bp, Zea Mays
ctattatctcgcctaatccaggcagaaagggcttcccaacgaagaaatgtttttcacaccaattttcttactccacctatagtgaaagaggctatgctggcacttgaaaagtttgcagataccaaagcagtagctcagggtggctaccctcaggctgagaggtgccgaatatctgttggacacccggacgtcatgacaagtaacccagatgtggttgctgctttgagcatctcagggaatttccggttggaatcttgttctcatggtgactttcttggtgctattcttgggacaggaataacaagggagaaagttggagatattcttttgcagggggaacgaggtgcccaggtccttgttgacccagaacttgttgactatctgatttctacccttgaaaaggtggggaaagttggtgtttcatgcactcagattcctttgcttgctctagaatatgaaccaccaaggaccaattcatttaaaactgtagaatcatcgctcagggttgatgcccttgccagtgcaggatttaaaatctcacgcacgaagcttgctagcttgataagttctggtgatgttcgtgtgaattggacaccaacaacaaaaaatggagttaccctcaaatctggagatgttgtttctgttagtgggatgggaaggttaaagattggggaaattgtgactacgaggaaaggaaaatatgcggttgagttgattcgctatttgtaatcatggaactggtctactttcatgtctgaaactctgaatttaacggttgaagcaaaagtcccgtggctcctgtgtttttttgggtcaaattattagctactatctcacgaaaaacatactcagaatccttgtacactgaagtattgctgtatttttagctaaatattatctatatgtcgctgtgtttggttagatgtaggaatgggagtttagaggtttgtttgtttggtggggataagagttttgactggatggggatgggagaatagggggtaaactcccaccaaatttttacgtggaaggtggatgcccccgcactgtccatcatgatttatgacgcaattttttactctcaagtctcaaaccctcacataaacaaaggtcatgaagtcattttccaactatcacttttgatgctttcacaaaccaacttccaagtgaatttcctccgccaacatctattgctactgctgaatccaatgctcttgccacttgccagaggcaccgtatgtggttgcccatgtttagagtcagagagagtaccatgggccttctggctgaaagaagctgcaaccactctcctgttcttaacaacacaatatgctattttttgtgttctcttttac

SEQ ID NO: 31973 - DNA, 2893 bp, Zea Mays
aaagaaaagccagtcaaacccaaccacctcagctcagcatcgaggtcgccttcccctcctccagttgtccccagaaaccgtgtcccctactctctctctctctctctatctctcttctcccctcgatcaacagcaacagcggcggtcagaagcttccgtcgcgacagctcccgacctcctgccggtcttcccctctcctagtcggcgcgaatcccgaggcggaggaggaagaggggagcggagtgggggtgggccccatcagccatgagtctcacggggtccgccctggaggcggcgctacaggcggtggggcgcggcctcgacgcagctggagaccaccggctgctctactgcaagggaggtggaaggctcgtcgcgctcgaggaggaccgtgcgcgggacctcccgctccccgacggcggcgtcctcccgagcgtgccccccgatgtcgaggtcgagcagtgccgcagagaccccgagcgcatccgccccttcccctctggcccaagctctgccgcagcggatgggccctttgtctgcagcttcgataagatggctgagtatttcaacaggaagtcatgcttgtccgagacagtaccgctgggttccttcaactctctgttcagcttcaccggttcatggaagaatgatgctgcggctacgaaggcccttgcgattgatggctattctctgcctctgtttcgagtgaaaattaggagttctgaactgacgctgcttgagagcgttaagcacgcgatcccaaatgtttgggatccatcagcattggctaggtcagtagctttattgagaattacggtacccatattattatttctgttacggttggtggtaaggacgaagtatacattaagcagcattcatcgtcccaattgtcagggttagagttcaaaaattatgtgagggaaattgggagggaaagattctcagatgtggaaaacaagtcaaatgcaactcctatcaattacagcgagaaggatattacagtaatattcagaaggaggggtggttgtgatcttgttcaaagttttagtgattggaaaggaactgttgcctcagcaccagatgtcataggcatgacctttctttcaattgtctctcttgttgacgatgtaccaggaaagaagcaccttgctcgtgcagttgagctatacttgacctacaaacctccaattgaagaattacagtatttcttagattttcaagtcccactagtttgggctccagctccaccaggtattgctagtcaccataggaaggaacctgtctgcccatcgcttcagtttagcttaatgggcccaaagctcttcattagcacagaacaggtaaaggttaccccttaaatctgaacatatgagtacagtgattactttttggagttttacgctagaaatgttattttaattgttgtcaggaaatgctatagctaagtatgaaacacaattaccatcataaacaattttctactaggttgggcctctagctgagttggttaggtggtagcacttaagttctgagttcgattccccatgggagtcagactgctgttaaaaaggtcctctcgtttgtcccaaaataaagcacaggtaaaagaaccgactcttacataggctacggcgccgttgtgtatgggtgagatatgtgttcggatgttttctagaattgcaagagaaggtcttcttaatgcaatacctgggatcccagatgttgtcttaccctcgcaagccaagtttttttttaaaaaaaaatataattctaaagatcaaggcatgcagaagaacaaaaatgtgtaaattgcaccaggggtacaaattttgtacctatagtgcattttactgataaaaagatacacttttaagacaatcaattttttgtgaacatgctaactctgaagaagacatgtgcagatctctgttgggcgccgaccagttgttggcctcaaactgctcttggaaggagctaaacagaatcgtttggctattcacttgcagcaccttgtctcattaccaaaaatattcctacctcattgggactctcatattaccattggacctccaaaatggcaaggccctgaagaacaagacagccgatggttcgagccaatcaagtggaagaactttgctcatgttagcacagcacccatagagtacactgaaacaaatattacggacctatctggtgtttatattgttacaggtgcacagttgggagtgtgggattttggtgcaaagagtgttctccacctcaaacttttgttctccagggttcctgggtgcacaattagaagatcagtgtgggaccacagcccatcaagttcttcaattcataaagcagatgaatcttcatcgtcctcgagtgataatgctaaacttctgaagattattgacatgacagaaacattgaagggcccacaagatgcacctggccactggctgatcacaggtgctaagttgggtgtcgagaaaggcaggattgtagtgcgtgcgaagtactccttattgaattattaaccaaatgtttaaagcattcattcactcactctgatattgagcactgtgttttaaggtagcatttgttcttttgtttttcatgtatgactttccttcccccttgtaacttgatgtggatccatgcttcttgttgatgcggtgagtgaagtagcatgaagatgtttatgctcagctcaaaagtgtttgatctggtctcggtcatcgcttccagagccatctggttttgacagtgaaaatggtgcgttcctaagttttggcactggtgttttgcactcggaaattcatcagtggaacataattagtatattcgctctggttactaagcgctaagagtttcagtaagtttttttgacattggattcatg

SEQ ID NO: 31974 - DNA, 2380 bp, Zea Mays
aaagaaaagccagtcaaacccaaccacctcagctcagcatcgaggtcgccttcccctcctccagttgtccccagaaaccgtgtcccctactctctctctctctctctatctctcttctcccctcgatcaacagcaacagcggcggtcagaagcttccgtcgcgacagctcccgacctcctgccggtcttcccctctcctagtcggcgcgaatcccgaggcggaggaggaagaggggagcggagtgggggtgggccccatcagccatgagtctcacggggtccgccctggaggcggcgctacaggcggtggggcgcggcctcgacgcagctggagaccaccggctgctctactgcaagggaggtggaaggctcgtcgcgctcgaggaggaccgtgcgcgggacctcccgctccccgacggcggcgtcctcccgagcgtgccccccgatgtcgaggtcgagcagtgccgcagagaccccgagcgcatccgccccttcccctctggcccaagctctgccgcagcggatgggccctttgtctgcagcttcgataagatggctgagtatttcaacaggaagtcatgcttgtccgagacagtaccgctgggttccttcaactctctgttcagcttcaccggttcatggaagaatgatgctgcggctacgaaggcccttgcgattgatggctattctctgcctctgtttcgagtgaaaattaggagttctgaactgacgctgcttgagagcgttaagcacgcgatcccaaatgtttgggatccatcagcattggctagctttattgagaattacggtacccatattattatttctgttacggttggtggtaaggacgaagtatacattaagcagcattcatcgtcccaattgtcagggttagagttcaaaaattatgtgagggaaattgggagggaaagattctcagatgtggaaaacaagtcaaatgcaactcctatcaattacagcgagaaggatattacagtaatattcagaaggaggggtggttgtgatcttgttcaaagttttagtgattggaaaggaactgttgcctcagcaccagatgtcataggcatgacctttctttcaattgtctctcttgttgacgatgtaccaggaaagaagcaccttgctcgtgcagttgagctatacttgacctgtaagatctgctttcggttactttcatttgtcctatgcagttatgcaactcaagaactcattcaccacattgaatatagtatatttataatgccctgaggaagctaacttacgatgtgatttctcttcaattatactgttttgataagttctgttttacagacaaacctccaattgaagaattacagtatttcttagattttcaagtcccactagtttgggctccagctccaccaggtattgctagtcaccataggaaggaacctgtctgcccatcgcttcagtttagcttaatgggcccaaagctcttcattagcacagaacagcaccttgtctcattaccaaaaatattcctacctcattgggactctcatattaccattggacctccaaaatggcaaggccctgaagaacaagacagccgatggttcgagccaatcaagtggaagaactttgctcatgttagcacagcacccatagagtacactgaaacaaatattacggacctatctggtgtttatattgttacaggtgcacagttgggagtgtgggattttggtgcaaagagtgttctccacctcaaacttttgttctccagggttcctgggtgcacaattagaagatcagtgtgggaccacagcccatcaagttcttcaattcataaagcagatgaatcttcatcgtcctcgagtgataatgctaaacttctgaagattattgacatgacagaaacattgaagggcccacaagatgcacctggccactggctgatcacaggtgctaagttgggtgtcgagaaaggcaggattgtagtgcgtgcgaagtactccttattgaattattaaccaaatgtttaaagcattcattcactcactctgatattgagcactgtgttttaaggtagcatttgttcttttgtttttcatgtatgactttccttcccccttgtaacttgatgtggatccatgcttcttgttgatgcggtgagtgaagtagcatgaagatgtttatgctcagctcaaaagtgtttgatctggtctcggtcatcgcttccagagccatctggttttgacagtgaaaatggtgcgttcctaagttttggcactggtgttttgcactcggaaattcatcagtggaacataattagtatattcgctctggttactaagcgctaagagtttcagtaagtttttttgacattggattcatg

SEQ ID NO: 31975 - DNA, 2885 bp, Zea Mays
aaagaaaagccagtcaaacccaaccacctcagctcagcatcgaggtcgccttcccctcctccagttgtccccagaaaccgtgtcccctactctctctctctctctctatctctcttctcccctcgatcaacagcaacagcggcggtcagaagcttccgtcgcgacagctcccgacctcctgccggtcttcccctctcctagtcggcgcgaatcccgaggcggaggaggaagaggggagcggagtgggggtgggccccatcagccatgagtctcacggggtccgccctggaggcggcgctacaggcggtggggcgcggcctcgacgcagctggagaccaccggctgctctactgcaagggaggtggaaggctcgtcgcgctcgaggaggaccgtgcgcgggacctcccgctccccgacggcggcgtcctcccgagcgtgccccccgatgtcgaggtcgagcagtgccgcagagaccccgagcgcatccgccccttcccctctggcccaagctctgccgcagcggatgggccctttgtctgcagcttcgataagatggctgagtatttcaacaggaagtcatgcttgtccgagacagtaccgctgggttccttcaactctctgttcagcttcaccggttcatggaagaatgatgctgcggctacgaaggcccttgcgattgatggctattctctgcctctgtttcgagtgaaaattaggagttctgaactgacgctgcttgagagcgttaagcacgcgatcccaaatgtttgggatccatcagcattggctagctttattgagaattacggtacccatattattatttctgttacggttggtggtaaggacgaagtatacattaagcagcattcatcgtcccaattgtcagggttagagttcaaaaattatgtgagggaaattgggagggaaagattctcagatgtggaaaacaagtcaaatgcaactcctatcaattacagcgagaaggatattacagtaatattcagaaggaggggtggttgtgatcttgttcaaagttttagtgattggaaaggaactgttgcctcagcaccagatgtcataggcatgacctttctttcaattgtctctcttgttgacgatgtaccaggaaagaagcaccttgctcgtgcagttgagctatacttgacctacaaacctccaattgaagaattacagtatttcttagattttcaagtcccactagtttgggctccagctccaccaggtattgctagtcaccataggaaggaacctgtctgcccatcgcttcagtttagcttaatgggcccaaagctcttcattagcacagaacaggtaaaggttaccccttaaatctgaacatatgagtacagtgattactttttggagttttacgctagaaatgttattttaattgttgtcaggaaatgctatagctaagtatgaaacacaattaccatcataaacaattttctactaggttgggcctctagctgagttggttaggtggtagcacttaagttctgagttcgattccccatgggagtcagactgctgttaaaaaggtcctctcgtttgtcccaaaataaagcacaggtaaaagaaccgactcttacataggctacggcgccgttgtgtatgggtgagatatgtgttcggatgttttctagaattgcaagagaaggtcttcttaatgcaatacctgggatcccagatgttgtcttaccctcgcaagccaagtttttttttaaaaaaaaatataattctaaagatcaaggcatgcagaagaacaaaaatgtgtaaattgcaccaggggtacaaattttgtacctatagtgcattttactgataaaaagatacacttttaagacaatcaattttttgtgaacatgctaactctgaagaagacatgtgcagatctctgttgggcgccgaccagttgttggcctcaaactgctcttggaaggagctaaacagaatcgtttggctattcacttgcagcaccttgtctcattaccaaaaatattcctacctcattgggactctcatattaccattggacctccaaaatggcaaggccctgaagaacaagacagccgatggttcgagccaatcaagtggaagaactttgctcatgttagcacagcacccatagagtacactgaaacaaatattacggacctatctggtgtttatattgttacaggtgcacagttgggagtgtgggattttggtgcaaagagtgttctccacctcaaacttttgttctccagggttcctgggtgcacaattagaagatcagtgtgggaccacagcccatcaagttcttcaattcataaagcagatgaatcttcatcgtcctcgagtgataatgctaaacttctgaagattattgacatgacagaaacattgaagggcccacaagatgcacctggccactggctgatcacaggtgctaagttgggtgtcgagaaaggcaggattgtagtgcgtgcgaagtactccttattgaattattaaccaaatgtttaaagcattcattcactcactctgatattgagcactgtgttttaaggtagcatttgttcttttgtttttcatgtatgactttccttcccccttgtaacttgatgtggatccatgcttcttgttgatgcggtgagtgaagtagcatgaagatgtttatgctcagctcaaaagtgtttgatctggtctcggtcatcgcttccagagccatctggttttgacagtgaaaatggtgcgttcctaagttttggcactggtgttttgcactcggaaattcatcagtggaacataattagtatattcgctctggttactaagcgctaagagtttcagtaagtttttttgacattggattcatg

SEQ ID NO: 31976 - DNA, 2205 bp, Zea Mays
aaagaaaagccagtcaaacccaaccacctcagctcagcatcgaggtcgccttcccctcctccagttgtccccagaaaccgtgtcccctactctctctctctctctctatctctcttctcccctcgatcaacagcaacagcggcggtcagaagcttccgtcgcgacagctcccgacctcctgccggtcttcccctctcctagtcggcgcgaatcccgaggcggaggaggaagaggggagcggagtgggggtgggccccatcagccatgagtctcacggggtccgccctggaggcggcgctacaggcggtggggcgcggcctcgacgcagctggagaccaccggctgctctactgcaagggaggtggaaggctcgtcgcgctcgaggaggaccgtgcgcgggacctcccgctccccgacggcggcgtcctcccgagcgtgccccccgatgtcgaggtcgagcagtgccgcagagaccccgagcgcatccgccccttcccctctggcccaagctctgccgcagcggatgggccctttgtctgcagcttcgataagatggctgagtatttcaacaggaagtcatgcttgtccgagacagtaccgctgggttccttcaactctctgttcagcttcaccggttcatggaagaatgatgctgcggctacgaaggcccttgcgattgatggctattctctgcctctgtttcgagtgaaaattaggagttctgaactgacgctgcttgagagcgttaagcacgcgatcccaaatgtttgggatccatcagcattggctagggttagagttcaaaaattatgtgagggaaattgggagggaaagattctcagatgtggaaaacaagtcaaatgcaactcctatcaattacagcgagaaggatattacagtaatattcagaaggaggggtggttgtgatcttgttcaaagttttagtgattggaaaggaactgttgcctcagcaccagatgtcataggcatgacctttctttcaattgtctctcttgttgacgatgtaccaggaaagaagcaccttgctcgtgcagttgagctatacttgacctacaaacctccaattgaagaattacagtatttcttagattttcaagtcccactagtttgggctccagctccaccaggtattgctagtcaccataggaaggaacctgtctgcccatcgcttcagtttagcttaatgggcccaaagctcttcattagcacagaacagatctctgttgggcgccgaccagttgttggcctcaaactgctcttggaaggagctaaacagaatcgtttggctattcacttgcagcaccttgtctcattaccaaaaatattcctacctcattgggactctcatattaccattggacctccaaaatggcaaggccctgaagaacaagacagccgatggttcgagccaatcaagtggaagaactttgctcatgttagcacagcacccatagagtacactgaaacaaatattacggacctatctggtgtttatattgttacaggtgcacagttgggagtgtgggattttggtgcaaagagtgttctccacctcaaacttttgttctccagggttcctgggtgcacaattagaagatcagtgtgggaccacagcccatcaagttcttcaattcataaagcagatgaatcttcatcgtcctcgagtgataatgctaaacttctgaagattattgacatgacagaaacattgaagggcccacaagatgcacctggccactggctgatcacaggtgctaagttgggtgtcgagaaaggcaggattgtagtgcgtgcgaagtactccttattgaattattaaccaaatgtttaaagcattcattcactcactctgatattgagcactgtgttttaaggtagcatttgttcttttgtttttcatgtatgactttccttcccccttgtaacttgatgtggatccatgcttcttgttgatgcggtgagtgaagtagcatgaagatgtttatgctcagctcaaaagtgtttgatctggtctcggtcatcgcttccagagccatctggttttgacagtgaaaatggtgcgttcctaagttttggcactggtgttttgcactcggaaattcatcagtggaacataattagtatattcgctctggttactaagcgctaagagtttcagtaagtttttttgacattggattcatg

SEQ ID NO: 31977 - DNA, 4774 bp, Zea Mays
aattgcagttctagtttaacacctgcgaggctaaagtctgttctcaccgatccacttcatccaatacacacgcatccataacacatgcgtactgccgatttgaacatcatgaactgaaaaacaaataaacgcgtgccattcacgagttcggacggagacgcctgctggatcgtttggttttattacacatgcgccactgtaaaacaccggttggtcacggctcacggaaacggcgcgtgacgcttcatctcgtgcggcacgacgtccaccgcgaagcccttgcggtggcggagccagtagtcggcctggcccgggtgctcctcggcgggcgcctcgacgtcggccctagcggcgcggagctcctccgtggagaggccgtacctgtcgtctcgcttccggaccaggtcggggcgcacggctgcggcggggtcggcctgcggggacaccatgagcgcgggggcgcccagcggcaggcggtcgccgcggtccacctgccaggtgcaccagaacttgccgaacgtggcggccatgtggtccagctccgccttctccagcagccccgccacgtgcgggctcgtccacaggcctgacttgatctcgtgcgcgtgcgagtgccacagccgctgctcctccgccggcagcgagtcgaagatcttcctcgacacgatgtactccacgcctgcatgcagttaaaagaaaagatccatgtagatgcagtgtccttcttgggcgtgagcacatgccaaagaatcaattgaagatgacagtaagatggggtgcacggtgcacgcaccgatgagacgcgcgtcggctttgtcggagtcatagacggcgcactggaggaagtcctggttgaggcgggagacgtagtggtgcgtctccacctgccgcttcgggtcgtgcgcgtacagcgcgaacgtgcacatgtgctgcttcgcctgcttcacggggcgcaacgactgcatcgccgccgcgcccatgtccagcaccttggacgctaccgtggtcggctgcccgggcggcgcggtgctgctgccgccgccgccgcccacagaggccggggttggcagtggtttcccgtcgctggacgccatcgtcgggtcggctagaccgaacaaaaattcagccttgtgttacggcatcagatgagtggcgcagtgcgctgcgctacggcgcgttctttaaaacacggcaccggagacgtcgggaatggctgcgcgtgacacgtatggagctcgcggtctcgacgtggcggacggcatgtgaccgaggtggcagatatgcctgaaacagctgtagcgacaaatgtcaccgactcaccgatgactgcggtgctgcgcctgtgcgggatgcttgacagtgccgaagcgtcgcagatgggccgccttggttgggctctctcttttcccaggccacgagcccacccgtccgctgaatggcaaacccaccacggccaccatctcgctcgccaccgcttccttcccgatgccgtcgtcgacgatccgaagcatctccatcaccgtctccgacgacgacggtgctgcggcggcaccgtcacggcggccgcgcgctggaagacggaaggcggtggcgcgtagcttggggcagcgggcggtgcggctggtggcgcggtggtggcccgttctcctgctcctcccggccgtcgcgctcctcctcttcgaggcgtcgcggctccgcgcctcatccccgggcccctccccaccggtctccagcctcggacggctcgacccgaccacacgtctcgtccatggcgtgcgcgagccttgcttgaagctccttagccccaaaagtttggcaaatgtggtgttcccggagggtacaagactcgattctgtggtgagcagaatcacgtacaaaactgatgacgatgactatgacacataccactccgaagcaaactctacatatttactgcaacatgcggaagcaacaaggttcgacctgtttacaggatttcagacacttgctgaaagagaagatagcttcaaggtgaatgagactgttagtgtgcactgtggtttctacagcgacaatggtggcttcaaaatttctgaggaggacaggagatacatgagagcctgtaaagttgttgtgtctacctgtgcatttggtggtggggatgatctatatcaacctattggaatggccaattcttctattggcagggtttgctatgttgctttctgggatgaagtgacactagcagctcaggaagctgaaggaaaggtaattggtgatgatagcatgataggaaggtggcggatcattgttgtcaggagcctcccttttgtagatcaacgattaaatgggaagataccaaagatgttgactcatcgccttttcacagaggcaaggtactctatatgggttgactctaaataccaattacgaagagatcctataggaatgcttgaagctcttctttggaggacaaactctacatttgctatctctgaacatggagcacggagtaacatatatgatgaggggaaagctattgttcaaaagcacaaggctacccctgaagaggtagaggtacaattgactcggtatcgtcaagatggaatgccggacacaaaaagattgcacggactgaaagctctagccgaagcctctgttattgtgagggaactcacccctgcaacgaaccatttcatgtgtgcttggtttaatgaagtggttcgcttcacatctcgtgatcagctcagttttccatacgttttgtggcggctaaacatgcatggattgagcatgtttcctgtatgcactcgcagggatcttgtgaatagtttgggtcacacaaggaaagtaaaacctcttacacagacaaattcagggtcttctactacttcgtaaccttcctcccagttcatttgctggtagccaactaaccattgatttacatatggttctaatcgtcgatactcgacatctctggttcacaattttgttgttgtatattatcatctttgcgttcttcctgcgagggaatcctggatctgaaccagaaacacgttaagctgttgcttcactgcaacgcaatcacacgatgttgccactatatatgtaaaagatatgctttctttggttagaagagaatgaacacttttctgcctcctttccgtttcctgatggaacatgtgaaaatggtgtccgttatcaattaattcggcttctgctgctgatggttgtcgcggaaactagcagcaatggaagttctgttcccgtcattttatttggactcgagaatttctctgattaccgatgtttctaattgatggaattatggaaccgccattattctgagtttgggaagagtttcaaaggaagcgtttaaatctcagatgagctgataaggtgtcgtaatgggccaaatctgcatttcgttctgagcccatgaagcccatatgttcttgttaacctttccctgttctttgtctcctatccccttatccgcttgacgctccccactgcgcctaaaaatggccgcgtcccactgaaccaaccgtctgcacatcctcctcctgttgccgctcgctcgccgtgccgcaatggctacggccgtcgcctcccatacgttgctctcctccgccttcgccccgcgccactaccaccgccgcctgacccggaccgcgtccgtggggccgcgccgggccgccccggtgggactggccgtgcggtgcgagaagagcgacaagcagaagaggcagccgctcgccgcgctcgtgccccgcgagcagcgcttcatgttcgagggagacgagctctgcggccccgacatatggaatacaacctggtatcctaaggctgcagatcatgtaactaccgagaagacatggtatgttgttgatgcaacagacaagatcctaggcaggctagcatccaccattgcagtacatatcaggggaaagaatgaacccacttacactcctagtgtagacatgggagcttttgttattgtggtcaatgcagataaggttgctgtttctggtaaaaagcggtcacaaaagctttataggaggcactccggaaggcctggagggatgaaagaagaaacttttgaccaacttcagaaaagaattccagagagaatcattgaacatgcggttcgtggcatgctccccaagggaaggctgggaagaagattatttacccacctcaaggtatacaaagggacagaacatccgcacgaggctcaaaaacctgtcccactcccgatcagggataaaagaatacaaaaaactggatagagaattcatcgactgaaaaggatgcagtggcgaattcctccccagaaggttttgccctttgtttggaatgctatcctcataaccatgcctctgatcggggaggggggggggggagtataaatcctctttgtaattttgatgtttaccaatgcatgaaattcagtcaaatttctgtcaatgagtagtcatgtaatatggtacggtttaaatcaacctaaaatctttattttccagttgaagtttgtaattttgacctcgtatggtatgaagtggcagattgtttcaatgttcggcctgccatctggatatacgaaattgatcgacagttttcataaccaattttcttgggtggcgaggtgtgatattttcttctgagtttgtagaatagacatgtgcttcctcatgtgacctatatcttttggtaaaattgttgtggatgtaactgaatgctggaatgcgtgggaataaacatggaaacataaaataaaataccacacatacag

SEQ ID NO: 31978 - DNA, 4465 bp, Zea Mays
aattgcagttctagtttaacacctgcgaggctaaagtctgttctcaccgatccacttcatccaatacacacgcatccataacacatgcgtactgccgatttgaacatcatgaactgaaaaacaaataaacgcgtgccattcacgagttcggacggagacgcctgctggatcgtttggttttattacacatgcgccactgtaaaacaccggttggtcacggctcacggaaacggcgcgtgacgcttcatctcgtgcggcacgacgtccaccgcgaagcccttgcggtggcggagccagtagtcggcctggcccgggtgctcctcggcgggcgcctcgacgtcggccctagcggcgcggagctcctccgtggagaggccgtacctgtcgtctcgcttccggaccaggtcggggcgcacggctgcggcggggtcggcctgcggggacaccatgagcgcgggggcgcccagcggcaggcggtcgccgcggtccacctgccaggtgcaccagaacttgccgaacgtggcggccatgtggtccagctccgccttctccagcagccccgccacgtgcgggctcgtccacaggcctgacttgatctcgtgcgcgtgcgagtgccacagccgctgctcctccgccggcagcgagtcgaagatcttcctcgacacgatgtactccacgcctgcatgcagttaaaagaaaagatccatgtagatgcagtgtccttcttgggcgtgagcacatgccaaagaatcaattgaagatgacagtaagatggggtgcacggtgcacgcaccgatgagacgcgcgtcggctttgtcggagtcatagacggcgcactggaggaagtcctggttgaggcgggagacgtagtggtgcgtctccacctgccgcttcgggtcgtgcgcgtacagcgcgaacgtgcacatgtgctgcttcgcctgcttcacggggcgcaacgactgcatcgccgccgcgcccatgtccagcaccttggacgctaccgtggtcggctgcccgggcggcgcggtgctgctgccgccgccgccgcccacagaggccggggttggcagtggtttcccgtcgctggacgccatcgtcgggtcggctagaccgaacaaaaattcagccttgtgttacggcatcagatgagtggcgcagtgcgctgcgctacggcgcgttctttaaaacacggcaccggagacgtcgggaatggctgcgcgtgacacgtatggagctcgcggtctcgacgtggcggacggcatgtgaccgaggtggcagatatgcctgaaacagctgtagcgacaaatgtcaccgactcaccgatgactgcggtgctgcgcctgtgcgggatgcttgacagtgccgaagcgtcgcagatgggccgccttggttgggctctctcttttcccaggccacgagcccacccgtccgctgaatggcaaacccaccacggccaccatctcgctcgccaccgcttccttcccgatgccgtcgtcgacgatccgaagcatctccatcaccgtctccgacgacgacggtgctgcggcggcaccgtcacggcggccgcgcgctggaagacggaaggcggtggcgcgtagcttggggcagcgggcggtgcggctggtggcgcggtggtggcccgttctcctgctcctcccggccgtcgcgctcctcctcttcgaggcgtcgcggctccgcgcctcatccccgggcccctccccaccggtctccagcctcggacggctcgacccgaccacacgtctcgtccatggcgtgcgcgagccttgcttgaagctccttagccccaaaagtttggcaaatgtggtgttcccggagggtacaagactcgattctgtggtgagcagaatcacgtacaaaactgatgacgatgactatgacacataccactccgaagcaaactctacatatttactgcaacatgcggaagcaacaaggttcgacctgtttacaggatttcagacacttgctgaaagagaagatagcttcaaggtgaatgagactgttagtgtgcactgtggtttctacagcgacaatggtggcttcaaaatttctgaggaggacaggagatacatgagagcctgtaaagttgttgtgtctacctgtgcatttggtggtggggatgatctatatcaacctattggaatggccaattcttctattggcagggtttgctatgttgctttctgggatgaagtgacactagcagctcaggaagctgaaggaaaggtaattggtgatgatagcatgataggaaggtggcggatcattgttgtcaggagcctcccttttgtagatcaacgattaaatgggaagataccaaagatgttgactcatcgccttttcacagaggcaaggtactctatatgggttgactctaaataccaattacgaagagatcctataggaatgcttgaagctcttctttggaggacaaactctacatttgctatctctgaacatggagcacggagtaacatatatgatgaggggaaagctattgttcaaaagcacaaggctacccctgaagaggtagaggtacaattgactcggtatcgtcaagatggaatgccggacacaaaaagattgcacggactgaaagctctagccgaagcctctgttattgtgagggaactcacccctgcaacgaaccatttcatgtgtgcttggtttaatgaagtggttcgcttcacatctcgtgatcagctcagttttccatacgttttgtggcggctaaacatgcatggattgagcatgtttcctgtatgcactcgcagggatcttgtgaatagtttgggtcacacaaggaaagtaaaacctcttacacagacaaattcagggtcttctactacttcgtaaccttcctcccagttcatttgctggtagccaactaaccattgatttacatatggttctaatcgtcgatactcgacatctctggttcacaattttgttgttgtatattatcatctttgcgttcttcctgcgagggaatcctggatctgaaccagaaacacgttaagctgttgcttcactgcaacgcaatcacacgatgttgccactatatatgtaaaagatatgctttctttggttagaagagaatgaacacttttctgcctcctttccgtttcctgatggaacatgtgaaaatggtgtccgttatcaattaattcggcttctgctgctgatggttgtcgcggaaactagcagcaatggaagttctgttcccgtcattttatttggactcgagaatttctctgattaccgatgtttctaattggtacttgaacagcggaatcgtttgaaaaaaatatggtcctgtctgaagctatattttgttaatgcagctccctttgcccaatagtaatacattgaatttcttttttttagatggaattatggaaccgccattattctgagtttgggaagagtttcaaaggaagcgtttaaatctcagatgagctgataaggacatatggaatacaacctggtatcctaaggctgcagatcatgtaactaccgagaagacatggtatgttgttgatgcaacagacaagatcctaggcaggctagcatccaccattgcagtacatatcaggggaaagaatgaacccacttacactcctagtgtagacatgggagcttttgttattgtggtcaatgcagataaggttgctgtttctggtaaaaagcggtcacaaaagctttataggaggcactccggaaggcctggagggatgaaagaagaaacttttgaccaacttcagaaaagaattccagagagaatcattgaacatgcggttcgtggcatgctccccaagggaaggctgggaagaagattatttacccacctcaaggtatacaaagggacagaacatccgcacgaggctcaaaaacctgtcccactcccgatcagggataaaagaatacaaaaaactggatagagaattcatcgactgaaaaggatgcagtggcgaattcctccccagaaggttttgccctttgtttggaatgctatcctcataaccatgcctctgatcggggaggggggggggggagtataaatcctctttgtaattttgatgtttaccaatgcatgaaattcagtcaaatttctgtcaatgagtagtcatgtaatatggtacggtttaaatcaacctaaaatctttattttccagttgaagtttgtaattttgacctcgtatggtatgaagtggcagattgtttcaatgttcggcctgccatctggatatacgaaattgatcgacagttttcataaccaattttcttgggtggcgaggtgtgatattttcttctgagtttgtagaatagacatgtgcttcctcatgtgacctatatcttttggtaaaattgttgtggatgtaactgaatgctggaatgcgtgggaataaacatggaaacataaaataaaataccacacatacag

SEQ ID NO: 31979 - DNA, 3877 bp, Zea Mays
aattgcagttctagtttaacacctgcgaggctaaagtctgttctcaccgatccacttcatccaatacacacgcatccataacacatgcgtactgccgatttgaacatcatgaactgaaaaacaaataaacgcgtgccattcacgagttcggacggagacgcctgctggatcgtttggttttattacacatgcgccactgtaaaacaccggttggtcacggctcacggaaacggcgcgtgacgcttcatctcgtgcggcacgacgtccaccgcgaagcccttgcggtggcggagccagtagtcggcctggcccgggtgctcctcggcgggcgcctcgacgtcggccctagcggcgcggagctcctccgtggagaggccgtacctgtcgtctcgcttccggaccaggtcggggcgcacggctgcggcggggtcggcctgcggggacaccatgagcgcgggggcgcccagcggcaggcggtcgccgcggtccacctgccaggtgcaccagaacttgccgaacgtggcggccatgtggtccagctccgccttctccagcagccccgccacgtgcgggctcgtccacaggcctgacttgatctcgtgcgcgtgcgagtgccacagccgctgctcctccgccggcagcgagtcgaagatcttcctcgacacgatgtactccacgcctgcatgcagttaaaagaaaagatccatgtagatgcagtgtccttcttgggcgtgagcacatgccaaagaatcaattgaagatgacagtaagatggggtgcacggtgcacgcaccgatgagacgcgcgtcggctttgtcggagtcatagacggcgcactggaggaagtcctggttgaggcgggagacgtagtggtgcgtctccacctgccgcttcgggtcgtgcgcgtacagcgcgaacgtgcacatgtgctgcttcgcctgcttcacggggcgcaacgactgcatcgccgccgcgcccatgtccagcaccttggacgctaccgtggtcggctgcccgggcggcgcggtgctgctgccgccgccgccgcccacagaggccggggttggcagtggtttcccgtcgctggacgccatcgtcgggtcggctagaccgaacaaaaattcagccttgtgttacggcatcagatgagtggcgcagtgcgctgcgctacggcgcgttctttaaaacacggcaccggagacgtcgggaatggctgcgcgtgacacgtatggagctcgcggtctcgacgtggcggacggcatgtgaccgaggtggcagatatgcctgaaacagctgtagcgacaaatgtcaccgactcaccgatgactgcggtgctgcgcctgtgcgggatgcttgacagtgccgaagcgtcgcagatgggccgccttggttgggctctctcttttcccaggccacgagcccacccgtccgctgaatggcaaacccaccacggccaccatctcgctcgccaccgcttccttcccgatgccgtcgtcgacgatccgaagcatctccatcaccgtctccgacgacgacggtgctgcggcggcaccgtcacggcggccgcgcgctggaagacggaaggcggtggcgcgtagcttggggcagcgggcggtgcggctggtggcgcggtggtggcccgttctcctgctcctcccggccgtcgcgctcctcctcttcgaggcgtcgcggctccgcgcctcatccccgggcccctccccaccggtctccagcctcggacggctcgacccgaccacacgtctcgtccatggcgtgcgcgagccttgcttgaagctccttagccccaaaagtttggcaaatgtggtgttcccggagggtacaagactcgattctgtggtgagcagaatcacgtacaaaactgatgacgatgactatgacacataccactccgaagcaaactctacatatttactgcaacatgcggaagcaacaaggttcgacctgtttacaggatttcagacacttgctgaaagagaagatagcttcaaggtgaatgagactgttagtgtgcactgtggtttctacagcgacaatggtggcttcaaaatttctgaggaggacaggagatacatgagagcctgtaaagttgttgtgtctacctgtgcatttggtggtggggatgatctatatcaacctattggaatggccaattcttctattggcagggtttgctatgttgctttctgggatgaagtgacactagcagctcaggaagctgaaggaaaggtaattggtgatgatagcatgataggaaggtggcggatcattgttgtcaggagcctcccttttgtagatcaacgattaaatgggaagataccaaagatgttgactcatcgccttttcacagaggcaaggtactctatatgggttgactctaaataccaattacgaagagatcctataggaatgcttgaagctcttctttggaggacaaactctacatttgctatctctgaacatggagcacggagtaacatatatgatgaggggaaagctattgttcaaaagcacaaggctacccctgaagaggtagaggtacaattgactcggtatcgtcaagatggaatgccggacacaaaaagattgcacggactgaaagctctagccgaagcctctgttattgtgagggaactcacccctgcaacgaaccatttcatgtgtgcttggtttaatgaagtggttcgcttcacatctcgtgatcagctcagttttccatacgttttgtggcggctaaacatgcatggattgagcatgtttcctgtatgcactcgcagggatcttgtgaatagtttgggtcacacaaggaaagtaaaacctcttacacagacaaattcagggtcttctactacttcgtaaccttcctcccagttcatttgctggacatatggaatacaacctggtatcctaaggctgcagatcatgtaactaccgagaagacatggtatgttgttgatgcaacagacaagatcctaggcaggctagcatccaccattgcagtacatatcaggggaaagaatgaacccacttacactcctagtgtagacatgggagcttttgttattgtggtcaatgcagataaggttgctgtttctggtaaaaagcggtcacaaaagctttataggaggcactccggaaggcctggagggatgaaagaagaaacttttgaccaacttcagaaaagaattccagagagaatcattgaacatgcggttcgtggcatgctccccaagggaaggctgggaagaagattatttacccacctcaaggtatacaaagggacagaacatccgcacgaggctcaaaaacctgtcccactcccgatcagggataaaagaatacaaaaaactggatagagaattcatcgactgaaaaggatgcagtggcgaattcctccccagaaggttttgccctttgtttggaatgctatcctcataaccatgcctctgatcggggaggggggggggggagtataaatcctctttgtaattttgatgtttaccaatgcatgaaattcagtcaaatttctgtcaatgagtagtcatgtaatatggtacggtttaaatcaacctaaaatctttattttccagttgaagtttgtaattttgacctcgtatggtatgaagtggcagattgtttcaatgttcggcctgccatctggatatacgaaattgatcgacagttttcataaccaattttcttgggtggcgaggtgtgatattttcttctgagtttgtagaatagacatgtgcttcctcatgtgacctatatcttttggtaaaattgttgtggatgtaactgaatgctggaatgcgtgggaataaacatggaaacataaaataaaataccacacatacag

SEQ ID NO: 31980 - DNA, 2412 bp, Zea Mays
gctctctcttttcccaggccacgagcccacccgtccgctgaatggcaaacccaccacggccaccatctcgctcgccaccgcttccttcccgatgccgtcgtcgacgatccgaagcatctccatcaccgtctccgacgacgacggtgctgcggcggcaccgtcacggcggccgcgcgctggaagacggaaggcggtggcgcgtagcttggggcagcgggcggtgcggctggtggcgcggtggtggcccgttctcctgctcctcccggccgtcgcgctcctcctcttcgaggcgtcgcggctccgcgcctcatccccgggcccctccccaccggtctccagcctcggacggctcgacccgaccacacgtctcgtccatggcgtgcgcgagccttgcttgaagctccttagccccaaaagtttggcaaatgtggtgttcccggagggtacaagactcgattctgtggtgagcagaatcacgtacaaaactgatgacgatgactatgacacataccactccgaagcaaactctacatatttactgcaacatgcggaagcaacaaggttcgacctgtttacaggatttcagacacttgctgaaagagaagatagcttcaaggtgaatgagactgttagtgtgcactgtggtttctacagcgacaatggtggcttcaaaatttctgaggaggacaggagatacatgagagcctgtaaagttgttgtgtctacctgtgcatttggtggtggggatgatctatatcaacctattggaatggccaattcttctattggcagggtttgctatgttgctttctgggatgaagtgacactagcagctcaggaagctgaaggaaaggtaattggtgatgatagcatgataggaaggtggcggatcattgttgtcaggagcctcccttttgtagatcaacgattaaatgggaagataccaaagatgttgactcatcgccttttcacagaggcaaggtactctatatgggttgactctaaataccaattacgaagagatcctataggaatgcttgaagctcttctttggaggacaaactctacatttgctatctctgaacatggagcacggagtaacatatatgatgaggggaaagctattgttcaaaagcacaaggctacccctgaagaggtagaggtacaattgactcggtatcgtcaagatggaatgccggacacaaaaagattgcacggactgaaagctctagccgaagcctctgttattgtgagggaactcacccctgcaacgaaccatttcatgtgtgcttggtttaatgaagtggttcgcttcacatctcgtgatcagctcagttttccatacgttttgtggcggctaaacatgcatggattgagcatgtttcctgtatgcactcgcagggatcttgtgaatagtttgggtcacacaaggaaagacatatggaatacaacctggtatcctaaggctgcagatcatgtaactaccgagaagacatggtatgttgttgatgcaacagacaagatcctaggcaggctagcatccaccattgcagtacatatcaggggaaagaatgaacccacttacactcctagtgtagacatgggagcttttgttattgtggtcaatgcagataaggttgctgtttctggtaaaaagcggtcacaaaagctttataggaggcactccggaaggcctggagggatgaaagaagaaacttttgaccaacttcagaaaagaattccagagagaatcattgaacatgcggttcgtggcatgctccccaagggaaggctgggaagaagattatttacccacctcaaggtatacaaagggacagaacatccgcacgaggctcaaaaacctgtcccactcccgatcagggataaaagaatacaaaaaactggatagagaattcatcgactgaaaaggatgcagtggcgaattcctccccagaaggttttgccctttgtttggaatgctatcctcataaccatgcctctgatcggggaggggggggggggagtataaatcctctttgtaattttgatgtttaccaatgcatgaaattcagtcaaatttctgtcaatgagtagtcatgtaatatggtacggtttaaatcaacctaaaatctttattttccagttgaagtttgtaattttgacctcgtatggtatgaagtggcagattgtttcaatgttcggcctgccatctggatatacgaaattgatcgacagttttcataaccaattttcttgggtggcgaggtgtgatattttcttctgagtttgtagaatagacatgtgcttcctcatgtgacctatatcttttggtaaaattgttgtggatgtaactgaatgctggaatgcgtgggaataaacatggaaacataaaataaaataccacacatacag

SEQ ID NO: 31981 - DNA, 2563 bp, Zea Mays
gctctctcttttcccaggccacgagcccacccgtccgctgaatggcaaacccaccacggccaccatctcgctcgccaccgcttccttcccgatgccgtcgtcgacgatccgaagcatctccatcaccgtctccgacgacgacggtgctgcggcggcaccgtcacggcggccgcgcgctggaagacggaaggcggtggcgcgtagcttggggcagcgggcggtgcggctggtggcgcggtggtggcccgttctcctgctcctcccggccgtcgcgctcctcctcttcgaggcgtcgcggctccgcgcctcatccccgggcccctccccaccggtctccagcctcggacggctcgacccgaccacacgtctcgtccatggcgtgcgcgagccttgcttgaagctccttagccccaaaagtttggcaaatgtggtgttcccggagggtacaagactcgattctgtggtgagcagaatcacgtacaaaactgatgacgatgactatgacacataccactccgaagcaaactctacatatttactgcaacatgcggaagcaacaaggttcgacctgtttacaggatttcagacacttgctgaaagagaagatagcttcaaggtgaatgagactgttagtgtgcactgtggtttctacagcgacaatggtggcttcaaaatttctgaggaggacaggagatacatgagagcctgtaaagttgttgtgtctacctgtgcatttggtggtggggatgatctatatcaacctattggaatggccaattcttctattggcagggtttgctatgttgctttctgggatgaagtgacactagcagctcaggaagctgaaggaaaggtaattggtgatgatagcatgataggaaggtggcggatcattgttgtcaggagcctcccttttgtagatcaacgattaaatgggaagataccaaagatgttgactcatcgccttttcacagaggcaaggtactctatatgggttgactctaaataccaattacgaagagatcctataggaatgcttgaagctcttctttggaggacaaactctacatttgctatctctgaacatggagcacggagtaacatatatgatgaggggaaagctattgttcaaaagcacaaggctacccctgaagaggtagaggtacaattgactcggtatcgtcaagatggaatgccggacacaaaaagattgcacggactgaaagctctagccgaagcctctgttattgtgagggaactcacccctgcaacgaaccatttcatgtgtgcttggtttaatgaagtggttcgcttcacatctcgtgatcagctcagttttccatacgttttgtggcggctaaacatgcatggattgagcatgtttcctgtatgcactcgcagggatcttgtgaatagtttgggtcacacaaggaaagtaaaacctcttacacagacaaattcagggtcttctactacttcgtaaccttcctcccagttcatttgctgatggaattatggaaccgccattattctgagtttgggaagagtttcaaaggaagcgtttaaatctcagatgagctgataaggacatatggaatacaacctggtatcctaaggctgcagatcatgtaactaccgagaagacatggtatgttgttgatgcaacagacaagatcctaggcaggctagcatccaccattgcagtacatatcaggggaaagaatgaacccacttacactcctagtgtagacatgggagcttttgttattgtggtcaatgcagataaggttgctgtttctggtaaaaagcggtcacaaaagctttataggaggcactccggaaggcctggagggatgaaagaagaaacttttgaccaacttcagaaaagaattccagagagaatcattgaacatgcggttcgtggcatgctccccaagggaaggctgggaagaagattatttacccacctcaaggtatacaaagggacagaacatccgcacgaggctcaaaaacctgtcccactcccgatcagggataaaagaatacaaaaaactggatagagaattcatcgactgaaaaggatgcagtggcgaattcctccccagaaggttttgccctttgtttggaatgctatcctcataaccatgcctctgatcggggaggggggggggggagtataaatcctctttgtaattttgatgtttaccaatgcatgaaattcagtcaaatttctgtcaatgagtagtcatgtaatatggtacggtttaaatcaacctaaaatctttattttccagttgaagtttgtaattttgacctcgtatggtatgaagtggcagattgtttcaatgttcggcctgccatctggatatacgaaattgatcgacagttttcataaccaattttcttgggtggcgaggtgtgatattttcttctgagtttgtagaatagacatgtgcttcctcatgtgacctatatcttttggtaaaattgttgtggatgtaactgaatgctggaatgcgtgggaataaacatggaaacataaaataaaataccacacatacag

SEQ ID NO: 31982 - DNA, 2203 bp, Zea Mays
gctctctcttttcccaggccacgagcccacccgtccgctgaatggcaaacccaccacggccaccatctcgctcgccaccgcttccttcccgatgccgtcgtcgacgatccgaagcatctccatcaccgtctccgacgacgacggtgctgcggcggcaccgtcacggcggccgcgcgctggaagacggaaggcggtggcgcgtagcttggggcagcgggcggtgcggctggtggcgcggtggtggcccgttctcctgctcctcccggccgtcgcgctcctcctcttcgaggcgtcgcggctccgcgcctcatccccgggcccctccccaccggtctccagcctcggacggctcgacccgaccacacgtctcgtccatggcgtgcgcgagccttgcttgaagctccttagccccaaaagtttggcaaatgtggtgttcccggagggtacaagactcgattctgtggtgagcagaatcacgtacaaaactgatgacgatgactatgacacataccactccgaagcaaactctacatatttactgcaacatgcggaagcaacaaggttcgacctgtttacaggatttcagacacttgctgaaagagaagatagcttcaaggtgaatgagactgttagtgtgcactgtggtttctacagcgacaatggtggcttcaaaatttctgaggaggacaggagatacatgagagcctgtaaagttgttgtgtctacctgtgcatttggtggtggggatgatctatatcaacctattggaatggccaattcttctattggcagggtttgctatgttgctttctgggatgaagtgacactagcagctcaggaagctgaaggaaaggtaattggtgatgatagcatgataggaaggtggcggatcattgttgtcaggagcctcccttttgtagatcaacgattaaatgggaagataccaaagatgttgactcatcgccttttcacagaggcaaggtactctatatgggttgactctaaataccaattacgaagagatcctataggaatgcttgaagctcttctttggaggacaaactctacatttgctatctctgaacatggagcacggagtaacatatatgatgaggggaaagctattgttcaaaagcacaaggctacccctgaagaggtagaggtacaattgactcggtatcgtcaagatggaatgccggacacaaaaagattgcacggactgaaaggacatatggaatacaacctggtatcctaaggctgcagatcatgtaactaccgagaagacatggtatgttgttgatgcaacagacaagatcctaggcaggctagcatccaccattgcagtacatatcaggggaaagaatgaacccacttacactcctagtgtagacatgggagcttttgttattgtggtcaatgcagataaggttgctgtttctggtaaaaagcggtcacaaaagctttataggaggcactccggaaggcctggagggatgaaagaagaaacttttgaccaacttcagaaaagaattccagagagaatcattgaacatgcggttcgtggcatgctccccaagggaaggctgggaagaagattatttacccacctcaaggtatacaaagggacagaacatccgcacgaggctcaaaaacctgtcccactcccgatcagggataaaagaatacaaaaaactggatagagaattcatcgactgaaaaggatgcagtggcgaattcctccccagaaggttttgccctttgtttggaatgctatcctcataaccatgcctctgatcggggaggggggggggggagtataaatcctctttgtaattttgatgtttaccaatgcatgaaattcagtcaaatttctgtcaatgagtagtcatgtaatatggtacggtttaaatcaacctaaaatctttattttccagttgaagtttgtaattttgacctcgtatggtatgaagtggcagattgtttcaatgttcggcctgccatctggatatacgaaattgatcgacagttttcataaccaattttcttgggtggcgaggtgtgatattttcttctgagtttgtagaatagacatgtgcttcctcatgtgacctatatcttttggtaaaattgttgtggatgtaactgaatgctggaatgcgtgggaataaacatggaaacataaaataaaataccacacatacag

SEQ ID NO: 31983 - DNA, 3507 bp, Zea Mays
cttttcccaggccacgagcccacccgtccgctgaatggcaaacccaccacggccaccatctcgctcgccaccgcttccttcccgatgccgtcgtcgacgatccgaagcatctccatcaccgtctccgacgacgacggtgctgcggcggcaccgtcacggcggccgcgcgctggaagacggaaggcggtggcgcgtagcttggggcagcgggcggtgcggctggtggcgcggtggtggcccgttctcctgctcctcccggccgtcgcgctcctcctcttcgaggcgtcgcggctccgcgcctcatccccgggcccctccccaccggtctccagcctcggacggctcgacccgaccacacgtctcgtccatggcgtgcgcgagctttttgtgtcgttgatattgacagcttgcttgaagctccttagccccaaaagtttggcaaatgtggtgttcccggagggtacaagactcgattctgtggtgagcagaatcacgtacaaaactgatgacgatgactatgacacataccactccgaagcaaactctacatatttactgcaacatgcggaagcaacaaggttcgacctgtttacaggatttcagacacttgctgaaagagaagatagcttcaaggtgaatgagactgttagtgtgcactgtggtttctacagcgacaatggtggcttcaaaatttctgaggaggacaggagatacatgagagcctgtaaagttgttgtgtctacctgtgcatttggtggtggggatgatctatatcaacctattggaatggccaattcttctattggcagggtttgctatgttgctttctgggatgaagtgacactagcagctcaggaagctgaaggaaaggtaattggtgatgatagcatgataggaaggtggcggatcattgttgtcaggagcctcccttttgtagatcaacgattaaatgggaagataccaaagatgttgactcatcgccttttcacagaggcaaggtactctatatgggttgactctaaataccaattacgaagagatcctataggaatgcttgaagctcttctttggaggacaaactctacatttgctatctctgaacatggagcacggagtaacatatatgatgaggggaaagctattgttcaaaagcacaaggctacccctgaagaggtagaggtacaattgactcggtatcgtcaagatggaatgccggacacaaaaagattgcacggactgaaagctctagccgaagcctctgttattgtgagggaactcacccctgcaacgaaccatttcatgtgtgcttggtttaatgaagtggttcgcttcacatctcgtgatcagctcagttttccatacgttttgtggcggctaaacatgcatggattgagcatgtttcctgtatgcactcgcagggatcttgtgaatagtttgggtcacacaaggaaagtaaaacctcttacacagacaaattcagggtcttctactacttcgtaaccttcctcccagttcatttgctggtagccaactaaccattgatttacatatggttctaatcgtcgatactcgacatctctggttcacaattttgttgttgtatattatcatctttgcgttcttcctgcgagggaatcctggatctgaaccagaaacacgttaagctgttgcttcactgcaacgcaatcacacgatgttgccactatatatgtaaaagatatgctttctttggttagaagagaatgaacacttttctgcctcctttccgtttcctgatggaacatgtgaaaatggtgtccgttatcaattaattcggcttctgctgctgatggttgtcgcggaaactagcagcaatggaagttctgttcccgtcattttatttggactcgagaatttctctgattaccgatgtttctaattggtacttgaacagcggaatcgtttgaaaaaaatatggtcctgtctgaagctatattttgttaatgcagctccctttgcccaatagtaatacattgaatttcttttttttagatggaattatggaaccgccattattctgagtttgggaagagtttcaaaggaagcgtttaaatctcagatgagctgataaggtgtcgtaatgggccaaatctgcatttcgttctgagcccatgaagcccatatgttcttgttaacctttccctgttctttgtctcctatccccttatccgcttgacgctccccactgcgcctaaaaatggccgcgtcccactgaaccaaccgtctgcacatcctcctcctgttgccgctcgctcgccgtgccgcaatggctacggccgtcgcctcccatacgttgctctcctccgccttcgccccgcgccactaccaccgccgcctgacccggaccgcgtccgtggggccgcgccgggccgccccggtgggactggccgtgcggtgcgagaagagcgacaagcagaagaggcagccgctcgccgcgctcgtgccccgcgagcagcgcttcatgttcgagggagacgagctctgcggccccgacatatggaatacaacctggtatcctaaggctgcagatcatgtaactaccgagaagacatggtatgttgttgatgcaacagacaagatcctaggcaggctagcatccaccattgcagtacatatcaggggaaagaatgaacccacttacactcctagtgtagacatgggagcttttgttattgtggtcaatgcagataaggttgctgtttctggtaaaaagcggtcacaaaagctttataggaggcactccggaaggcctggagggatgaaagaagaaacttttgaccaacttcagaaaagaattccagagagaatcattgaacatgcggttcgtggcatgctccccaagggaaggctgggaagaagattatttacccacctcaaggtatacaaagggacagaacatccgcacgaggctcaaaaacctgtcccactcccgatcagggataaaagaatacaaaaaactggatagagaattcatcgactgaaaaggatgcagtggcgaattcctccccagaaggttttgccctttgtttggaatgctatcctcataaccatgcctctgatcggggaggggggggggggagtataaatcctctttgtaattttgatgtttaccaatgcatgaaattcagtcaaatttctgtcaatgagtagtcatgtaatatggtacggtttaaatcaacctaaaatctttattttccagttgaagtttgtaattttgacctcgtatggtatgaagtggcagattgtttcaatgttcggcctgccatctggatatacgaaattgatcgacagttttcataaccaattttcttgggtggcgaggtgtgatattttcttctgagtttgtagaatagacatgtgcttcctcatgtgacctatatcttttggtaaaattgttgtggatgtaactgaatgctggaatgcgtgggaataaacatggaaacataaaataaaataccacacatacag

SEQ ID NO: 31984 - DNA, 1754 bp, Zea Mays
tctcgctcgccaccgcttccttcccgatgccgtcgtcgacgatccgaagcatctccatcaccgtctccgacgacgacggtgctgcggcggcaccgtcacggcggccgcgcgctggaagacggaaggcggtggcgcgtagcttggggcagcgggcggtgcggctggtggcgcggtggtggcccgttctcctgctcctcccggccgtcgcgctcctcctcttcgaggcgtcgcggctccgcgcctcatccccgggcccctccccaccggtctccagcctcggacggctcgacccgaccacacgtctcgtccatggcgtgcgcgagccttgcttgaagctccttagccccaaaagtttggcaaatgtggtgttcccggagggtacaagactcgattctgtggtgagcagaatcacgtacaaaactgatgacgatgactatgacacataccactccgaagcaaactctacatatttactgcaacatgcggaagcaacaaggtgaatgagactgttagtgtgcactgtggtttctacagcgacaatggtggcttcaaaatttctgaggaggacaggagatacatgagagcctgtaaagttgttgtgtctacctgtgcatttggtggtggggatgatctatatcaacctattggaatggccaattcttctattggcagggtttgctatgttgctttctgggatgaagtgacactagcagctcaggaagctgaaggaaaggtaattggtgatgatagcatgataggaaggtggcggatcattgttgtcaggagcctcccttttgtagatcaacgattaaatgggaagataccaaagatgttgactcatcgccttttcacagaggcaaggtactctatatgggttgactctaaataccaattacgaagagatcctataggaatgcttgaagctcttctttggaggacaaactctacatttgctatctctgaacatggagcacggagtaacatatatgatgaggggaaagctattgttcaaaagcacaaggctacccctgaagaggtagaggtacaattgactcggtatcgtcaagatggaatgccggacacaaaaagattgcacggactgaaagctctagccgaagcctctgttattgtgagggaactcacccctgcaacgaaccatttcatgtgtgcttggtttaatgaagtggttcgcttcacatctcgtgatcagctcagttttccatacgttttgtggcggctaaacatgcatggattgagcatgtttcctgtatgcactcgcagggatcttgtgaatagtttgggtcacacaaggaaagtaaaacctcttacacagacaaattcagggtcttctactacttcgtaaccttcctcccagttcatttgctggtagccaactaaccattgatttacatatggttctaatcgtcgatactcgacatctctggttcacaattttgttgttgtatattatcatctttgcgttcttcctgcgagggaatcctggatctgaaccagaaacacgttaagctgttgcttcactgcaacgcaatcacacgatgttgccactatatatgtaaaagatatgctttctttggttagaagagaatgaacacttttctgcctcctttccgtttcctgatggaacatgtgaaaatggtgtccgttatcaattaattcggcttctgctgctgatggttgtcgcggaaactagcagcaatggaagttctgttcccgtcattttatttggactcgag

SEQ ID NO: 31985 - DNA, 3557 bp, Zea Mays
ctttcgtgtgatgtttctgacagatcacagatcacttgcttgaagctccttagccccaaaagtttggcaaatgtggtgttcccggagggtacaagactcgattctgtggtgagcagaatcacgtacaaaactgatgacgatgactatgacacataccactccgaagcaaactctacatatttactgcaacatgcggaagcaacaaggttcgacctgtttacaggatttcagacacttgctgaaagagaagatagcttcaaggtgaatgagactgttagtgtgcactgtggtttctacagcgacaatggtggcttcaaaatttctgaggaggacaggagatacatgagagcctgtaaagttgttgtgtctacctgtgcatttggtggtggggatgatctatatcaacctattggaatggccaattcttctattggcagggtttgctatgttgctttctgggatgaagtgacactagcagctcaggaagctgaaggaaaggtaattggtgatgatagcatgataggaaggtggcggatcattgttgtcaggagcctcccttttgtagatcaacgattaaatgggaagataccaaagatgttgactcatcgccttttcacagaggcaaggtactctatatgggttgactctaaataccaattacgaagagatcctataggaatgcttgaagctcttctttggaggacaaactctacatttgctatctctgaacatggagcacggagtaacatatatgatgaggggaaagctattgttcaaaagcacaaggctacccctgaagaggtagaggtacaattgactcggtatcgtcaagatggaatgccggacacaaaaagattgcacggactgaaagctctagccgaagcctctgttattgtgagggaactcacccctgcaacgaaccatttcatgtgtgcttggtttaatgaagtggttcgcttcacatctcgtgatcagctcagttttccatacgttttgtggcggctaaacatgcatggattgagcatgtttcctgtatgcactcgcagggatcttgtgaatagtttgggtcacacaaggaaagtaaaacctcttacacagacaaattcagggtcttctactacttcgtaaccttcctcccagttcatttgctggtagccaactaaccattgatttacatatggttctaatcgtcgatactcgacatctctggttcacaattttgttgttgtatattatcatctttgcgttcttcctgcgagggaatcctggatctgaaccagaaacacgttaagctgttgcttcactgcaacgcaatcacacgatgttgccactatatatgtaaaagatatgctttctttggttagaagagaatgaacacttttctgcctcctttccgtttcctgatggaacatgtgaaaatggtgtccgttatcaattaattcggcttctgctgctgatggttgtcgcggaaactagcagcaatggaagttctgttcccgtcattttatttggactcgagaatttctctgattaccgatgtttctaattggtacttgaacagcggaatcgtttgaaaaaaatatggtcctgtctgaagctatattttgttaatgcagctccctttgcccaatagtaatacattgaatttcttttttttagatggaattatggaaccgccattattctgagtttgggaagagtttcaaaggaagcgtttaaatctcagatgagctgataaggtgtcgtaatgggccaaatctgcatttcgttctgagcccatgaagcccatatgttcttgttaacctttccctgttctttgtctcctatccccttatccgcttgacgctccccactgcgcctaaaaatggccgcgtcccactgaaccaaccgtctgcacatcctcctcctgttgccgctcgctcgccgtgccgcaatggctacggccgtcgcctcccatacgttgctctcctccgccttcgccccgcgccactaccaccgccgcctgacccggaccgcgtccgtggggccgcgccgggccgccccggtgggactggccgtgcggtgcgagaagagcgacaagcagaagaggcagccgctcgccgcgctcgtgccccgcgagcagcgcttcatgttcgagggagacgagctctgcggccccgattgtaaccctggactgacagtgtccatcctattttgttcatgtttcaccgtggccatcttaatccacctcagaggcttcgactatccttttatgtgcatgatgaagggcaatcaagttacaatagaactgcgtacattatatatgttatctgccatgtgccatcatatccaaaattacccatgggctgtttgtggtgagagagaattcattaaaaatgagcttaattggacatgcaagtcaaagtgaactgatggttgccaaccagcctgttcataattgtgacttgtttaggatcagttactaatactatgggtacaaagtgaatggtttgtttgtactatgccttgttctttcttctaatgaattactccacaagtaattgtgtctactgaaatctgattcagtgatttaatttgcaggacatatggaatacaacctggtatcctaaggctgcagatcatgtaactaccgagaagacatggtatgttgttgatgcaacagacaagatcctaggcaggctagcatccaccattgcagtacatatcaggggaaagaatgaacccacttacactcctagtgtagacatgggagcttttgttattgtggtcaatgcagataaggttgctgtttctggtaaaaagcggtcacaaaagctttataggaggcactccggaaggcctggagggatgaaagaagaaacttttgaccaacttcagaaaagaattccagagagaatcattgaacatgcggttcgtggcatgctccccaagggaaggctgggaagaagattatttacccacctcaaggtatacaaagggacagaacatccgcacgaggctcaaaaacctgtcccactcccgatcagggataaaagaatacaaaaaactggatagagaattcatcgactgaaaaggatgcagtggcgaattcctccccagaaggttttgccctttgtttggaatgctatcctcataaccatgcctctgatcggggaggggggggggggagtataaatcctctttgtaattttgatgtttaccaatgcatgaaattcagtcaaatttctgtcaatgagtagtcatgtaatatggtacggtttaaatcaacctaaaatctttattttccagttgaagtttgtaattttgacctcgtatggtatgaagtggcagattgtttcaatgttcggcctgccatctggatatacgaaattgatcgacagttttcataaccaattttcttgggtggcgaggtgtgatattttcttctgagtttgtagaatagacatgtgcttcctcatgtgacctatatcttttggtaaaattgttgtggatgtaactgaatgctggaatgcgtgggaataaacatggaaacataaaataaaataccacacatacag

SEQ ID NO: 31986 - DNA, 2962 bp, Zea Mays
ccctgttgcccccgcctgaccccgcgtcctcccacgcgcgcgccagtgggcatcctcgaagacaacgagtggccgcgggaaagacctgcggcctctgctacctttccctcttcccctcgcttggcacagattcctagcgctgccaaaagcaaacaacagcctcctctcccctcccgccattactcaccggcttacataccacgcctctcggctctctctctccctcgaccacagtggcggacctaggttttttatatagggtgtgccacaacaaaattttcatatacaattacaaaatatatataaatttatagtaataatcttttccatcgtctagcatcccaaccgatcgctcgaacaggaatttttcaacataaactctaacctacaattttaatagaagccaatgggtgaatttgcttactgaatatcaatccatgtgctctaaatcgtgattgcttggtaagaacaacatatatttctccaaggactccaaaagaatcaacacagcgaccacgagccctcttgcaaagccaattcatgtaacctaaatatgttgtcaaaagttgagcgacatcaaccataaacacccatgtatctctatccatttgcttctcacctatgtgcagcaccttatcaattgtaaataaaggggaaaaatgtacgatcacatatttatatacttattaaccggagaaataatttaacgagcacaacaacaattcgactaggctgcacacatcacctagaaggacccacgtgaggctcagcctcgtaggtgaatcctggctgggcactagccactaggcatgggcgtgtcacgcgtgtggcggttaggctctggacgcgagcgcgcgagcgcgcggcacgacggtggtcggtggctaaccaacgtgggcacccgatgagacgatagatggacgcgggcgcgcgacgtcctggtggcgatggctgggcgagggcgtgaggcgttctagcggcgctgaggctgggcatggcgttctggcgaccggcggctaggtctgctcgtgctcaggcgtcagaactgtgaaggctaggcttagggtgtgccacggcccacctggaccccctgtgggtccgcccctgctcgaccagaggcggagagcactatagtcacgagctccacagtccaagctcgcactcgcaagtgctagcatctctcggtaatggcgaagtcgcgtggcttcgtgatggcggctgtgatggtggtggcggtggtggtggccgtggtatcggtggcgccgcgcggcgcggaggcgaagacgacgatcgagccgtgctcggggtccgactcctgcccggcgctgctgggttacacgctctacgccgacatgaaggtgtccgaggtggccgcgctcttcgccgtcgacccggcggcgttgctggccgccaacgcgctcgacttcggcgccccaggggcggcgcaccgcatcctgcccatgggcctcttcgtgcgcgtgcccacccgctgctcctgcgccgacggcgtccgcaagtccgtctccgtccgctacgccgcgcgcccggccgacacgctcgccaccgtctccgacgtcgtctttgcggggctcgcctcctccgaccagatccgcaacgagaacggcctcacctccgccgaccccgacgcgccgctggacgccggccagaagctcgccattccgctgccatgcgtctgcttcaactcatccgacaacaacctccccgcggtgtacctctcctacgtcgtgcaggtcggggacaccgtgcccgccatcgctgcaagctacgagaccaccgtcacggatgtcatgaatgtcaatgccatggggagtcccgtcgccgcgccaggcgacattctcgccatcccattgccaggtaggagtacatgatatgcccagacggattcatgtatggtgaaataggcaactccatcgtcttatataatggcattttcagcagacgtatataatggcattttcagctttcgcgagaattataatggcactgatatagtttcacgaatagttatggtgtgcagcgtgcttcaaaaacaacaaaactataatggcgtgtactaacccatatttcagctatactatagtttactaggcgccaacagtatgcactcgatgttggaagcgcatgcagtggttcaaaaacgagcatgctaatgtgggtctcaagttactaattgttgatttgaggcatgaatagtgtgttagatgcttgcctcactatctttaatggagtcatgtacttgtagcccatatttatctattatgtcgattattttgctgtagatgaaaacctgttcaagagtccatctcagatggttgtaattaaaagcaatccaaaaaagtaggtcgtaattagacattgtccttgaacattgcaaatagctaaggttaaaaaatccacatttcatatctatactactctattaagatagtagcgtcagcgtccacacccgtccacaccctggttgcccccgcctgaccccgcaccctcccacgcgcgcgcatgaaagcagctcgctagcccccgtcgtgcccctcccccacgaccgaggcaccgtcccccgccgcccccgccccggatctcgcccccgccgcggatcccgcgctggctctatgcgggagtgctgccgagctctgtgcaggagtgctgcggcgccttcctccggctgtacgccaccgaagcgcccaccgccgcagcccacacgcctcctgggcgtgcgcgcgcacatagacaggcagacagctagcggtttcagtttcagcagaagatcatcgtcttcaagaacggaaacggaacactaagcagcagtggtggatccgcaacaaaggctgagactgactcaccgatggctgcgagctcgtggtccttcacccaggactgcaccgacgagcttatccgctccaccgttgactccatcgactcggacggaggatctcggttccct

SEQ ID NO: 31987 - DNA, 1673 bp, Zea Mays
ggtgaagagccagccaaagcgcccaagctacgaaacgccaactcgtcaagaaccccagttgttgcccggccgcgcagccatgaggtggggacttagaagcagctgtaagcaacggcacaaggaatccctgcaaccactggagcaagagagcaaggggaagagcaaggccagcttctcgtccttcttgcccctggcatggcttgccaagctcacggccaggaacggcgtgcccgctaccaaggtcgtgcatgcgacgtcgtccgcggcgaagaacacggctcaggccgccaccgcattcccgtcctgcttccacaagcccgccagccccagcaccgcgtcggcgtcgcgaagcagcctgagcctggcctcttcgtcatcatccgccgccgacgcagaggcagccggcattgtcccttgccgtcgcgacgacgctaccggcggggacacggtggcaggcatcgccccgcgccgccgctcggtgggcaacgatgacgccaggaccgaggccgcgaccgcgaccgcgcggcagctgtaccacagtcgtcgccactactcggtcggtggcgaccgcgaccttcctcacctcggccacctcgtctccctctccccgaacccgaaggcggcgccgccgacaccggcgccggtgcggacgctgacgccgacgctgcccccactgccttccgattccgacacggacgaggagaagcggacgacggcacggaaccgccggcgccggcgccggcgcgccgtcagcgggcggcggtcgttctcctcggcgaaggccacggtgcgtgtgcgctcgcctaggccgcctgccgcggcggtgtcggagctggagcggttcgcggtggtgcggcggacgcgggacccgcatcgcgcgttccgggcgtccatggtggagatgatcgcgagcaagcgcatggtggggcgtcccgacgagctggagacgctgctggcgtgctacctgtcgctcaacgccgacgagcaccacgactgcatcgtcaaggtcttccggcaggtctggttcgagctcaacaacgcctcccgtgccactgccaccgccccgccgcagcgcactgcgcacctgagcggctgagcctgctggctgctgccgtgctaccagaccaccaaccggctcggaatccgcaccgcacccctgcgggcgtcggcatccatcatggcgtgtccggagccgacgtggacgctgatttccacgcgttatttttctgggcctacgtgccgacgtggccttttcacgcgtggccgcggaaaagctgtggcctgttgctgtgagggcgtacccgccctcgcttttgaggtgctctgttgtttgcgggcgtgcgcgcactgcagtattgcgtgcttcttgagtcttgagtattgtgtgtttgtcagcccagcttcaggtagtgaaatgcatgaaagggacaaaaataacgctactcgtttcatgcacttggaaccgtatgctccagtcctgtaatttggcggcatgtatcgcatgcaaaagattccaagatctccagtttctagagttcaaatagctgccgacttccggcttttgtttgaaagtgtgaacaaaaaaaagctaaaccttttggacaaccgaaaccaagccgtatatatgatttttttactcaagctatatatggttattggcaagtaataagtat

SEQ ID NO: 31988 - DNA, 1544 bp, Zea Mays
ggcccacgctcggaaatcgccgcgacgaggtgctggattttgacttgctaccagaaaccggagctaaccaaatctgccgcaaaacccctcgcctgcggcttcgcgttggccggcaaccgccgctgttgccgacacttcaacgcgtacctcgcgcccccgcgctgctgatgcgatcagcgacgcacgccagatccgagcttctgtaggaccttcagccgtccccgtcccatgggggactgcgtcgtcgaggacggccacgtgcaccatccctcggatgaggtggagggcgcggttccattgacggtagccgtggagctcgatgagcgggcgggagagtcacgggaggagggtggtgggcagcggaagaaagtgggcgggatccgaagggagccgtcgttctcgcggtggtgcagggacacctctgtcgccgccgcctccaatactgccgttgctgcggcgatcagcgacagcgacagcgacgactcagaggagttcgacctaccgctcctgccatcctcctcgggcggcgggagctcacctatggacattgaggcgggggcgacggtgagatctgatgatctgccgatctcaccgaggttgcttgcgaaggtcattgggttgatagcgtgttggtacacgctgagcacatgcttgactctgtacaacaaggagatgctggggaagcacatgtggaagttcccggcgccattcctgatgaacacggtgcatttcacgatgcaggctgtggcgtccagggccatagtgtggttccagcaacgtggcctggagggagggccaaacaaaatgtcgtggaaggattactgtttacgagttgtcccaacagctttggctactgctcttgatataaatctgagcaacatttcacttgttttcattactgtgacatttgctacaatgtgtaaatctgcttctccaattttcattcttctctttgcttttatgttcaggcttgagaaaccaagctttagccttcttggaatcatgctggttgtttcgtttggagttctactaacagttgctaaagagacagaatttaatctgtggggatttatatttattatgcttgctgctgttatgtctggtttccgctggtccatgactcagattcttctccagaaagaggaatacggattaaagaatccttttaccttgatgagccatgttaccccggtgatggcaatagtaacagcaattatttccattgtgatggatccatggcacgacttcagagcaagtcacttttttgatagttctgctcacataataagaagcagcttgttgctgcttttaggtggcgctttggcctttttcatggttttgacagaatatgtccttgtttctgtgactagtgctgtaacagtgactgtagcaggaattgtgaaggaagctgtcactattctggttgctgtgctattcttcaacgatccatttacatggttgaaggcgcttgggctagcaataataatatttggtgtcagtctattcaatatttacaagaagcatgtgtttatttgtaatgcatg

SEQ ID NO: 31989 - DNA, 2195 bp, Zea Mays
ggcccacgctcggaaatcgccgcgacgaggtgctggattttgacttgctaccagaaaccggagctaaccaaatctgccgcaaaacccctcgcctgcggcttcgcgttggccggcaaccgccgctgttgccgacacttcaacgcgtacctcgcgcccccgcgctgctgatgcgatcagcgacgcacgccagatccgagcttctgtaggaccttcagccgtccccgtcccatgggggactgcgtcgtcgaggacggccacgtgcaccatccctcggatgaggtggagggcgcggttccattgacggtagccgtggagctcgatgagcgggcgggagagtcacgggaggagggtggtgggcagcggaagaaagtgggcgggatccgaagggagccgtcgttctcgcggtggtgcagggacacctctgtcgccgccgcctccaatactgccgttgctgcggcgatcagcgacagcgacagcgacgactcagaggagttcgacctaccgctcctgccatcctcctcgggcggcgggagctcacctatggacattgaggcgggggcgacggtgagatctgatgatctgccgatctcaccgaggttgcttgcgaaggtcattgggttgatagcgtgttggtacacgctgagcacatgcttgactctgtacaacaaggagatgctggggaagcacatgtggaagttcccggcgccattcctgatgaacacggtgcatttcacgatgcaggctgtggcgtccagggccatagtgtggttccagcaacgtggcctggagggagggccaaacaaaatgtcgtggaaggattactgtttacgagttgtcccaacagctttggctactgctcttgatataaatctgagcaacatttcacttgttttcattactgtgacatttgctacaatgtgtaaatctgcttctccaattttcattcttctctttgcttttatgttcaggcttgagaaaccaagctttagccttcttggaatcatgctggttgtttcgtttggagttctactaacagttgctaaagagacagaatttaatctgtggggatttatatttattatgcttgctgctgttatgtctggtttccgctggtccatgactcagattcttctccagaaagaggaatacggattaaagaatccttttaccttgatgagccatgttaccccggtgatggcaatagtaacagcaattatttccattgtgatggatccatggcacgacttcagagcaagtcacttttttgatagttctgctcacataataagaagcagcttgttgctgcttttaggtggcgctttggcctttttcatggttttgacagaatatgtccttgtttctgtgactagtgctgtaacagtgactgtagcaggaattgtgaaggaagctgtcactattctggtataaaaggttcaaaaaagggcattacaatgaaaatgctgggacaaatacccaatcttccaattggacttcaaaatacgtcatccttgatgaagatactgaagctcaagatgatacaggctgatctgaatgtgatagaatgcagactatatatggcgcttccagagaagcaagatcatctgtgcctgcatagtcttactttcacaggctaactgacttcatattctttgagttcatcaattactctggtcagccatgcacgaacatgacgcttgcagccgtgtggcaagttgggaagattacacatacatggaacatacaagatacaacctggtatcagtacatatgttttgtcctttcattcaaaacaaagaacagtgcatatatctgaacgaggcattctgcattatgtccactaagaaaatgctccatcaaatacaattagaactacagctgacacacttaactttctggaagaggataggactcaattttatagtccattctgattgttgaagagagattcggcatcggaacgtagctttcttttctttatttatttttagatgaaaataaacactcgtatatgtaatgttgtatgtatgggactgtatactgttttacacacgagcaccacaagttgaagttcttcccaccgtattggtattactcgtcttgagagcacagtgccaagtcggcccggtccatctcaactttgtttcccgtattttgagcagcttcaaaattgaactattagacgataaatattcgag

SEQ ID NO: 31990 - DNA, 2607 bp, Zea Mays
ggcccacgctcggaaatcgccgcgacgaggtgctggattttgacttgctaccagaaaccggagctaaccaaatctgccgcaaaacccctcgcctgcggcttcgcgttggccggcaaccgccgctgttgccgacacttcaacgcgtacctcgcgcccccgcgctgctgatgcgatcagcgacgcacgccagatccgagcttctgtaggaccttcagccgtccccgtcccatgggggactgcgtcgtcgaggacggccacgtgcaccatccctcggatgaggtggagggcgcggttccattgacggtagccgtggagctcgatgagcgggcgggagagtcacgggaggagggtggtgggcagcggaagaaagtgggcgggatccgaagggagccgtcgttctcgcggtggtgcagggacacctctgtcgccgccgcctccaatactgccgttgctgcggcgatcagcgacagcgacagcgacgactcagaggagttcgacctaccgctcctgccatcctcctcgggcggcgggagctcacctatggacattgaggcgggggcgacggtgagatctgatgatctgccgatctcaccgaggttgcttgcgaaggtcattgggttgatagcgtgttggtacacgctgagcacatgcttgactctgtacaacaaggagatgctggggaagcacatgtggaagttcccggcgccattcctgatgaacacggtgcatttcacgatgcaggctgtggcgtccagggccatagtgtggttccagcaacgtggcctggagggagggccaaacaaaatgtcgtggaaggattactgtttacgagttgtcccaacagctttggctactgctcttgatataaatctgagcaacatttcacttgttttcattactgtgacatttgctacaatgtgtaaatctgcttctccaattttcattcttctctttgcttttatgttcaggcttgagaaaccaagctttagccttcttggaatcatgctggttgtttcgtttggagttctactaacagttgctaaagagacagaatttaatctgtggggatttatatttattatgcttgctgctgttatgtctggtttccgctggtccatgactcagattcttctccagaaagaggaatacggattaaagaatccttttaccttgatgagccatgttaccccggtgatggcaatagtaacagcaattatttccattgtgatggatccatggcacgacttcagagcaagtcacttttttgatagttctgctcacataataagaagcagcttgttgctgcttttaggtggcgctttggcctttttcatggtatgtatcgtgtactcctattcagggaataaatatttatgctttcttctcacttagaattaaacatgacaactacctcattgccaaagtaccagtccattgtttcagaattgttgtccattatttagaccgtgtctcgtgcgcgcatggcaccctgagctagttggacaactattgagggagtttgttttttcaattccaccgcaatacttgttacaagtcttccctttctggagtctattatggatttattattaaggcatgactgtgcctatcccagattactcttttaagtggttttatgacagatctcttcacttgcaggttttgacagaatatgtccttgtttctgtgactagtgctgtaacagtgactgtagcaggaattgtgaaggaagctgtcactattctggttgctgtgctattcttcaacgatccatttacatggttgaaggcgcttgggctagcaataataatatttggtgtcagtctattcaatatttacaagtataaaaggttcaaaaaagggcattacaatgaaaatgctgggacaaatacccaatcttccaattggacttcaaaatacgtcatccttgatgaagatactgaagctcaagatgatacaggctgatctgaatgtgatagactatatatggcgcttccagagaagcaagatcatctgtgcctgcatagtcttactttcacaggctaactgacttcatattctttgagttcatcaattactctggtcagccatgcacgaacatgacgcttgcagccgtgtggcaagttgggaagattacacatacatggaacatacaagatacaacctggtatcagtacatatgttttgtcctttcattcaaaacaaagaacagtgcatatatctgaacgaggcattctgcattatgtccactaagaaaatgctccatcaaatacaattagaactacagctgacacacttaactttctggaagaggataggactcaattttatagtccattctgattgttgaagagagattcggcatcggaacgtagctttcttttctttatttatttttagatgaaaataaacactcgtatatgtaatgttgtatgtatgggactgtatactgttttacacacgagcaccacaagttgaagttcttcccaccgtattggtattactcgtcttgagagcacagtgccaagtcggcccggtccatctcaactttgtttcccgtattttgagcagcttcaaaattgaactattagacgataaatattcgag

SEQ ID NO: 31991 - DNA, 1736 bp, Zea Mays
ctcaatatctagccctatcaggcacacatggttaggatcaggattcttggtaggattttttttttgcttaacagtaagatttgtaatctactacaactataaagcacgaaaatcgatgcgcaaagactcgaacttgcgccctccagaagggtaggtttgttctctaccactgcaacacacatctatttgttaatctgaaaataaaaaataaaaaatataatcatgtttgaataaatgtctcattatatcaaggtttatctatatgatatatagaaaccatagcaatttacgagcaactacctagtatgttgtaaagattgaatcctatgatatttattttgattaatttaattgtttttttaaataaatggacctattgttattattttcattcacctaatattttgtcacaaccaagccatttaaaatcattacttcagttattatgtaggattgtagtatcattggttgtggactcctttgtgggacaccagcaccgttgtcaacctaagcaacagcccagctcaagctgtggctatgcgacgtcagcagcatgcaaaacagaatggtggtaacgggagggaaattaggaaggattgttaggattaaagaatccttttaccttgatgagccatgttaccccggtgatggcaatagtaacagcaattatttccattgtgatggatccatggcacgacttcagagcaagtcacttttttgatagttctgctcacataataagaagcagcttgttgctgcttttaggtggcgctttggcctttttcatggttttgacagaatatgtccttgtttctgtgactagtgctgtaacagtgactgtagcaggaattgtgaaggaagctgtcactattctggttgctgtgctattcttcaacgatccatttacatggttgaaggcgcttgggctagcaataataatatttggtgtcagtctattcaatatttacaagtataaaaggttcaaaaaagggcattacaatgaaaatgctgggacaaatacccaatcttccaattggacttcaaaatacgtcatccttgatgaagatactgaagctcaagatgatacaggctgatctgaatgtgatagactatatatggcgcttccagagaagcaagatcatctgtgcctgcatagtcttactttcacaggctaactgacttcatattctttgagttcatcaattactctggtcagccatgcacgaacatgacgcttgcagccgtgtggcaagttgggaagattacacatacatggaacatacaagatacaacctggtatcagtacatatgttttgtcctttcattcaaaacaaagaacagtgcatatatctgaacgaggcattctgcattatgtccactaagaaaatgctccatcaaatacaattagaactacagctgacacacttaactttctggaagaggataggactcaattttatagtccattctgattgttgaagagagattcggcatcggaacgtagctttcttttctttatttatttttagatgaaaataaacactcgtatatgtaatgttgtatgtatgggactgtatactgttttacacacgagcaccacaagttgaagttcttcccaccgtattggtattactcgtcttgagagcacagtgccaagtcggcccggtccatctcaactttgtttcccgtattttgagcagcttcaaaattgaactattagacgataaatattcgag

SEQ ID NO: 31992 - DNA, 1364 bp, Zea Mays
acgtggacacgctggttggcccgttttgcgtcccactttgatatatagaaatatgtacctgcgattgcggtattgcctcaaaactattacatgttgcattagagtctccactattgtctgaaatattaaaattgacaacttcaaatgcagtttattctactgattcaatcaacatgttaaatgaaagctttacatcaccattattttatttattttcgatgtaggattaaagaatccttttaccttgatgagccatgttaccccggtgatggcaatagtaacagcaattatttccattgtgatggatccatggcacgacttcagagcaagtcacttttttgatagttctgctcacataataagaagcagcttgttgctgcttttaggtggcgctttggcctttttcatggttttgacagaatatgtccttgtttctgtgactagtgctgtaacagtgactgtagcaggaattgtgaaggaagctgtcactattctggttgctgtgctattcttcaacgatccatttacatggttgaaggcgcttgggctagcaataataatatttggtgtcagtctattcaatatttacaagtataaaaggttcaaaaaagggcattacaatgaaaatgctgggacaaatacccaatcttccaattggacttcaaaatacgtcatccttgatgaagatactgaagctcaagatgatacaggctgatctgaatgtgatagaatgcagactatatatggcgcttccagagaagcaagatcatctgtgcctgcatagtcttactttcacaggctaactgacttcatattctttgagttcatcaattactctggtcagccatgcacgaacatgacgcttgcagccgtgtggcaagttgggaagattacacatacatggaacatacaagatacaacctggtatcagtacatatgttttgtcctttcattcaaaacaaagaacagtgcatatatctgaacgaggcattctgcattatgtccactaagaaaatgctccatcaaatacaattagaactacagctgacacacttaactttctggaagaggataggactcaattttatagtccattctgattgttgaagagagattcggcatcggaacgtagctttcttttctttatttatttttagatgaaaataaacactcgtatatgtaatgttgtatgtatgggactgtatactgttttacacacgagcaccacaagttgaagttcttcccaccgtattggtattactcgtcttgagagcacagtgccaagtcggcccggtccatctcaactttgtttcccgtattttgagcagcttcaaaattgaactattagacgataaatattcgag

SEQ ID NO: 31993 - DNA, 1357 bp, Zea Mays
acgtggacacgctggttggcccgttttgcgtcccactttgatatatagaaatatgtacctgcgattgcggtattgcctcaaaactattacatgttgcattagagtctccactattgtctgaaatattaaaattgacaacttcaaatgcagtttattctactgattcaatcaacatgttaaatgaaagctttacatcaccattattttatttattttcgatgtaggattaaagaatccttttaccttgatgagccatgttaccccggtgatggcaatagtaacagcaattatttccattgtgatggatccatggcacgacttcagagcaagtcacttttttgatagttctgctcacataataagaagcagcttgttgctgcttttaggtggcgctttggcctttttcatggttttgacagaatatgtccttgtttctgtgactagtgctgtaacagtgactgtagcaggaattgtgaaggaagctgtcactattctggttgctgtgctattcttcaacgatccatttacatggttgaaggcgcttgggctagcaataataatatttggtgtcagtctattcaatatttacaagtataaaaggttcaaaaaagggcattacaatgaaaatgctgggacaaatacccaatcttccaattggacttcaaaatacgtcatccttgatgaagatactgaagctcaagatgatacaggctgatctgaatgtgatagactatatatggcgcttccagagaagcaagatcatctgtgcctgcatagtcttactttcacaggctaactgacttcatattctttgagttcatcaattactctggtcagccatgcacgaacatgacgcttgcagccgtgtggcaagttgggaagattacacatacatggaacatacaagatacaacctggtatcagtacatatgttttgtcctttcattcaaaacaaagaacagtgcatatatctgaacgaggcattctgcattatgtccactaagaaaatgctccatcaaatacaattagaactacagctgacacacttaactttctggaagaggataggactcaattttatagtccattctgattgttgaagagagattcggcatcggaacgtagctttcttttctttatttatttttagatgaaaataaacactcgtatatgtaatgttgtatgtatgggactgtatactgttttacacacgagcaccacaagttgaagttcttcccaccgtattggtattactcgtcttgagagcacagtgccaagtcggcccggtccatctcaactttgtttcccgtattttgagcagcttcaaaattgaactattagacgataaatattcgag

SEQ ID NO: 31994 - DNA, 1627 bp, Zea Mays
actatacatcgattcgtgatctcggtctttccaaaccaacaggtgttgcctgcccaagtgcccagcctcgcttctccagtcaattctcagcctcgtcctccgcctccgctcccgctctctcctctccttggcctccgcttccgctcctgcctggaggctgcatcaaaccctaccgctccggacctcccggctggccgcgagatgcgacgcctgtccggcccctaatccttctcctcgatactgcccctcgcccgcccgcccgccggcatgggccgctacgggcccttccctgccgccgccggtgatggcgggggctgcctgcccctgccgattgtagcggctgaaggcgcgctggctgtcctggacggcgccattgcgaccgcggccttcgtgcagttagcaaggattcataggcacaaccagctacaaggatggactcggcaaaagatattccattttatgattggtctatcaaacatagtattcctagtatatttcgtgtctaccatcattgctacttgtcagagatggatttgctgggtacatggatgtggatttgttctcatggctagtccacagatattgcttcttgcttctttcctcttgctactgtcattctgggttgacctgtgtcatcagacaaatgatgaagacgaagaagatggaaggagtcagagtcaccatgaagctttactagacagaacaaaagcgaaacctggcattcatcctgttaatatccgtcagaggtgttgcccaggaatacagcttggaagccggcaaaaatttgtgattttggtgcttctactgtcatttgttgttatgcttgcctttgccatcctcatatgggttggtagaggagacaatcctatcgattcttctctactgaaaagggtttatttggatgtattttcagtagtagttattgtacttggtggtgctctggcatgttacggtgcagtgttattctcgaagatgagcaaagttcgttctgaaactgtatcaactgagaagtggaagatgtggacatcatcaacaatgctgttattttgtttatatattacttcataggctcgtcagtgccatcaggatttgttctatggatcatgagagagatgcctcatcggcaggtagttgaaagatccgtagaatcgagggtggttactttgttcagggaaagaccatcaactacgcaggatccacagtggaggacagctgtcacatcctcaaacaaggccctcaagtcaagcccaatttaacctgaagacaaaccatcgacagtgatacctcacgttctgcttaatgtgctgggactaataccaacacgtcagggtcacaactggcgtctgctggcattgcgctaactgatgcatttagaactgaaggttggggccatatttgaagaattaacaaaatgtaaatagctttggcagttactttacccttttagatgtaacaaactcatcccgttggttacatgtaccttgttttatttagcgcttcatctaatttaccgtagaaggcatgtgttcaaccgatctttgggctgtttggttcttttagtcacttctaaattttaggtactaaactttagttcctagaaattctatttaaaaactctattttagtc

SEQ ID NO: 31995 - DNA, 1708 bp, Zea Mays
actatacatcgattcgtgatctcggtctttccaaaccaacaggtgttgcctgcccaagtgcccagcctcgcttctccagtcaattctcagcctcgtcctccgcctccgctcccgctctctcctctccttggcctccgcttccgctcctgcctggaggctgcatcaaaccctaccgctccggacctcccggctggccgcgagatgcgacgcctgtccggcccctaatccttctcctcgatactgcccctcgcccgcccgcccgccggcatgggccgctacgggcccttccctgccgccgccggtgatggcgggggctgcctgcccctgccgattgtagcggctgaaggcgcgctggctgtcctggacggcgccattgcgaccgcggccttcgtgcagttagcaaggattcataggcacaaccagctacaaggatggactcggcaaaagatattccattttatgattggtctatcaaacatagtattcctagtatatttcgtgtctaccatcattgctacttgtcagagatggatttgctgggtacatggatgtggatttgttctcatggctagtccacagatattgcttcttgcttctttcctcttgctactgtcattctgacaaatgatgaagacgaagaagatggaaggagtcagagtcaccatgaagctttactagacagaacaaaagcgaaacctggcattcatcctgttaatatccgtcagaggtgttgcccaggaatacagcttggaagccggcaaaaatttgtgattttggtgcttctactgtcatttgttgttatgcttgcctttgccatcctcatatgggttggtagaggagacaatcctatcgattcttctctactgaaaagggtttatttggatgtattttcagtagtagttattgtacttggtggtgctctggcatgttacggtgcagtgttattctcgaagatgagcaaagttcgttctgaaactgtatcaactgagaagtggaaggttgccagtttagctgctgtctcgctgatctgtttctcgtcttctgctatacttgcacttgtgactaatgttccagtgcttttgtattggtactcaacagatgtggacatcatcaacaatgctgttattttgtttatatattacttcataggctcgtcagtgccatcaggatttgttctatggatcatgagagagatgcctcatcggcaggtagttgaaagatccgtagaatcgagggtggttactttgttcagggaaagaccatcaactacgcaggatccacagtggaggacagctgtcacatcctcaaacaaggccctcaagtcaagcccaatttaacctgaagacaaaccatcgacagtgatacctcacgttctgcttaatgtgctgggactaataccaacacgtcagggtcacaactggcgtctgctggcattgcgctaactgatgcatttagaactgaaggttggggccatatttgaagaattaacaaaatgtaaatagctttggcagttactttacccttttagatgtaacaaactcatcccgttggttacatgtaccttgttttatttagcgcttcatctaatttaccgtagaaggcatgtgttcaaccgatctttgggctgtttggttcttttagtcacttctaaattttaggtactaaactttagttcctagaaattctatttaaaaactctattttagtc

SEQ ID NO: 31996 - DNA, 3593 bp, Zea Mays
cgagaccgtgtccacccgcccaggacccattgcgcaggaaagacctagcaaagcggcagatctagtgagacatggtgtggaggcgtgcgctgactcaccatgccgcgccaaggatggagatgccgatggcagagaaggtgctggaggcggcggagggggcacaagccacggatcgccgcgtcaccgtcaccatcccacgcgagcatcgtcaggaggcggttgcagtgtgcagggagggccgaggacggaggcgatgatgccgatggcggagaaggtgtaggaggaggcgatgggggtggacgcgggcgaggaaaggcacagatccgcctacggtgccggggccaaggtggacgggggcggaggctgggtggttccatgcgcgagtgcggggaggggcggattcagcgaaggcgagggcaagctagctgtggacgcgagggagggggcgtgcgcggcgagattagcggcgagcggcggggggagggcggaaccagggtgagggtggtggacgccctccttatactcttaaggaattgtagagatatagtgcgaagccaaggcagggattccttcaaccgaagcggtctgggcaccgcagtggttacgcgatcgcgttcttaggcgaacttatcgccaggtcgcaatgaacgcgaggtggaagaagggttgaggtccacatgcctgtgacacagaagcccctgggcgagcctagtgtgaggctgacacgtgggcccatggacagtgtgagtgactccgcatgcgcatatagcccggtgggcagacgggaggggcccgtttggcgaccgcagcaagccagcaacaacccaatcgcgatgactagtttggccgacatgcgaggccccatgtctacgcgtgagggagcacatggtggtgcgggagttgggtcgacgaggtggtaaagcggtccgggcctccaagaatatatgttttgggaatggcggcatttgaaatagaacagtgtacgactccacaacaatttatctggtgagatacaattccatgggaccacttatatgtcgaaaatgatcacctaaattaatgttgaaccctacattgtgcatcttgtaaacatgttcttcgttgaccaaactatcgaagtgtttggttgtctcatatagtgcagttcgatagtttgactgtctcatgaagcctaaaccaacgggcagtgaaaacattacaaatccttaacgccagttaactgatcaggattatagtattgtggccttgcttcaccctgagtaaagcaggaggaagagaagccatagatatgtatttcggttaaacacatgtatagcaacaaagtataataattaatctcaagaagtaaggtctgttttcagtaacagcctatcaacagaatagcaagtgttccaatgcaaaaattcaattcttccttcaagatcatgtaacaggtattaaataaaagaaacctgaaagaatagtaaagagattacagtgtgatggcacctagagatatcactgaagtaagcacagaatgatatagtgcattgaccatttgtccaaaatctaaacacttttaggcatggaaatgagtttgcacctactctggcttctttcttactatacaccaatcttagatacttcttcccattaccttgaagcatatgtattgactgtaaagaggttaacacacctagtattatttatatattaaagtgcatactactctttaagttattgacaattcatcgcctaaatgttaaggaaacttgtttttttatatatctgggatgaaatgttgatctggcaaataaatctagcagactataatccatatagtgcatgtaataactcaactcctttattcgtaatgtttacataattcttcaatatatttttatactcgttctacctgtttttagtctatttttactgtacttcatagaattgttcctacaaagatgataacatcaccaaaatctccttttccgtggtcgtgccttggcacgtgtttttacttcagtgaaatcttagatcccccatctgtttgccagttaagtataaacacatggtgtcggtgtttcgagaccgggggtccctaagccgacgagtgaatgtcgccgcgtgccccagcccagatgggtcgacgcgaggccgagcgcgaaggggggaagtgaggtggccggagacaggcgtgagagtggtgggaatcccgcggccttcgtgttcgtcccgcgcccaggtcgggtgcgcttgcagtaggggattacaagcgtccacgcaggagagggagcgagcggcttcaagcgagcgcctgtctcgtcctcgtccccgcgcggccaaccctctctaagagggccctggtccttccttttataggcgtaaggagaggatccaggtgtacaatggggggtgtagcagagtgctacgtgtctagcggaggagagctagcgccctaagtacatgtcgttgtggcagccggagaggttttggcacccagctggtgtgatgttgtggccgtcggaggagtgccggagcctggcggagggacagctgtcggagctgttgagtctttgctgacgtcctcttgcttccgtaagggggctgagagccgccgtcgtcacagagtatgcggggcgccatcattgcctatctggcggagcgagccagatgggacgccggtcttgttctcgtggcccgagtcagctcggggtagggtgatgatggcgcctcctgttgacgtggctggtctgcgccctaggttgggtgatgtgtaagctcctccgaagtcgaggtcgagtctgtcttccgtgaccggggtcgagtccgagcccctgggtcgggcgaggcggagaccgacggctgaggccggggcggagtccgagccccgggggtcgggcggagcggagttcgccgtcttctgggacttagcccgagtccgagccctgggtcgggcggagcggagttcgccgtcttccggggcttagcccgagtcccagccctgggtcgggcagagcggagttcgccgtcttccggggcttagcccgagtccgagccctgggtcgggcggagcggagttcgccgtcttccggggcttagcccgagtctgaaccctgggtcgggcggagcagagttcgccgtcttccggggcttagcccgagtccgagccctgggtcgggcggagcggagcttcctatggtgcctgcggccgggcctgactgcctgtcagcctcactctgtcaagtggcaccgcagtcggagcggcgcaagcggcgctgtctttctgtcagaccggtcagtggagcggcgaagtgacggcggtcacttcggctctatcggctgaggggcgtgtgtcaggataaaggtgtcaggtcacctttgcattaaatgctcctgcgatttggtcggtcggtgcggcgatttggtcagggttgcttcttggcgaagacagggcctcgggcgagccggaaatatgttcgccgctggaggggggccatgggcgagacggaggtccttcggggtcggctgcccttgtccgaggctaggctcgggcgaggcgtgatcgagtccctcgaatggactgatccctgacttaatcgcacccatcaggc

SEQ ID NO: 31997 - DNA, 1026 bp, Zea Mays
atgggcatgagcaccaccactgacctgtccgcgccaccccactccgccaccctgccctgccgcatggcctcctcctcgtcatcttcctccgtcgccccgtggccgcgtccagacaagcaccgcggcgcgggcgccctggtccgccgcgcgcagctcgtcctgtcgcgcgaggtcgggtggtgcgggcagcgcgcgtggcggaagctgctcaggcggctggcgcaggagaccaggtgcgtgtgcagctccccgacggcggcggccacgggtcggcccatcacgttcggctacgacgccgccagctacgccaagaacttcgacgacgggcgcagccccgcgccgcgccgcgtcgtcgtcggcgccaatgcgggcgataaaccgagcggcaacaactgaccaccccatcgacgttcttctctctctccctcgtcgatccccctccttccgatattttttttgtttgtttctttttaactatttttcctctatgcatgcttttatttccttctcattctagcgcctcccctggtgatggtgaattggtgatattggtgttgcaattgcctcatcaatatcccatataaatctagtaatttgtacatagctttcgagcgagataacacgagtggagtttggtaattaagagatttcaatcagaatgcaatgtgctatgtctgaatgactgaatctcttctcctgcattggtaagagatttcaatcagaattcagatattgcagggagccatttttttttctgatttcaagattacggaagagatgcaggcactacctaatctgaaacgcgaggctggatagatagtggcatgttaatttcatctcgatatttgatccactgacagcgctaacttgccaaagaaaggagatccttttaaagaaaaggaaagcgaccaacgggcggtgcatgcggatcaagctactcgtggaatggaccatgcagtaccggacaaaagggaaaagtggacgggatttattggtcttggttttagggttctttcttgattcgtt

SEQ ID NO: 31998 - DNA, 1723 bp, Zea Mays
gtcgaaccagcatttaacccccaacaagttgaaaagagtgtttagccacgcaccaacaatcggaggacgcaagcgcacgagagatgttgccaattcacattctgcgtgcatcacatggaattcctccagttgcaccaactcaaatagcgcagccaatcttcctcctcccaaacaaaggctctctcctcctctccaccacgggccaacaagcgtatcgtctctgagtctctcgtctcatgccctggccaacatgagcacgtacatatctctctccttagagcgcagcagcagcgtggtccgcgacgccgccaagtccgcgcctccgggcagtggtgtcagtgccccgtatccacgcgcgggcgcgggcgcgggcacgtcgctttccctgtccggcgcagcggcggcgcacgggcacggccagtacctccccctcaacgaggacgactccctggacatggtcctcttcgacgtgctccgcgaggcatccggctccgcacccggcgccacctaccagccgccctcgtcgtcgttgcctacgctgaaggcgctcgcttccggcgcctcgcgcaagggcggtggcaacaacggcaacggcagtagggccgcgcacgcacccaaggcggccacggggcggcactaccgcggggtgaggcggcggccgtggggcaagtacgccgcagagatccgtgacccggcgcggcacggggcgcggctctggctcggcaccttcgccacggccgaggaggccgccgcggcgtacgaccgcgccgcgttcggcatgcggggcgccaaggcgctgctcaacttcccgccgccggccgcgggctgcgggaacgccgcaaccgccacggcgaagcaggctgctggaagccaagtgaacaacggcgaatgcgatctcctcgaagaaaatgggtcatcgcatgatagtgaatgtttctaagcattgtccagtccgttgattgaccagagtggtatgtggtagcgatccctcttctcgttgtaaggacatgccgtgagctgtgatgggttcaaattggggggatgatgatagccataaaactccaatgtttcttttttgtgcgtgtgtgtgtttccttcaaaatctggtttgggagcgaacgtgcacgatcctatttggatgcttgtttaatcatgaatatatacaaaaaaaaaggtcaagatgaaaacatgattttgttcgctgcagcttctctagctttgactacaggacttggcatgaataggaacttagtaaagatttctcagtatagacattaaacaaatgccgagtacagaatgagaatccatcaaacaaatgcgaaacggttgccttccttacgaagattccaagaatgggattccaattggggtggggaacaacagagatgttacccgagcccactgcccctgtagctcttccaacttttaaaccaaaataagaattcaaaatacattcgacgccacatggcccaccacctgcgtgacctcaggagtgacgtcatcgtaccactggcgacgtgggaatccatgtttcatccacttgattttctttttgaaaaatcctttgacaggaaactgcagtcctaccagtttccaccttaccattgcccaatgtcaggtcgaccacaaaattatactgcccacacaataacaaaggcttgcagactagtaagtacatcaggattcgttaccaaacttcgtgggggtatttggaggatttacc

SEQ ID NO: 31999 - DNA, 2313 bp, Zea Mays
cccgtttcttgatgggttcatagagaaccctgaatacttggccagctgattcaatttgcatctggcggatttgatcatttgaaataacctcactggtccaaccaaatgcgatagataccatgaggtccaattcacatcgtaaaatgaaaatacactattgctaaaaaaatggaaacacaatgtgacaaacacagaagaggcaattgtagtaacaagcaataaaggcaaggaactgagccacctgaatgacagtgaatgtatgacaggcctataggctatggatgccaatattaggttgtctccagcaacgaaccctaaatggtcctgtactctaaatttagaggatgagacgtccgctatcggctccagcagcaacctgtaaataaaactgtaaaatagcggacgactttgacgagcgctaaagctttcatccgctatcctgctctcacatgcagtccagcctcttcctctctctactttttctcctgcgcttgtcagatgccgtgcagatgccatgcaaatttgtctgctatcgcttggttgtagtcggttttaaaaattaattagtctctaattaattcttggatcacatgaatgattttttgtttccgtgcgtatgataggaaatacataatacatttttttgtaaataatatgatcgatgagtaatttgtatataaaatgaaaatgtattgtaagaagtatttttattttgcaacataagttaattaattttttataagtgacatgtaaaaataatgtgtattataaattccggtacactatagatatagaggaccgaatttaggggacgttgttggagatgaaaaagatatagagaatagaatcttttagagcgtgctgtataggacagagaatattcctttaggggatagaatttaggggacgttgctggagatagtcttatccttgaaatttagggcctgtttggttcgtggctaactgtgccacactttgcctaaggttagtcgttcgaattgaagaactaatcttagacagaaaagttaggcaaaatggggcaagttaggcatcaatccaaacaggcccttattgttcgggaaaattggttttatagcacgataggacatcattttcagaaaacaccactaaaaagatttccatcacggcaaatatcacccaataaaaatactaatcgggaactctttccatgttattttctaaaaataatgttctttagatgctacaaaaccatttccccttattgatatatacccatttatacatataacctgatcaactatcaaaattggtgctctgccatttctaatggttaacactgacattacaagcggtagagagcaaaatctgtttgttctatgacatgacttataaaaaaagatgatttaaggaaaatagtgctgacttaaataaaaaaagggaaatcccagtaccagaggctcccacatgggtgagggtctaggagggataaaccgaggcaagccttcaccttgcaaatgcgaggaggctgctttgaacccataaactggtgactcagtgagacatctcttaccactaccccaggcctgcccttcttctgacataaaaaatggaaactataaccactccaataaggaagattaacaaaacttagccggggagggaaagaccgccctcccggtatcgtattaagaatataccgaaacatggcaccggccaagaaaaccaccgaaccctggcctcccatcactaacgggtcgatcaactgccccactctgcaacggtccacccggagggtagcgcgcaggattccggtccccgagagcgggcaggggatagcgatgggatttttttaaccaagcccgaaaattcaccccgagggggatcgaacccgggacctagaggtgctactcgaaagcattaaccattacgctagaggcccttttattttcataaacgtacataccaattgttatttattttcataagcgtttggatcataactaatgtcaaatcccacattaacttcgtagcaaagaacaagaaaaaaattatgattcctatcccacatttatatccttctataataggtggtactctaagttagaccatgggtgcagaaaagaaggcaaaacaaccctcaaactcaatctctaaatattgtttatcccaattcactagaggaagtgcataatcaatagattcggcaactttgatgagcaattcagtgaaggcccttgattgtgattattttggatagtaagatgtcctcttgtacctctagaaaaaaggtctaggttagaaacatgttaccttaattttgcagctaaattc

SEQ ID NO: 32000 - DNA, 2661 bp, Zea Mays
ctgaaacccaaataaaaccctcgagctgctgcgaaaaaaaatataacgcccacaatcccctcttcccagccgcgccgccgccgccgtgaacgagatggcggcagcccttttgctccgcagtctccggccatcggtgagccgggcacatatccaccttctttcccatgcctcctccccgacggcgctggggtctccccttttaccccgcctctactcctctgcggcagcgtcaaccgccgcctctcctgttttcacgcccggcggcgtcatggacccatcccgcatccgcaacgtagcggtgatagcccacgtcgaccatgggaagacgacgctcatggaccggctccttcgacagtgcggggccgatatcccccacgagcgcgccatggattcaatcagccttgagcgcgagcgcggcattaccattgcctccaaggtcacttctgtctcttggaaggaaaatgaactcaacatggttgatacacctggccacgctgattttggtggtgaggttgaacgagttgttggaatggtggaaggagctgtcttggttgttgatgctggagagggacctttagcacaaactaaatttgtgctttcaaaagctttgaagtatggcttgcgtccaattcttctcctcaacaagtttctgaagaaacctgcgatgaagtagagagcttggtttttgatctttttgcaaatcttggtgctacagaagaacagttagatttcccagttctttatgcatccgctaaagagggttgggcttccttaactttcaccaagagcccccctgataatgcaaagaatatgtcttcactgctcgattccattgtacgacatgttccttcaccaaaagctgatcttgaggctccattccaaatgttggtttccatgatggaacgtgatttttatctaggacggatactcactgggagagtaaggtccggagttgtccgtgttggtgacaaagtccatggtcttcgcagtacagatgatggagttcataaaattgaggatggaaaggttgtcaaactcatgaaaaagaaaggcacaaatatggtaacagtagaggctgcaggggctggtgatataatttcaatggcaggattggctgctccagcaattggacatactgtggcaaattcagagatattgagtgctctgcctacaattgagttggatcctcccacaatatctatgacgtttggcgtgaatgattcaccgttggctggccgggatggcactcatctaactggagcaaaaattggtaaccgcctgatggcagaggcagaaacgaatttggctattaatgttctccctggaccattatcagaatcttatgaagttcaaggaagaggagagcttcagttaggaatattaattgaaaatatgcggcgtgagggatttgagctttcagtttcacctccaaaagtgatgtataaaacagagcgtggtgaaaggttggagcctattgaagaagtgactgttgaggttggtgaagagcatgtgggattcgtcttggaaaccattactcacaggaagggtgaagtagttgacatgggcccggttcctggcacaactggaagaactcgaatcttcatgacctgtccatctaggggtttggtgggtgttaaaggaattttcagcagctttacacggggaactggatttatgcaccgtgcttttcaggcatatgctaaatacagaggtccactgggcagtgtcagaaaaggagttctgatatctgttggcaagggacttatcacttcacatgcccttatgagtttagaagctcgtgggatcctctttgtatcccctggaatggaggcatatgaagggatgatagttggtgagcactcacgtgacagtgatcttgaggtgaatcctgtgagaactaaagaacttacaaatatccgagcccctggaaaggatgaaaatgtccgtttgtctccaccccgattgatgagtttggaagaggcaattggatatgttgctgcagatgagcttattgaggttactcccaaggtcgtacgtcttcgaaagaagtacttggattccactaagcgtaagatgatgaaaaacaagcctatgaattagaactccagagacaacaaaattacatcaagcactgccagcactactatataagtttatcatgcaagactcttgcagcaagagtgttgctgtctcttgcagcaagagacagcatttatgtataggttggtgttcaatgttgcaacctgagctctttaccagcagcttcacccaggttttacgtgcacacaggattggctgacagaataagcccaccgtagcagctactggaggtaggatcctcgttggttatatctatttagacttttttatggtgaaatttcagacacccacaggttctttgaaggttgtattattctttggaagttcaagaaatgcaggccaatccccataggtattttgtttgaaccggcttctttgttgacaattttatgaccatgtgttattactgattaagtgcaagaaaaaacaaatgaaattggcctccttgctctaggacaattttacgaccatgtgttattactgagatagtgtcggacaccaagaaattggcctccttgctctaagcggtgtgttgcagacttaaccatttcactcagcaat

SEQ ID NO: 32001 - DNA, 2405 bp, Zea Mays
ctgaaacccaaataaaaccctcgagctgctgcgaaaaaaaatataacgcccacaatcccctcttcccagccgcgccgccgccgccgtgaacgagatggcggcagcccttttgctccgcagtctccggccatcggtgagccgggcacatatccaccttctttcccatgcctcctccccgacggcgctggggtctccccttttaccccgcctctactcctctgcggcagcgtcaaccgccgcctctcctgttttcacgcccggcggcgtcatggacccatcccgcatccgcaacgtagcggtgatagcccacgtcgaccatgggaagacgacgctcatggaccggctccttcgacagtgcggggccgatatcccccacgagcgcgccatggattcaatcagccttgagcgcgagcgcggcattaccattgcctccaaggtcacttctgtctcttggaaggaaaatgaactcaacatggttgatacacctggccacgctgattttggtggtgaggttgaacgagttgttggaatggtggaaggagctgtcttggttgttgatgctggagagggacctttagcacaaactaaatttgtgctttcaaaagctttgaagtatggcttgcgtccaattcttctcctcaacaaggttgataggccttcagtttctgaagaaacctgcgatgaagtagagagcttggtttttgatctttttgcaaatcttggtgctacagttagatttcccagttctttatgcatccgctaaagagggttgggcttccttaactttcaccaagagcccccctgataatgcaaagaatatgtcttcactgctcgattccattgtacgacatgttccttcaccaaaagctgatcttgaggctccattccaaatgttggtttccatgatggaacgtgatttttatctaggacggatactcactgggagagtaaggtccggagttgtccgtgttggtgacaaagtccatggtcttcgcagtacagatgatggagttcataaaattgaggatggaaaggttgtcaaactcatgaaaaagaaaggcacaaatatggtaacagtagaggctgcaggggctggtgatataatttcaatggcaggattggctgctccagcaattggacatactgtggcaaattcagagatattgagtgctctgcctacaattgagttggatcctcccacaatatctatgacgtttggcgtgaatgattcaccgttggctggccgggatggcactcatctaactggagcaaaaattggtaaccgcctgatggcagaggcagaaacgaatttggctattaatgttctccctggaccattatcagaatcttatgaagttcaaggaagaggagagcttcagttaggaattttcagcagctttacacggggaactggatttatgcaccgtgcttttcaggcatatgctaaatacagaggtccactgggcagtgtcagaaaaggagttctgatatctgttggcaagggacttatcacttcacatgcccttatgagtttagaagctcgtgggatcctctttgtatcccctggaatggaggcatatgaagggatgatagttggtgagcactcacgtgacagtgatcttgaggtgaatcctgtgagaactaaagaacttacaaatatccgagcccctggaaaggatgaaaatgtccgtttgtctccaccccgattgatgagtttggaagaggcaattggatatgttgctgcagatgagcttattgaggttactcccaaggtcgtacgtcttcgaaagaagtacttggattccactaagcgtaagatgatgaaaaacaagcctatgaattagaactccagagacaacaaaattacatcaagcactgccagcactactatataagtttatcatgcaagactcttgcagcaagagtgttgctgtctcttgcagcaagagacagcatttatgtataggttggtgttcaatgttgcaacctgagctctttaccagcagcttcacccaggttttacgtgcacacaggattggctgacagaataagcccaccgtagcagctactggaggtaggatcctcgttggttatatctatttagacttttttatggtgaaatttcagacacccacaggttctttgaaggttgtattattctttggaagttcaagaaatgcaggccaatccccataggtattttgtttgaaccggcttctttgttgacaattttatgaccatgtgttattactgattaagtgcaagaaaaaacaaatgaaattggcctccttgctctaggacaattttacgaccatgtgttattactgagatagtgtcggacaccaagaaattggcctccttgctctaagcggtgtgttgcagacttaaccatttcactcagcaat

SEQ ID NO: 32002 - DNA, 3000 bp, Zea Mays
ctgaaacccaaataaaaccctcgagctgctgcgaaaaaaaatataacgcccacaatcccctcttcccagccgcgccgccgccgccgtgaacgagatggcggcagcccttttgctccgcagtctccggccatcggtgagccgggcacatatccaccttctttcccatgcctcctccccgacggcgctggggtctccccttttaccccgcctctactcctctgcggcagcgtcaaccgccgcctctcctgttttcacgcccggcggcgtcatggacccatcccgcatccgcaacgtagcggtgatagcccacgtcgaccatgggaagacgacgctcatggaccggctccttcgacagtgcggggccgatatcccccacgagcgcgccatggattcaatcagccttgagcgcgagcgcggcattaccattgcctccaagccatggccgtcacagggagagtgggcgaggcggccctagcgagcgcagcttcagctagcaccttcttgccgatcgctgctgttgacgcagcccacgcgtcctccttcagcctggcgttggcgagcacttcggacgcgtggtgagggtgaccacggtggactgcacggggcacaagggctgctcctccaaggccaagttgggcgtgtggttcggcgcggtggtggctagtcgagatccccatccggtggctgcagcatgtgtgcgattgtccatggcaagagaatctgaagataggggagagtggtcgtaaaagcatgtagagggtcacttctgtctcttggaaggaaaatgaactcaacatggttgatacacctggccacgctgattttggtggtgaggttgaacgagttgttggaatggtggaaggagctgtcttggttgttgatgctggagagggacctttagcacaaactaaatttgtgctttcaaaagctttgaagtatggcttgcgtccaattcttctcctcaacaaggttgataggccttcagtttctgaagaaacctgcgatgaagtagagagcttggtttttgatctttttgcaaatcttggtgctacagaagaacagttagatttcccagttctttatgcatccgctaaagagggttgggcttccttaactttcaccaagagcccccctgataatgcaaagaatatgtcttcactgctcgattccattgtacgacatgttccttcaccaaaagctgatcttgaggctccattccaaatgttggtttccatgatggaacgtgatttttatctaggacggatactcactgggagagtaaggtccggagttgtccgtgttggtgacaaagtccatggtcttcgcagtacagatgatggagttcataaaattgaggatggaaaggttgtcaaactcatgaaaaagaaaggcacaaatatggtaacagtagaggctgcaggggctggtgatataatttcaatggcaggattggctgctccagcaattggacatactgtggcaaattcagagatattgagtgctctgcctacaattgagttggatcctcccacaatatctatgacgtttggcgtgaatgattcaccgttggctggccgggatggcactcatctaactggagcaaaaattggtaaccgcctgatggcagaggcagaaacgaatttggctattaatgttctccctggaccattatcagaatcttatgaagttcaaggaagaggagagcttcagttaggaatattaattgaaaatatgcggcgtgagggatttgagctttcagtttcacctccaaaagtgatgtataaaacagagcgtggtgaaaggttggagcctattgaagaagtgactgttgaggttggtgaagagcatgtgggattcgtcttggaaaccattactcacaggaagggtgaagtagttgacatgggcccggttcctggcacaactggaagaactcgaatcttcatgacctgtccatctaggggtttggtgggtgttaaaggaattttcagcagctttacacggggaactggatttatgcaccgtgcttttcaggcatatgctaaatacagaggtccactgggcagtgtcagaaaaggagttctgatatctgttggcaagggacttatcacttcacatgcccttatgagtttagaagctcgtgggatcctctttgtatcccctggaatggaggcatatgaagggatgatagttggtgagcactcacgtgacagtgatcttgaggtgaatcctgtgagaactaaagaacttacaaatatccgagcccctggaaaggatgaaaatgtccgtttgtctccaccccgattgatgagtttggaagaggcaattggatatgttgctgcagatgagcttattgaggttactcccaaggtcgtacgtcttcgaaagaagtacttggattccactaagcgtaagatgatgaaaaacaagcctatgaattagaactccagagacaacaaaattacatcaagcactgccagcactactatataagtttatcatgcaagactcttgcagcaagagtgttgctgtctcttgcagcaagagacagcatttatgtataggttggtgttcaatgttgcaacctgagctctttaccagcagcttcacccaggttttacgtgcacacaggattggctgacagaataagcccaccgtagcagctactggaggtaggatcctcgttggttatatctatttagacttttttatggtgaaatttcagacacccacaggttctttgaaggttgtattattctttggaagttcaagaaatgcaggccaatccccataggtattttgtttgaaccggcttctttgttgacaattttatgaccatgtgttattactgattaagtgcaagaaaaaacaaatgaaattggcctccttgctctaggacaattttacgaccatgtgttattactgagatagtgtcggacaccaagaaattggcctccttgctctaagcggtgtgttgcagacttaaccatttcactcagcaat

SEQ ID NO: 32003 - DNA, 2560 bp, Zea Mays
aaaaaaaatataacgcccacaatcccctcttcccagccgcgccgccgccgccgtgaacgagatggcggcagcccttttgctccgcagtctccggccatcggtgagccgggcacatatccaccttctttcccatgcctcctccccgacggcgctggggtctccccttttaccccgcctctactcctctgcggcagcgtcaaccgccgcctctcctgttttcacgcccggcggcgtcatggacccatcccgcatccgcaacgtagcggtgatagcccacgtcgaccatgggaagacgacgctcatggaccggctccttcgacagtgcggggccgatatcccccacgagcgcgccatggattcaatcagccttgagcgcgagcgcggcattaccattgcctccaaggtcacttctgtctcttggaaggaaaatgaactcaacatggttgatacacctggccacgctgattttggtggtgaggttgaacgagttgttggaatggtggaaggagctgtcttggttgttgatgctggagagggacctttagcacaaactaaatttgtgctttcaaaagctttgaagtatggcttgcgtccaattcttctcctcaacaaggttgataggccttcagtttctgaagaaacctgcgatgaagtagagagcttggtttttgatctttttgcaaatcttggtgctacagaagaacagttagatttcccagttctttatgcatccgctaaagagggttgggcttccttaactttcaccaagagcccccctgataatgcaaagaatatgtcttcactgctcgattccattgtacgacatgttccttcaccaaaagctgatcttgaggctccattccaaatgttggtttccatgatggaacgtgatttttatctaggacggatactcactgggagagtaaggtccggagttgtccgtgttggtgacaaagtccatggtcttcgcagtacagatgatggagttcataaaattgaggatggaaaggttgtcaaactcatgaaaaagaaaggcacaaatatggtaacagtagaggctgcaggggctggtgatataatttcaatggcaggattggctgctccagcaattggacatactgtggcaaattcagagatattgagtgctctgcctacaattgagttggatcctcccacaatatctatgacgtttggcgtgaatgattcaccgttggctggccgggatggcactcatctaactggagcaaaaattggtaaccgcctgatggcagaggcagaaacgaatttggctattaatgttctccctggaccattatcagaatcttatgaagttcaaggaagaggagagcttcagttaggaatattaattgaaaatatgcggcgtgagggatttgagctttcagtttcacctccaaaagtgatgtataaaacagagcgtggtgaaaggttggagcctattgaagaagtgactgttgaggttggtgaagagcatgtgggattcgtcttggaaaccattactcacaggaagggtgaagtagttgacatgggcccggttcctggcacaactggaagaactcgaatcttcatgacctgtccatctaggggtttggtgggtgttaaaggaattttcagcagctttacacggggaactggatttatgcaccgtgcttttcaggcatatgctaaatacagaggtccactgggcagtgtcagaaaaggagttctgatatctgttggcaagggacttatcacttcacatgcccttatgagtttagaagctcgtgggatcctctttgtatcccctggaatggaggcatatgaagggatgatagttggtgagcactcacgtgacagtgatcttgagatgagtttggaagaggcaattggatatgttgctgcagatgagcttattgaggttactcccaaggtcgtacgtcttcgaaagaagtacttggattccactaagcgtaagatgatgaaaaacaagcctatgaattagaactccagagacaacaaaattacatcaagcactgccagcactactatataagtttatcatgcaagactcttgcagcaagagtgttgctgtctcttgcagcaagagacagcatttatgtataggttggtgttcaatgttgcaacctgagctctttaccagcagcttcacccaggttttacgtgcacacaggattggctgacagaataagcccaccgtagcagctactggaggtaggatcctcgttggttatatctatttagacttttttatggtgaaatttcagacacccacaggttctttgaaggttgtattattctttggaagttcaagaaatgcaggccaatccccataggtattttgtttgaaccggcttctttgttgacaattttatgaccatgtgttattactgattaagtgcaagaaaaaacaaatgaaattggcctccttgctctaggacaattttacgaccatgtgttattactgagatagtgtcggacaccaagaaattggcctccttgctctaagcggtgtgttgcagacttaaccatttcactcagcaat

SEQ ID NO: 32004 - DNA, 1436 bp, Zea Mays
gttcagcttgtgctgcaaaccaaacactaactggagcaaaaattggtaaccgcctgatggcagaggcagaaacgaatttggctattaatgttctccctggaccattatcagaatcttatgaagttcaaggaagaggagagcttcagttaggaatattaattgaaaatatgcggcgtgagggatttgagctttcagtttcacctccaaaagtgatgtataaaacagagcgtggtgaaaggttggagcctattgaagaagtgactgttgaggttggtgaagagcatgtgggattcgtcttggaaaccattactcacaggaagggtgaagtagttgacatgggcccggttcctggcacaactggaagaactcgaatcttcatgacctgtccatctaggggtttggtgggtgttaaaggaattttcagcagctttacacggggaactggatttatgcaccgtgcttttcaggcatatgctaaatacagaggtccactgggcagtgtcagaaaaggagttctgatatctgttggcaagggacttatcacttcacatgcccttatgagtttagaagctcgtgggatcctctttgtatcccctggaatggaggcatatgaagggatgatagttggtgagcactcacgtgacagtgatcttgaggtgaatcctgtgagaactaaagaacttacaaatatccgagcccctggaaaggatgaaaatgtccgtttgtctccaccccgattgatgagtttggaagaggcaattggatatgttgctgcagatgagcttattgaggttactcccaaggtcgtacgtcttcgaaagaagtacttggattccactaagcgtaagatgatgaaaaacaagcctatgaattagaactccagagacaacaaaattacatcaagcactgccagcactactatataagtttatcatgcaagactcttgcagcaagagtgttgctgtctcttgcagcaagagacagcatttatgtataggttggtgttcaatgttgcaacctgagctctttaccagcagcttcacccaggttttacgtgcacacaggattggctgacagaataagcccaccgtagcagctactggaggtaggatcctcgttggttatatctatttagacttttttatggtgaaatttcagacacccacaggttctttgaaggttgtattattctttggaagttcaagaaatgcaggccaatccccataggtattttgtttgaaccggcttctttgttgacaattttatgaccatgtgttattactgattaagtgcaagaaaaaacaaatgaaattggcctccttgctctaggacaattttacgaccatgtgttattactgagatagtgtcggacaccaagaaattggcctccttgctctaagcggtgtgttgcagacttaaccatttcactcagcaat

SEQ ID NO: 32005 - DNA, 1279 bp, Zea Mays
tttggacatttggtattgtgttgttttaaattttgtgacttgttgttgttcctttagaaactactttgtggctatttcatatccattattatgctattgtgaatttgtgatgatttctagtttatgagctgtaacagctgtttggttgcttggtattttgtaacagctcacagctgtttgtaacatctactaaggcgtcgcctaggcgcccgcctaagtcgcctaggcggtcaggcggtggctgggcgcctagttccgcctagccgccttttaaaccatggtcgaggccaaggcggacaccttgtgcgtcttccgccctggcgtggacacgacatacctcctctacgtcaacggcatcgtcctcacaacctcctcccccgacctcctgcggcgcatcatctcatctctccagcaggagttcaccatgaagacctgggtgagttgcaccacttcctggggatcaccgtcgaccgcagcccctagggcctgttcctccaccagcgccagtacactgtcgacatcctcgagcgcgctggcatggctgactgtaagccctgctcgactccgctggacactcatggcaaggtgtgctttcatatgcacgctccgcgggagccacatctcaccgccatgaagcggatccttaggtacctccaaggcaccaccgacttcggccttcttcgccgatctgcaaccaccaatgtcgccgtctacaacaacgctgattggggtggttgtcccgacacccgttggtccactttcagtttcgccgttttccttggagacaatatcatctcctagtcttcgaagtggcagtccgtcgtctccggctccagcgccgaggccgagtaccgcgccgtggccaatggcgtcgctgaggcggtgtggcttcgttagctgctccaggagctgcacagtccgctgacgcggagcacccttgtctattgtgacaacgtcagcgccatgtacctctccaccaacctcgtctagcatcagcgcacgaagcatgtcgagctcgacctccactttgttcgcgagcgggttgcactcggagatgtgtaggttcttcatgtcccgaccacttctcagttcgccgacattttcaccaagggcttccctacgttggtgtttgaggactttcggtccagtctcaacatgtcccgtggctagagtttcgactgcggggggtgttaaagtaactgtgtattccttataatggggtcttgtgtaatgggcttaggcccagcaactctaatacaaatatatcacccaaaccgag

SEQ ID NO: 32006 - DNA, 2402 bp, Zea Mays
tcaagctcaacatgctcctgataaaaaaaacaagaaacattcacaaaaaataagtgttccttaggaattttaataacctaaatctatatgacttggttacaggccaatctcattcgcggattggtttggctggtaaccaggaaactcttggtcaggaagccattgatgcctacatccgtctgttcaataggctcatgtcacaagttcacattgcggccatggcagtacttttcggctggacaactcctgaagatggagaagcacctcgagatgtgaatattcacatgggagtaattccccctggagatgtaatatgatctgtgcccttaggtcgtttcttctgcctatatatttaaaatggatatgtctaaaattttaatatgggacttaacaagaagtctcgtcgggattcggttagaagtatggtgggagacactctgcctgattttgtatgtcttcaggagactaaaggaagcgctacctaaaaggatgatcatgtccacactgggagcagactttgatgagtttttggttctactggctagttgcactcggggtggtattcttctagcttggaagggatgtacttgtaaagctattgacactagaattgatgagttttcggtttcagtccagtttgaccaagttgatggaaacccgtggtggttcaccggagtgtatggcccacagtctgatgttttgaagatctaattcctgcaggagctccgaaacataaaacattcgtcacgattgttctgacccatgggcagttggggggggattcaacttgatctacaaagcagaagacaaaaataacactaatgtggatagagctatgattggtcgtttccattgcttcctcaacgatcaaatgcttaatgaagtggccctcatgggtgttagagtactgttagggtttcggggttagtccctgtgtaattacctgtataccctaagtgtaatgggcttggcccaactactcggcttatatatatatatatatatgctcacccaacccggttagggtttcccattctccagcttggtaccacagccaaagctagtttctctctcaccgtccatcccccaactgttcctggccgccggccatccctcccaccaccccctgctcgtggacggcgcgcccaccccggatcccgcaccgcgctgacagcccgtccgcgccgcaccgccggcccctctcctcctgcactggtggcccccggccatccctcccaaccccctgctcgtggccggcgcacccaccctgaatcctgcgccgccatcccgcgctcgcaccacgccaccggaccgcgacccgctgactgcgcccacgcccaccagtcgatcgcgcctgctcccggccgccatcctcgtcctcatcaccaggttgttccccgaggaccagcgggtgctggcccacctcgtcttgcactcgttccgctggctgggataccatcacggcgcggccacctgcccaccgtcgggtgcctgtgcttcgtctgctattggcagcttctggtcgcggtgggactgctccccacaacacgactgcatacacgcagtcctcgacgccttcatggagcacctcaacgccactgagtctgcccctcctctcccgcgaccagcttgtctgaggcaccttcatggccttcgatcgcgtcatgagccctgtccttcgtggttgtgtcgaaagccacccccaggccggtcgtcacgtgcccggaccccttgtcttcccccgtacagtgatcgcctccctggcaatcgagcccttgttgtctcccacccctcctagtaaccacgtcagagctcctctggctctttccgcgcaccctgcggtttccccaccatctccctctcccaccaattgggtggtcgactctgaagcctccttccacactactcccacaaatagttcgttattccactcccatccaccacacccctcacatacttcctccatcgtcgtaggaaacagttctaccctctcggtcacctcagtaggtgcatcggttcttccatgaccattctgccttaacgacgtccttattgctcccggtctggctcatccccttctctcggttcgtcgcttcactagtgacaaccactgttctatggagtttgacccctggggactcaccatacgccatcttctcacacatgttgtgatcgctccctctgacagctctggccccctctattctcttcacttgacctccacttcccccaccagagtagcctcatctcctgctcttactactaccaccacatcacatgctcttgctactaccaccacctcctccaccatttggcaccgtcgcctcaggcaccctggacctgacgtgatgtcccagctttccagccgctcagacatatcctatacccggggctcatctgag

SEQ ID NO: 32007 - DNA, 2596 bp, Zea Mays
tcaagctcaacatgctcctgataaaaaaaacaagaaacattcacaaaaaataagtgttccttaggaattttaataacctaaatctatatgacttggttacaggccaatctcattcgcggattggtttggctggtaaccaggaaactcttggtcaggaagccattgatgcctacatccgtctgttcaataggctcatgtcacaagttcacattgcggccatggcagtacttttcggctggacaactcctgaagatggagaagcacctcgagatgtgaatattcacatgggagtaattccccctggagatgtaatatgatctgtgcccttaggtcgtttcttctgcctatatatttaaaatggatatgtctaaaattttaatatgggacttaacaagaagtctcgtcgggattcggttagaagtatggtgggagacactctgcctgattttgtatgtcttcaggagactaaaggaagcgctacctaaaaggatgatcatgtccacactgggagcagactttgatgagtttttggttctactggctagttgcactcggggtggtattcttctagcttggaagggatgtacttgtaaagctattgacactagaattgatgagttttcggtttcagtccagtttgaccaagttgatggaaacccgtggtggttcaccggagtgtatggcccacagtctgatgttttgaagatctaattcctgcaggagctccgaaacataaaacattcgtcacgattgttctgacccatgggcagttggggggggattcaacttgatctacaaagcagaagacaaaaataacactaatgtggatagagctatgattggtcgtttccattgcttcctcaacgatcaaatgcttaatgaagtggccctcatgggtgttagagtactgttagggtttcggggttagtccctgtgtaattacctgtataccctaagtgtaatgggcttggcccaactactcggcttatatatatatatatatatgctcacccaacccggttagggtttcccattctccagcttggtaccacagccaaagctagtttctctctcaccgtccatcccccaactgttcctggccgccggccatccctcccaccaccccctgctcgtggacggcgcgcccaccccggatcccgcaccgcgctgacagcccgtccgcgccgcaccgccggcccctctcctcctgcactggtggcccccggccatccctcccaaccccctgctcgtggccggcgcacccaccctgaatcctgcgccgccatcccgcgctcgcaccacgccaccggaccgcgacccgctgactgcgcccacgcccaccagtcgatcgcgcctgctcccggccgccatcctcgtcctcatcaccaggttgttccccgaggaccagcgggtgctggcccacctcgtcttgcactcgttccgctggctgggataccatcacggcgcggccacctgcccaccgtcgggtgcctgtgcttcgtctgctattggcagcttctggtcgcggtgggactgctccccacaacacgactgcatacacgcagtcctcgacgccttcatggagcacctcaacgccactgagtctgcccctcctctcccgcgaccagcttgtctgaggcaccttcatggccttcgatcgcgtcatgagccctgtccttcgtggttgtgtcgaaagccacccccaggccggtcgtcacgtgcccggaccccttgtcttcccccgtacagtgatcgcctccctggcaatcgagcccttgttgtctcccacccctcctagtaaccaccgcctctgtcatgcttgtcagctaggccgtcactcccgtcttccattttccactttcacgtccagggctgttcaggcctttgatcttgtccattgtgatctctggacttctcttgtcctcagcctctctggctataaatactacctggtcattctggacgactactcacattttctttggactttccccctccggctgaagtccgacacgttcaccaccctcacccacttctttacctgggtctccacccggttccgtctcccggtccgtgccctccagtgtgacaatggcagcgagttcgacaacaacgcctctcgatccttctttctcacccatggcgtccagttgcgtctctcgtgcccttacacctctcctcagaatgcccgggccgaacaaatcattcgcaccaccaccaacatgatccgctgccttctcttccagacgtccctccctgccagctactaggcagaggccctgcacaccgccacacatctcctcaaccgcctcccctcgaaggcggtgagccaccccactccccactttgccctgtacggcacagccccctcctacgaccaccttcgcgtgttcggctgtgcctgctatcccaacacttctgccaccgctccacataagctttcacctcgctccactcgttgcctcttcctcagttactcctctgaccacaaggggtatcgcttctcatttctcgtcacgtcgtttacgacgaagctatgtttccccttgctggctcctccccacccaccgatcttgactccctccttgagtccgat

SEQ ID NO: 32008 - DNA, 2508 bp, Zea Mays
gtgcttgtaattagaatgaacatatcacaaatttgtttcttttgttcatgtaggtagaaaaatcaaaacttgatgagaaaagaaaactaggtgaacaagacatggttcgactgacgcaagaaaaagagaatgcagaaaatacaattgtttcccttcagcaagaaatacagatcttgagtaggatgcatgaacagtaccgtgagagaaaagaaacagaggccaggcagatggaggaacacttgtctattagacttaaggaggctgagcttcttttaacgcaatcaaaaaagaaagctgaagaaattgaatctgcttcccaactgaaatctcaactttggagcaggaaggcaaacattttctggagttttatggataatcaaaaattgtccattaaggacataaggatatcatctcagtctattaagcaagaaatgtttgcccttcaaatgaaatggagggatgaaatatctaacattggacatgatttgaaaggcttggttgatgctgctgacaattatcataaggttcttgctgaaaatcagaagctatttaatgaggtacaggaactaaaaggcaatatcagagtctattgccgtgtcagaccatttcttcctggtcaagatggaaaaacaaccgttattgattatattggtgaaaatggtgatattctcatcacaaatcccttcaagcaagggaaggatgcatgcagaatgttcaagtttaacaaagtttttaatacacgtgcttctcaagttgaagtattctctgatatccagcctctgatcagatcagttcttgatgggtttaatgtgtgcatttttgcctatggtcaaactggttcaggaaagacttacacaatgagtgggccaggcacatcaaaagaagattggggtgttaactatcgagctttaaatgacttgttttatatctctctaagtagaaggaatgctttctcatatgaggtgggagtgcagatggttgagatttacaacgaacaagtgcgggatcttttatcaaatgatattgcacaaaaaagacttggaatttggagtacatctcagcctaacggacttgttgtccctgatgcaagtttacatccagtcaaatcaacattggatgtgctagagttgatggaaattgggcaaacaaatagagcagttggatcgacagctctgaatgaaaggagcagtcgatctcacagcattctaactgtgcatgttagaggggtggatttgaagaatggatctacttccagaggatgtctacatctgattgatcttgctgggagtgaaagagttgagcgatctgaagcaattggagatagattaaaagaagcacagtatattaacaaatccctctctgctctgggtgatgtgatttttgctttggcacagaaaaatgctcatgttccttatcgaaacagcaagctgactcaagttctacagagctctttaggcggacaagcaaagacattgatgtttgttcaaattaatccggatactgaatcatattcagaaacaataagcactttgaagtttgctgaaagggtttctggagttgagttaggtgctgcaagaagtaacaaagagggtttcatatctgaaagacacaatatcacggaaagatatggaaatcgatcaactcctgaaggacaaagccaagtcaccaagttcatcaacagatataaatgacagtagccaacagatccgacgactatcaggggctgctggatcaggcgaggccgaatgcgaagataacatgtctgatgatggctgctcagtggcaggaaccgagtgttctgtaggtggtgcttcagaggcgacagcagaacgaatgcagaaggccccatcaaggataggcaggctgtttctcacaaagaatgggcagcctgcaaattcgaagccaaaaccaagggagtctgccctgaaaccgtcaggtcgcacgacatctacaggaagccaggcgacaggaggaggatcttcagtgaaacccccgaagaggcggtagagaaataaagagcatctggggtttgtcatgttgatggctgatgcaatgcgtgggcgtttgtaaaccgactcggagattgcgctgctgaaacactacggtcaacgggttggtgcgatgcaagggtatgtcactgtaacggtttcacttgtaaacggtctgttgagtatgatggtgagcagccggcttttggtgggaaatgttgttgcgacagcgccgttgcgttttgagttcagccggctctgccgactgccgaagtgccgaggcctcagtcctgggccctgtctgccgaatctggccttggccgctaggcgctagcatcaggcgagaaacgaaaagctcgggatagcttcagatcaaacagcagcttcactctacagaaagcttgacaaaccagcttcgttttaaagaaagtttgccaaacggtaagctgagcttcacgaactctggatttgccgaaacaatagatctaaaacttcataataataataataataataataa

SEQ ID NO: 32009 - DNA, 2504 bp, Zea Mays
atcacaaatttgtttcttttgttcatgtaggtagaaaaatcaaaacttgatgagaaaagaaaactaggtgaacaagacatggttcgactgacgcaagaaaaagagaatgcagaaaatacaattgtttcccttcagcaagaaatacagatcttgagtaggatgcatgaacagtaccgtgagagaaaagaaacagaggccaggcagatggaggaacacttgtctattagacttaaggaggctgagcttcttttaacgcaatcaaaaaagaaagctgaagaaattgaatctgcttcccaactgaaatctcaactttggagcaggaaggcaaacattttctggagttttatggataatcaaaaattgtccattaaggacataaggatatcatctcagtctattaagcaagaaatgtttgcccttcaaatgaaatggagggatgaaatatctaacattggacatgatttgaaaggcttggttgatgctgctgacaattatcataaggttcttgctgaaaatcagaagctatttaatgaggtacaggaactaaaaggcaatatcagagtctattgccgtgtcagaccatttcttcctggtcaagatggaaaaacaaccgttattgattatattggtgaaaatggtgatattctcatcacaaatcccttcaagcaagggaaggatgcatgcagaatgttcaagtttaacaaagtttttaatacacgtgcttctcaagttgaagtattctctgatatccagcctctgatcagatcagttcttgatgggtttaatgtgtgcatttttgcctatggtcaaactggttcaggaaagacttacacaatggcacatcaaaagaagattggggtgttaactatcgagctttaaatgacttgttttatatctctctaagtagaaggaatgctttctcatatgaggtgggagtgcagatggttgagatttacaacgaacaagtgcgggatcttttatcaaatgatattgcacaaaaaagacttggaatttggagtacatctcagcctaacggacttgttgtccctgatgcaagtttacatccagtcaaatcaacattggatgtgctagagttgatggaaattgggcaaacaaatagagcagttggatcgacagctctgaatgaaaggagcagtcgatctcacagcattctaactgtgcatgttagaggggtggatttgaagaatggatctacttccagaggatgtctacatctgattgatcttgctgggagtgaaagagttgagcgatctgaagcaattggagatagattaaaagaagcacagtatattaacaaatccctctctgctctgggtgatgtgatttttgctttggcacagaaaaatgctcatgttccttatcgaaacagcaagctgactcaagttctacagagctctttaggcggacaagcaaagacattgatgtttgttcaaattaatccggatactgaatcatattcagaaacaataagcactttgaagtttgctgaaagggtttctggagttgagttaggtgctgcaagaagtaacaaagagggtaaagatataaaagagctgctagaacaggtttcatatctgaaagacacaatatcacggaaagatatggaaatcgatcaactcctgaaggacaaagccaagtcaccaagttcatcaacagatataaatgacagtagccaacagatccgacgactatcaggggctgctggatcaggcgaggccgaatgcgaagataacatgtctgatgatggctgctcagtggcaggaaccgagtgttctgtaggtggtgcttcagaggcgacagcagaacgaatgcagaaggccccatcaaggataggcaggctgtttctcacaaagaatgggcagcctgcaaattcgaagccaaaaccaagggagtctgccctgaaaccgtcaggtcgcacgacatctacaggaagccaggcgacaggaggaggatcttcagtgaaacccccgaagaggcggtagagaaataaagagcatctggggtttgtcatgttgatggctgatgcaatgcgtgggcgtttgtaaaccgactcggagattgcgctgctgaaacactacggtcaacgggttggtgcgatgcaagggtatgtcactgtaacggtttcacttgtaaacggtctgttgagtatgatggtgagcagccggcttttggtgggaaatgttgttgcgacagcgccgttgcgttttgagttcagccggctctgccgactgccgaagtgccgaggcctcagtcctgggccctgtctgccgaatctggccttggccgctaggcgctagcatcaggcgagaaacgaaaagctcgggatagcttcagatcaaacagcagcttcactctacagaaagcttgacaaaccagcttcgttttaaagaaagtttgccaaacggtaagctgagcttcacgaactctggatttgccgaaacaatagatctaaaacttcataataataataataataataataa

SEQ ID NO: 32010 - DNA, 2473 bp, Zea Mays
tgtaggtagaaaaatcaaaacttgatgagaaaagaaaactaggtgaacaagacatggttcgactgacgcaagaaaaagagaatgcagaaaatacaattgtttcccttcagcaagaaatacagatcttgagtaggatgcatgaacagtaccgtgagagaaaagaaacagaggccaggcagatggaggaacacttgtctattagacttaaggaggctgagcttcttttaacgcaatcaaaaaagaaagctgaagaaattgaatctgcttcccaactgaaatctcaactttggagcaggaaggcaaacattttctggagttttatggataatcaaaaattgtccattaaggacataaggatatcatctcagtctattaagcaagaaatgtttgcccttcaaatgaaatggagggatgaaatatctaacattggacatgatttgaaaggcttggttgatgctgctgacaattatcataaggttcttgctgaaaatcagaagctatttaatgaggcaatatcagagtctattgccgtgtcagaccatttcttcctggtcaagatggaaaaacaaccgttattgattatattggtgaaaatggtgatattctcatcacaaatcccttcaagcaagggaaggatgcatgcagaatgttcaagtttaacaaagtttttaatacacgtgcttctcaagttgaagtattctctgatatccagcctctgatcagatcagttcttgatgggtttaatgtgtgcatttttgcctatggtcaaactggttcaggaaagacttacacaatgagtgggccaggcacatcaaaagaagattggggtgttaactatcgagctttaaatgacttgttttatatctctctaagtagaaggaatgctttctcatatgaggtgggagtgcagatggttgagatttacaacgaacaagtgcgggatcttttatcaaatgatattgcacaaaaaagacttggaatttggagtacatctcagcctaacggacttgttgtccctgatgcaagtttacatccagtcaaatcaacattggatgtgctagagttgatggaaattgggcaaacaaatagagcagttggatcgacagctctgaatgaaaggagcagtcgatctcacagcattctaactgtgcatgttagaggggtggatttgaagaatggatctacttccagaggatgtctacatctgattgatcttgctgggagtgaaagagttgagcgatctgaagcaattggagatagattaaaagaagcacagtatattaacaaatccctctctgctctgggtgatgtgatttttgctttggcacagaaaaatgctcatgttccttatcgaaacagcaagctgactcaagttctacagagctctttaggcggacaagcaaagacattgatgtttgttcaaattaatccggatactgaatcatattcagaaacaataagcactttgaagtttgctgaaagggtttctggagttgagttaggtgctgcaagaagtaacaaagagggtaaagatataaaagagctgctagaacaggtttcatatctgaaagacacaatatcacggaaagatatggaaatcgatcaactcctgaaggacaaagccaagtcaccaagttcatcaacagatataaatgacagtagccaacagatccgacgactatcaggggctgctggatcaggcgaggccgaatgcgaagataacatgtctgatgatggctgctcagtggcaggaaccgagtgttctgtaggtggtgcttcagaggcgacagcagaacgaatgcagaaggccccatcaaggataggcaggctgtttctcacaaagaatgggcagcctgcaaattcgaagccaaaaccaagggagtctgccctgaaaccgtcaggtcgcacgacatctacaggaagccaggcgacaggaggaggatcttcagtgaaacccccgaagaggcggtagagaaataaagagcatctggggtttgtcatgttgatggctgatgcaatgcgtgggcgtttgtaaaccgactcggagattgcgctgctgaaacactacggtcaacgggttggtgcgatgcaagggtatgtcactgtaacggtttcacttgtaaacggtctgttgagtatgatggtgagcagccggcttttggtgggaaatgttgttgcgacagcgccgttgcgttttgagttcagccggctctgccgactgccgaagtgccgaggcctcagtcctgggccctgtctgccgaatctggccttggccgctaggcgctagcatcaggcgagaaacgaaaagctcgggatagcttcagatcaaacagcagcttcactctacagaaagcttgacaaaccagcttcgttttaaagaaagtttgccaaacggtaagctgagcttcacgaactctggatttgccgaaacaatagatctaaaacttcataataataataataataataataa

SEQ ID NO: 32011 - DNA, 2406 bp, Zea Mays
gtaggtagaaaaatcaaaacttgatgagaaaagaaaactaggtgaacaagacatggttcgactgacgcaagaaaaagagaatgcagaaaatacaattgtttcccttcagcaagaaatacagatcttgagtaggatgcatgaacagtaccgtgagagaaaagaaacagaggccaggcagatggaggaacacttgtctattagacttaaggaggctgagcttcttttaacgcaatcaaaaaagaaagctgaagaaattgaatctgcttcccaactgaaatctcaactttggagcaggaaggcaaacattttctggagttttatggataatcaaaaattgtccattaaggacatgatttgaaaggcttggttgatgctgctgacaattatcataaggttcttgctgaaaatcagaagctatttaatgaggtacaggaactaaaaggcaatatcagagtctattgccgtgtcagaccatttcttcctggtcaagatggaaaaacaaccgttattgattatattggtgaaaatggtgatattctcatcacaaatcccttcaagcaagggaaggatgcatgcagaatgttcaagtttaacaaagtttttaatacacgtgcttctcaagttgaagtattctctgatatccagcctctgatcagatcagttcttgatgggtttaatgtgtgcatttttgcctatggtcaaactggttcaggaaagacttacacaatgagtgggccaggcacatcaaaagaagattggggtgttaactatcgagctttaaatgacttgttttatatctctctaagtagaaggaatgctttctcatatgaggtgggagtgcagatggttgagatttacaacgaacaagtgcgggatcttttatcaaatgatattgcacaaaaaagacttggaatttggagtacatctcagcctaacggacttgttgtccctgatgcaagtttacatccagtcaaatcaacattggatgtgctagagttgatggaaattgggcaaacaaatagagcagttggatcgacagctctgaatgaaaggagcagtcgatctcacagcattctaactgtgcatgttagaggggtggatttgaagaatggatctacttccagaggatgtctacatctgattgatcttgctgggagtgaaagagttgagcgatctgaagcaattggagatagattaaaagaagcacagtatattaacaaatccctctctgctctgggtgatgtgatttttgctttggcacagaaaaatgctcatgttccttatcgaaacagcaagctgactcaagttctacagagctctttaggcggacaagcaaagacattgatgtttgttcaaattaatccggatactgaatcatattcagaaacaataagcactttgaagtttgctgaaagggtttctggagttgagttaggtgctgcaagaagtaacaaagagggtaaagatataaaagagctgctagaacaggtttcatatctgaaagacacaatatcacggaaagatatggaaatcgatcaactcctgaaggacaaagccaagtcaccaagttcatcaacagatataaatgacagtagccaacagatccgacgactatcaggggctgctggatcaggcgaggccgaatgcgaagataacatgtctgatgatggctgctcagtggcaggaaccgagtgttctgtaggtggtgcttcagaggcgacagcagaacgaatgcagaaggccccatcaaggataggcaggctgtttctcacaaagaatgggcagcctgcaaattcgaagccaaaaccaagggagtctgccctgaaaccgtcaggtcgcacgacatctacaggaagccaggcgacaggaggaggatcttcagtgaaacccccgaagaggcggtagagaaataaagagcatctggggtttgtcatgttgatggctgatgcaatgcgtgggcgtttgtaaaccgactcggagattgcgctgctgaaacactacggtcaacgggttggtgcgatgcaagggtatgtcactgtaacggtttcacttgtaaacggtctgttgagtatgatggtgagcagccggcttttggtgggaaatgttgttgcgacagcgccgttgcgttttgagttcagccggctctgccgactgccgaagtgccgaggcctcagtcctgggccctgtctgccgaatctggccttggccgctaggcgctagcatcaggcgagaaacgaaaagctcgggatagcttcagatcaaacagcagcttcactctacagaaagcttgacaaaccagcttcgttttaaagaaagtttgccaaacggtaagctgagcttcacgaactctggatttgccgaaacaatagatctaaaacttcataataataataataataataataa

SEQ ID NO: 32012 - DNA, 2473 bp, Zea Mays
gtaggtagaaaaatcaaaacttgatgagaaaagaaaactaggtgaacaagacatggttcgactgacgcaagaaaaagagaatgcagaaaatacaattgtttcccttcagcaagaaatacagatcttgagtaggatgcatgaacagtaccgtgagagaaaagaaacagaggccaggcagatggaggaacacttgtctattagacttaaggaggctgagcttcttttaacgcaatcaaaaaagaaagctgaagaaattgaatctgcttcccaactgaaatctcaactttggagcaggaaggcaaacattttctggagttttatggataatcaaaaattgtccattaaggacataaggatatcatctcagtctattaagcaagaaatgtttgcccttcaaatgaaatggagggatgaaatatctaacattggacatgatttgaaaggcttggttgatgctgctgacaattatcataaggttcttgctgaaaatcagaagctatttaatgaggtacaggaactaaaaggcaatatcagagtctattgccgtgtcagaccatttcttcctggtcaagatggaaaaacaaccgttattgattatattggtgaaaatggtgatattctcatcacaaatcccttcaagcaagggaaggatgcatgcagaatgttcaagtttaacaaagtttttaatacacgtgcttctcaagttgaagtattctctgatatccagcctctgatcagatcagttcttgatgggtttaatgtgtgcatttttgcctatggtcaaactggttcaggaaagacttacacaatgagtgggccaggcacatcaaaagaagattggggtgttaactatcgagctttaaatgacttgttttatatctctctaagtagaaggaatgctttctcatatgaggtgggagtgcagatggttgagatttacaacgaacaagtgcgggatcttttatcaaatgatattgcacaaaaaagacttggaatttggagtacatctcagcctaacggacttgttgtccctgatgcaagtttacatccagtcaaatcaacattggatgtgctagagttgatggaaattgggcaaacaaatagagcagttggatcgacagctctgaatgaaaggagcagtcgatctcacagcattctaactgtgcatgttagaggggtggatttgaagaatggatctacttccagaggatgtctacatctgattgatcttgctgggagtgaaagagttgagcgatctgaagcaattggagatagattaaaagaagcacagtatattaacaaatccctctctgctctgggtgatgtgatttttgctttggcacagaaaaatgctcatgttccttatcgaaacagcaagctgactcaagttctacagagctctttaggcggacaagcaaagacattgatgtttgttcaaattaatccggatactgaatcatattcagaaacaataagcactttgaagtttgctgaaagggtttctggagttgagttaggtgctgcaagaagtaacaaagagggtaaagatataaaagagctgctagaacaggtttcatatctgaaagacacaatatcacggaaagatatggaaatcgatcaactcctgaaggacaaagccaagtcaccaagttcatcaacagatataaatgacagtagccaacagatccgacgactatcaggcgaggccgaatgcgaagataacatgtctgatgatggctgctcagtggcaggaaccgagtgttctgtaggtggtgcttcagaggcgacagcagaacgaatgcagaaggccccatcaaggataggcaggctgtttctcacaaagaatgggcagcctgcaaattcgaagccaaaaccaagggagtctgccctgaaaccgtcaggtcgcacgacatctacaggaagccaggcgacaggaggaggatcttcagtgaaacccccgaagaggcggtagagaaataaagagcatctggggtttgtcatgttgatggctgatgcaatgcgtgggcgtttgtaaaccgactcggagattgcgctgctgaaacactacggtcaacgggttggtgcgatgcaagggtatgtcactgtaacggtttcacttgtaaacggtctgttgagtatgatggtgagcagccggcttttggtgggaaatgttgttgcgacagcgccgttgcgttttgagttcagccggctctgccgactgccgaagtgccgaggcctcagtcctgggccctgtctgccgaatctggccttggccgctaggcgctagcatcaggcgagaaacgaaaagctcgggatagcttcagatcaaacagcagcttcactctacagaaagcttgacaaaccagcttcgttttaaagaaagtttgccaaacggtaagctgagcttcacgaactctggatttgccgaaacaatagatctaaaacttcataataataataataataataataa

SEQ ID NO: 32013 - DNA, 2492 bp, Zea Mays
gtaggtagaaaaatcaaaacttgatgagaaaagaaaactaggtgaacaagacatggttcgactgacgcaagaaaaagagaatgcagaaaatacaattgtttcccttcagcaagaaatacagatcttgagtaggatgcatgaacagtaccgtgagagaaaagaaacagaggccaggcagatggaggaacacttgtctattagacttaaggaggctgagcttcttttaacgcaatcaaaaaagaaagctgaagaaattgaatctgcttcccaactgaaatctcaactttggagcaggaaggcaaacattttctggagttttatggataatcaaaaattgtccattaaggacataaggatatcatctcagtctattaagcaagaaatgtttgcccttcaaatgaaatggagggatgaaatatctaacattggtgtgacatgatttgaaaggcttggttgatgctgctgacaattatcataaggttcttgctgaaaatcagaagctatttaatgaggtacaggaactaaaaggcaatatcagagtctattgccgtgtcagaccatttcttcctggtcaagatggaaaaacaaccgttattgattatattggtgaaaatggtgatattctcatcacaaatcccttcaagcaagggaaggatgcatgcagaatgttcaagtttaacaaagtttttaatacacgtgcttctcaagttgaagtattctctgatatccagcctctgatcagatcagttcttgatgggtttaatgtgtgcatttttgcctatggtcaaactggttcaggaaagacttacacaatgagtgggccaggcacatcaaaagaagattggggtgttaactatcgagctttaaatgacttgttttatatctctctaagtagaaggaatgctttctcatatgaggtgggagtgcagatggttgagatttacaacgaacaagtgcgggatcttttatcaaatgatattgcacaaaaaagacttggaatttggagtacatctcagcctaacggacttgttgtccctgatgcaagtttacatccagtcaaatcaacattggatgtgctagagttgatggaaattgggcaaacaaatagagcagttggatcgacagctctgaatgaaaggagcagtcgatctcacagcattctaactgtgcatgttagaggggtggatttgaagaatggatctacttccagaggatgtctacatctgattgatcttgctgggagtgaaagagttgagcgatctgaagcaattggagatagattaaaagaagcacagtatattaacaaatccctctctgctctgggtgatgtgatttttgctttggcacagaaaaatgctcatgttccttatcgaaacagcaagctgactcaagttctacagagctctttaggcggacaagcaaagacattgatgtttgttcaaattaatccggatactgaatcatattcagaaacaataagcactttgaagtttgctgaaagggtttctggagttgagttaggtgctgcaagaagtaacaaagagggtaaagatataaaagagctgctagaacaggtttcatatctgaaagacacaatatcacggaaagatatggaaatcgatcaactcctgaaggacaaagccaagtcaccaagttcatcaacagatataaatgacagtagccaacagatccgacgactatcaggggctgctggatcaggcgaggccgaatgcgaagataacatgtctgatgatggctgctcagtggcaggaaccgagtgttctgtaggtggtgcttcagaggcgacagcagaacgaatgcagaaggccccatcaaggataggcaggctgtttctcacaaagaatgggcagcctgcaaattcgaagccaaaaccaagggagtctgccctgaaaccgtcaggtcgcacgacatctacaggaagccaggcgacaggaggaggatcttcagtgaaacccccgaagaggcggtagagaaataaagagcatctggggtttgtcatgttgatggctgatgcaatgcgtgggcgtttgtaaaccgactcggagattgcgctgctgaaacactacggtcaacgggttggtgcgatgcaagggtatgtcactgtaacggtttcacttgtaaacggtctgttgagtatgatggtgagcagccggcttttggtgggaaatgttgttgcgacagcgccgttgcgttttgagttcagccggctctgccgactgccgaagtgccgaggcctcagtcctgggccctgtctgccgaatctggccttggccgctaggcgctagcatcaggcgagaaacgaaaagctcgggatagcttcagatcaaacagcagcttcactctacagaaagcttgacaaaccagcttcgttttaaagaaagtttgccaaacggtaagctgagcttcacgaactctggatttgccgaaacaatagatctaaaacttcataataataataataataataataa

SEQ ID NO: 32014 - DNA, 2376 bp, Zea Mays
taggtagaaaaatcaaaacttgatgagaaaagaaaactaggtgaacaagacatggttcgactgacgcaagaaaaagagaatgcagaaaatacaattgtttcccttcagcaagaaatacagatcttgagtaggatgcatgaacagtaccgtgagagaaaagaaacagaggccaggcagatggaggaacacttgtctattagacttaaggaggctgagcttcttttaacgcaatcaaaaaagaaagctgaagaaattgaatctgcttcccaactgaaatctcaactttggagcaggaaggcaaacattttctggagttttatggataatcaaaaattgtccattaaggacatgatttgaaaggcttggttgatgctgctgacaattatcataaggttcttgctgaaaatcagaagctatttaatgaggtacaggaactaaaaggcaatatcagagtctattgccgtgtcagaccatttcttcctggtcaagatggaaaaacaaccgttattgattatattggtgaaaatggtgatattctcatcacaaatcccttcaagcaagggaaggatgcatgcagaatgttcaagtttaacaaagtttttaatacacgtgcttctcaagttgaagtattctctgatatccagcctctgatcagatcagttcttgatgggtttaatgtgtgcatttttgcctatggtcaaactggttcaggaaagacttacacaatgagtgggccaggcacatcaaaagaagattggggtgttaactatcgagctttaaatgacttgttttatatctctctaagtagaaggaatgctttctcatatgaggtgggagtgcagatggttgagatttacaacgaacaagtgcgggatcttttatcaaatgatattgcacaaaaaagacttggaatttggagtacatctcagcctaacggacttgttgtccctgatgcaagtttacatccagtcaaatcaacattggatgtgctagagttgatggaaattgggcaaacaaatagagcagttggatcgacagctctgaatgaaaggagcagtcgatctcacagcattctaactgtgcatgttagaggggtggatttgaagaatggatctacttccagaggatgtctacatctgattgatcttgctgggagtgaaagagttgagcgatctgaagcaattggagatagattaaaagaagcacagtatattaacaaatccctctctgctctgggtgatgtgatttttgctttggcacagaaaaatgctcatgttccttatcgaaacagcaagctgactcaagttctacagagctctttaggcggacaagcaaagacattgatgtttgttcaaattaatccggatactgaatcatattcagaaacaataagcactttgaagtttgctgaaagggtttctggagttgagttaggtgctgcaagaagtaacaaagagggtttcatatctgaaagacacaatatcacggaaagatatggaaatcgatcaactcctgaaggacaaagccaagtcaccaagttcatcaacagatataaatgacagtagccaacagatccgacgactatcaggggctgctggatcaggcgaggccgaatgcgaagataacatgtctgatgatggctgctcagtggcaggaaccgagtgttctgtaggtggtgcttcagaggcgacagcagaacgaatgcagaaggccccatcaaggataggcaggctgtttctcacaaagaatgggcagcctgcaaattcgaagccaaaaccaagggagtctgccctgaaaccgtcaggtcgcacgacatctacaggaagccaggcgacaggaggaggatcttcagtgaaacccccgaagaggcggtagagaaataaagagcatctggggtttgtcatgttgatggctgatgcaatgcgtgggcgtttgtaaaccgactcggagattgcgctgctgaaacactacggtcaacgggttggtgcgatgcaagggtatgtcactgtaacggtttcacttgtaaacggtctgttgagtatgatggtgagcagccggcttttggtgggaaatgttgttgcgacagcgccgttgcgttttgagttcagccggctctgccgactgccgaagtgccgaggcctcagtcctgggccctgtctgccgaatctggccttggccgctaggcgctagcatcaggcgagaaacgaaaagctcgggatagcttcagatcaaacagcagcttcactctacagaaagcttgacaaaccagcttcgttttaaagaaagtttgccaaacggtaagctgagcttcacgaactctggatttgccgaaacaatagatctaaaacttcataataataataataataataataa

SEQ ID NO: 32015 - DNA, 2543 bp, Zea Mays
aggtagaaaaatcaaaacttgatgagaaaagaaaactaggtgaacaagacatggttcgactgacgcaagaaaaagagaatgcagaaaatacaattgtttcccttcagcaagaaatacagatcttgagtaggatgcatgaacagtaccgtgagagaaaagaaacagaggccaggcagatggaggaacacttgtctattagacttaaggaggctgagcttcttttaacgcaatcaaaaaagaaagctgaagaaattgaatctgcttcccaactgaaatctcaactttggagcaggaaggcaaacattttctggagttttatggataatcaaaaattgtccattaaggacataaggatatcatctcagtctattaagcaagaaatgtttgcccttcaaatgaaatggagggatgaaatatctaacattggacatgatttgaaaggcttggttgatgctgctgacaattatcataaggttcttgctgaaaatcagaagctatttaatgaggtacaggaactaaaaggcaatatcagagtctattgccgtgtcagaccatttcttcctggtcaagatggaaaaacaaccgttattgattatattggtgaaaatggtgatattctcatcacaaatcccttcaagcaagggaaggatgcatgcagaatgttcaagtttaacaaagtttttaatacacgtgcttctcaagttgaagtattctctgatatccagcctctgatcagatcagttcttgatgggtttaatgtgtgcatttttgcctatggtcaaactggttcaggaaagacttacacaatgagtgggccaggcacatcaaaagaagattggggtgttaactatcgagctttaaatgacttgttttatatctctctaagtagaaggaatgctttctcatatgaggtgggagtgcagatggttgagatttacaacgaacaagtgcgggatcttttatcaaatgatattgcacaaaaaagacttggaatttggagtacatctcagcctaacggacttgttgtccctgatgcaagtttacatccagtcaaatcaacattggatgtgctagagttgatggaaattgggcaaacaaatagagcagttggatcgacagctctgaatgaaaggagcagtcgatctcacagcattctaactgtgcatgttagaggggtggatttgaagaatggatctacttccagaggatgtctacatctgattgatcttgctgggagtgaaagagttgagcgatctgaagcaattggagatagattaaaagaagcacagtatattaacaaatccctctctgctctgggtgatgtgatttttgctttggcacagaaaaatgctcatgttccttatcgaaacagcaagctgactcaagttctacagagctctttaggcggacaagcaaagacattgatgtttgttcaaattaatccggatactgaatcatattcagaaacaataagcactttgaagtttgctgaaagggtttctggagttgagttaggtgctgcaagaagtaacaaagagggtaaagatataaaagagctgctagaacaggtttcatatctgaaagacacaatatcacggaaagatatggaaatcgatcaactcctgaaggacaaagccaagtcaccaagttcatcaacagatataaatgacagtagccaacagatccgacgactatcaggggctgctggatcaggcgaggccgaatgcgaagataacatgtctgatgatggctgctcagtggcaggaaccgagtgttctgtaggtggtgcttcagaggcgacagcagaacgaatgcagaaggccccatcaaggataggcaggctgtttctcacaaagaatgggcagcctgcaaattcgaagccaaaaccaagggagtctgccctgaaaccgtcaggtacattggaaacgtgaaccactttgcatgctacatggtagtaggcattgctgcccggtcgcacgacatctacaggaagccaggcgacaggaggaggatcttcagtgaaacccccgaagaggcggtagagaaataaagagcatctggggtttgtcatgttgatggctgatgcaatgcgtgggcgtttgtaaaccgactcggagattgcgctgctgaaacactacggtcaacgggttggtgcgatgcaagggtatgtcactgtaacggtttcacttgtaaacggtctgttgagtatgatggtgagcagccggcttttggtgggaaatgttgttgcgacagcgccgttgcgttttgagttcagccggctctgccgactgccgaagtgccgaggcctcagtcctgggccctgtctgccgaatctggccttggccgctaggcgctagcatcaggcgagaaacgaaaagctcgggatagcttcagatcaaacagcagcttcactctacagaaagcttgacaaaccagcttcgttttaaagaaagtttgccaaacggtaagctgagcttcacgaactctggatttgccgaaacaatagatctaaaacttcataataataataataataataataa

SEQ ID NO: 32016 - DNA, 2386 bp, Zea Mays
aggtagaaaaatcaaaacttgatgagaaaagaaaactaggtgaacaagacatggttcgactgacgcaagaaaaagagaatgcagaaaatacaattgtttcccttcagcaagaaatacagatcttgagtaggatgcatgaacagtaccgtgagagaaaagaaacagaggccaggcagatggaggaacacttgtctattagacttaaggaggctgagcttcttttaacgcaatcaaaaaagaaagctgaagaaattgaatctgcttcccaactgaaatctcaactttggagcaggaaggcaaacattttctggagttttatggataatcaaaaattgtccattaaggacatgatttgaaaggcttggttgatgctgctgacaattatcataaggttcttgctgaaaatcagaagctatttaatgaggtacaggaactaaaaggcaatatcagagtctattgccgtgtcagaccatttcttcctggtcaagatggaaaaacaaccgttattgattatattggtgaaaatggtgatattctcatcacaaatcccttcaagcaagggaaggatgcatgcagaatgttcaagtttaacaaagtttttaatacacgtgcttctcaagttgaagtattctctgatatccagcctctgatcagatcagttcttgatgggtttaatgtgtgcatttttgcctatggtcaaactggttcaggaaagacttacacaatgagtgggccaggcacatcaaaagaagattggggtgttaactatcgagctttaaatgacttgttttatatctctctaagtagaaggaatgctttctcatatgaggtgggagtgcagatggttgagatttacaacgaacaagtgcgggatcttttatcaaatgatattgcacaaaaaagatctcagcctaacggacttgttgtccctgatgcaagtttacatccagtcaaatcaacattggatgtgctagagttgatggaaattgggcaaacaaatagagcagttggatcgacagctctgaatgaaaggagcagtcgatctcacagcattctaactgtgcatgttagaggggtggatttgaagaatggatctacttccagaggatgtctacatctgattgatcttgctgggagtgaaagagttgagcgatctgaagcaattggagatagattaaaagaagcacagtatattaacaaatccctctctgctctgggtgatgtgatttttgctttggcacagaaaaatgctcatgttccttatcgaaacagcaagctgactcaagttctacagagctctttaggcggacaagcaaagacattgatgtttgttcaaattaatccggatactgaatcatattcagaaacaataagcactttgaagtttgctgaaagggtttctggagttgagttaggtgctgcaagaagtaacaaagagggtaaagatataaaagagctgctagaacaggtttcatatctgaaagacacaatatcacggaaagatatggaaatcgatcaactcctgaaggacaaagccaagtcaccaagttcatcaacagatataaatgacagtagccaacagatccgacgactatcaggggctgctggatcaggcgaggccgaatgcgaagataacatgtctgatgatggctgctcagtggcaggaaccgagtgttctgtaggtggtgcttcagaggcgacagcagaacgaatgcagaaggccccatcaaggataggcaggctgtttctcacaaagaatgggcagcctgcaaattcgaagccaaaaccaagggagtctgccctgaaaccgtcaggtcgcacgacatctacaggaagccaggcgacaggaggaggatcttcagtgaaacccccgaagaggcggtagagaaataaagagcatctggggtttgtcatgttgatggctgatgcaatgcgtgggcgtttgtaaaccgactcggagattgcgctgctgaaacactacggtcaacgggttggtgcgatgcaagggtatgtcactgtaacggtttcacttgtaaacggtctgttgagtatgatggtgagcagccggcttttggtgggaaatgttgttgcgacagcgccgttgcgttttgagttcagccggctctgccgactgccgaagtgccgaggcctcagtcctgggccctgtctgccgaatctggccttggccgctaggcgctagcatcaggcgagaaacgaaaagctcgggatagcttcagatcaaacagcagcttcactctacagaaagcttgacaaaccagcttcgttttaaagaaagtttgccaaacggtaagctgagcttcacgaactctggatttgccgaaacaatagatctaaaacttcataataataataataataataataa

SEQ ID NO: 32017 - DNA, 2485 bp, Zea Mays
aggtagaaaaatcaaaacttgatgagaaaagaaaactaggtgaacaagacatggttcgactgacgcaagaaaaagagaatgcagaaaatacaattgtttcccttcagcaagaaatacagatcttgagtaggatgcatgaacagtaccgtgagagaaaagaaacagaggccaggcagatggaggaacacttgtctattagacttaaggaggctgagcttcttttaacgcaatcaaaaaagaaagctgaagaaattgaatctgcttcccaactgaaatctcaactttggagcaggaaggcaaacattttctggagttttatggataatcaaaaattgtccattaaggacataaggatatcatctcagtctattaagcaagaaatgtttgcccttcaaatgaaatggagggatgaaatatctaacattggacatgatttgaaaggcttggttgatgctgctgacaattatcataaggttcttgctgaaaatcagaagctatttaatgaggtacaggaactaaaaggcaatatcagagtctattgccgtgtcagaccatttcttcctggtcaagatggaaaaacaaccgttattgattatattggtgaaaatggtgatattctcatcacaaatcccttcaagcaagggaaggatgcatgcagaatgttcaagtttaacaaagtttttaatacacgtgcttctcaagttgaagtattctctgatatccagcctctgatcagatcagttcttgatgggtttaatgtgtgcatttttgcctatggtcaaactggttcaggaaagacttacacaatggtgggccaggcacatcaaaagaagattggggtgttaactatcgagctttaaatgacttgttttatatctctctaagtagaaggaatgctttctcatatgaggtgggagtgcagatggttgagatttacaacgaacaagtgcgggatcttttatcaaatgatattgcacaaaaaagacttggaatttggagtacatctcagcctaacggacttgttgtccctgatgcaagtttacatccagtcaaatcaacattggatgtgctagagttgatggaaattgggcaaacaaatagagcagttggatcgacagctctgaatgaaaggagcagtcgatctcacagcattctaactgtgcatgttagaggggtggatttgaagaatggatctacttccagaggatgtctacatctgattgatcttgctgggagtgaaagagttgagcgatctgaagcaattggagatagattaaaagaagcacagtatattaacaaatccctctctgctctgggtgatgtgatttttgctttggcacagaaaaatgctcatgttccttatcgaaacagcaagctgactcaagttctacagagctctttaggcggacaagcaaagacattgatgtttgttcaaattaatccggatactgaatcatattcagaaacaataagcactttgaagtttgctgaaagggtttctggagttgagttaggtgctgcaagaagtaacaaagagggtaaagatataaaagagctgctagaacaggtttcatatctgaaagacacaatatcacggaaagatatggaaatcgatcaactcctgaaggacaaagccaagtcaccaagttcatcaacagatataaatgacagtagccaacagatccgacgactatcaggggctgctggatcaggcgaggccgaatgcgaagataacatgtctgatgatggctgctcagtggcaggaaccgagtgttctgtaggtggtgcttcagaggcgacagcagaacgaatgcagaaggccccatcaaggataggcaggctgtttctcacaaagaatgggcagcctgcaaattcgaagccaaaaccaagggagtctgccctgaaaccgtcaggtcgcacgacatctacaggaagccaggcgacaggaggaggatcttcagtgaaacccccgaagaggcggtagagaaataaagagcatctggggtttgtcatgttgatggctgatgcaatgcgtgggcgtttgtaaaccgactcggagattgcgctgctgaaacactacggtcaacgggttggtgcgatgcaagggtatgtcactgtaacggtttcacttgtaaacggtctgttgagtatgatggtgagcagccggcttttggtgggaaatgttgttgcgacagcgccgttgcgttttgagttcagccggctctgccgactgccgaagtgccgaggcctcagtcctgggccctgtctgccgaatctggccttggccgctaggcgctagcatcaggcgagaaacgaaaagctcgggatagcttcagatcaaacagcagcttcactctacagaaagcttgacaaaccagcttcgttttaaagaaagtttgccaaacggtaagctgagcttcacgaactctggatttgccgaaacaatagatctaaaacttcataataataataataataataataa

SEQ ID NO: 32018 - DNA, 2557 bp, Zea Mays
aggtagaaaaatcaaaacttgatgagaaaagaaaactaggtgaacaagacatggttcgactgacgcaagaaaaagagaatgcagaaaatacaattgtttcccttcagcaagaaatacagatcttgagtaggatgcatgaacagtaccgtgagagaaaagaaacagaggccaggcagatggaggaacacttgtctattagacttaaggaggctgagcttcttttaacgcaatcaaaaaagaaagctgaagaaattgaatctgcttcccaactgaaatctcaactttggagcaggaaggcaaacattttctggagttttatggataatcaaaaattgtccattaaggacataaggatatcatctcagtctattaagcaagaaatgtttgcccttcaaatgaaatggagggatgaaatatctaacattggacatgatttgaaaggcttggttgatgctgctgacaattatcataaggttcttgctgaaaatcagaagctatttaatgaggtacaggaactaaaaggcaatatcagagtctattgccgtgtcagaccatttcttcctggtcaagatggaaaaacaaccgttattgattatattggtgaaaatggtgatattctcatcacaaatcccttcaagcaagggaaggatgcatgcagaatgttcaagtttaacaaagtttttaatacacgtgcttctcaagttgaagtattctctgatatccagcctctgatcagatcagttcttgatgggtttaatgtgtgcatttttgcctatggtcaaactggttcaggaaagacttacacaatgagtgggccaggcacatcaaaagaagattggggtgttaactatcgagctttaaatgacttgttttatatctctctaagtagaaggaatgctttctcatatgaggtgggagtgcagatggttgagatttacaacgaacaagtgcgggatcttttatcaaatgatattgcacaaaaaagacttggaatttggagtacatctcagcctaacggacttgttgtccctgatgcaagtttacatccagtcaaatcaacattggatgtgctagagttgatggaaattgggcaaacaaatagagcagttggatcgacagctctgaatgaaaggagcagtcgatctcacagcattctaactgtgcatgttagaggggtggatttgaagaatggatctacttccagaggatgtctacatctgattgatcttgctgggagtgaaagagttgagcgatctgaagcaattggagatagattaaaagaagcacagtatattaacaaatccctctctgctctgggtgatgtgatttttgctttggcacagaaaaatgctcatgttccttatcgaaacagcaagctgactcaagttctacagagctctttaggcggacaagcaaagacattgatgtttgttcaaattaatccggatactgaatcatattcagaaacaataagcactttgaagtttgctgaaagggtttctggagttgagttaggtgctgcaagaagtaacaaagagggtaaagatataaaagagctgctagaacaggtttcatatctgaaagacacaatatcacggaaagatatggaaatcgatcaactcctgaaggacaaagccaagtcaccaagttcatcaacagatataaatgacagtagccaacagatccgacgactatcaggggctgctggatcaggcgaggccgaatgcgaagataacatgtctgatgatggctgctcagtggcaggaaccgagtgttctgtaggtggtgcttcagaggcgacagcagaacgaatgcagaaggccccatcaaggataggcaggctgtttctcacaaagaatgggcagcctgcaaattcgaagccaaaaccaagggagtctgccctgaaaccgtcaggtacattggaaacgtgaaccactttgcatgctacatggtagtaggcattgctgcccggtatcacttcactggtcgcacgacatctacaggaagccaggcgacaggaggaggatcttcagtgaaacccccgaagaggcggtagagaaataaagagcatctggggtttgtcatgttgatggctgatgcaatgcgtgggcgtttgtaaaccgactcggagattgcgctgctgaaacactacggtcaacgggttggtgcgatgcaagggtatgtcactgtaacggtttcacttgtaaacggtctgttgagtatgatggtgagcagccggcttttggtgggaaatgttgttgcgacagcgccgttgcgttttgagttcagccggctctgccgactgccgaagtgccgaggcctcagtcctgggccctgtctgccgaatctggccttggccgctaggcgctagcatcaggcgagaaacgaaaagctcgggatagcttcagatcaaacagcagcttcactctacagaaagcttgacaaaccagcttcgttttaaagaaagtttgccaaacggtaagctgagcttcacgaactctggatttgccgaaacaatagatctaaaacttcataataataataataataataataa

SEQ ID NO: 32019 - DNA, 1493 bp, Zea Mays
aaacaacgcacctatcagcatgggccacgatgttcaaaaatctggtttaacagagacgagtactgtggctatagtagtttactcgtgctaacgataatttcacgcgagggagtagggacggcatggtactgcactgaccaccggccttaacttgcaagcaagaacaaaaatcaaaacccaactaaccaggagagacccagtgaagcgtagaagtcacagggacggcagggggacgaggaggacgacaggagggacagaggctgataaaatctaggacaaaagccctcgagctcacgccgatccgcctcctgcattgccttgaagcctctcgattcgggcagacccgagctgccccgcggagggctcgatctgggcccagatcgagcaggcgagcagcatttcgatccggtgcatgctcaagtcccggcggtgaggcatggggcaggggcacgtggacgagttccttgcagccaaccggcgagctgaggtgatagattggcttggtgggttgctgccggagttcgacttgccgttggattcttcagacgaggagctgcgggagtacctcattgatggcacgggactatgctacattgcagagaaactcatgcccggcattcaggaggaaatgtggggtggtaatgcatcggatcagaggtcgaatgtgaagaaattcctctattttgttgcggagatgggtctgccaggtttcagtgtcaaggatctggaggaggtgagatttcaaatgaccgacagttcacttgagacgagtacaggagctgcatcgattgggttgtgtgtggtatattatgtcaaggtgtgcaaatatgcatacaagctggtacatgctcagtctggctcatcaacgagacatgagtgtaaaagaatggattatatagcccatggccaaacaacgaatactgctactttacaaaagatggggaagatggagaaaacaataggggaaaaagaagtgggagggttaatagggcattcaaccagcgatacctcaaggcgtgtggagcaagaatcagtggggaatgcctgaatgaacaagatacaagaagggcacagagactatgggctatggcaggtttgcgtgggccagatcccccatggctgatgttccttctctggatgcgaagtcctgtaacattcaaacaaattgagcaacaaaattctgttgaaggttcatatgcacacaaatctagccccgcgtagcatgagcatatgtgatagcatggttgagtacctgaaggcggtgtaacaagtgcatcaagaacaaatgcacgaacacctggtgtggcggaaacagattttaagtcagaaagaagtgttgatttggtagaaaaagaggggggggggggggggggagggtaaacacaggaaattgaagttatgtggttcatgccagatagaatagcacgctgactcgtgcaacggggtgtcgccacaaaaatcttgttgcacgaacagcgcctgtatctaaaagc

SEQ ID NO: 32020 - DNA, 1542 bp, Zea Mays
gcgccgtttagagctgtcccaaacaggctggagaaagtttatgaactccgccgccacctccacagctggcgctgcgagcggtgcgtcctgcggccgcggagaaatggcggagcgagaccgggtcttggagagagagcgaaggcagatggagcagatcctagagctggatatggaggagctccaggtagaggaggtcgacgacgacggctcatcctcctcctccgacgtcgacaccttccttagaaatactcatggagatggagggattaacacttatgaggagctttcaatcgatacatctactgtttccttgcaggatcacacctatcttggggcaaaggttgatggtgcccgaggcaaatttgctttcctgcatggagacagagtcctcaatctgccaatgttttatctccaaggagttgttttgtttcctgaagcttccctacatcttcgagtattccagcctagattagtggaagctattgacaaggctattaatcatgttgatgctccatgcatgataggtttatgtttatcgacacacaaatgatggacattatactattgcttctgtcgggacaatggcagagatactgaaaattcaacagctgtatgatggttcatcatgtattttctcccatggtcagcagcggtttcgtcttttgcgccattggttggatgtcgacggagtaccatggggtgaagtccaaattattgaagaagatacacctcaaagaactccaagagatgcttttgcacaattagctgcacctaacagtttcaggcaatgtgcttcatcgataatgcccagtttgcatgtgtattgttctacacaacttgatcatgtggattctgatatggacagggattcactatcacccactagcacttcaagcgatcactcaataacagataaaagaatataccttttaggttcccgctccagtggtttggtaaggtgtggtattgcggatgaatcctcaaatgaaggccaaaattctgtacatgaacagtcttgtcagagccatgactctgttaaagaaattgatgggtatggtcagccagataagaatacaaacacaggagatgaggataatctttgtttcatatcctccaaatcatttcagagaacaagaaagaaagataccaaacagcagaaacactacttcacaacgaaaaatgcttcacaggctccattgtcattttggcctcactgggcttatgagatgtatgattcgtattcactttccaggagagctgcagatttgtggagacaagtaattttaaacccaagcatggatgatcatgtgagaaaaccaaattatttgtcatattgcattggaagcaaacttcctatctcagaatctctgaggcaagaattgcttgagattgatggagtctaaaaaaaaacttgacctgcggggggtaagacagcccccgggcattgtattaagaagaagaccttctcacacaggtcaagaaaacccccgaacccctaccccacccatacacagcggcatcaaagcccatgtgagaacgacc

SEQ ID NO: 32021 - DNA, 1457 bp, Zea Mays
agagctgtcccaaacaggctggagaaagtttatgaactccgccgccacctccacagctggcgctgcgagcggtgcgtcctgcggccgcggagaaatggcggagcgagaccgggtcttggagagagagcgaaggcagatggagcagatcctagagctggatatggaggagctccaggtagaggaggtcgacgacgacggctcatcctcctcctccgacgtcgacaccttccttagaaatactcatggagatggagggattaacacttatgaggagctttcaatcgatacatctactgtttccttgcaggatcacacctatcttggggcaaaggttgatggtgcccgaggcaaatttgctttcctgcatggagacagagtcctcaatctgccaatgttttatctccaaggagttgttttgtttcctgaagcttccctacatcttcgagtattccagcctagattagtggaagctattgacaaggctattaatcatgttgatgctccatgcatgataggtgtggtttatgtttatcgacacacaaatgatggacattatactattgcttctgtcgggacaatggcagagatactgaaaattcaacagctgtatgatggttcatcatgtattttctcccatggtcagcagcggtttcgtcttttgcgccattggttggatgtcgacggagtaccatggggtgaagtccaaattattgaagaagatacacctcaaagaactccaagagatgcttttgcacaattagctgcacctaacagtttcagggattcactatcacccactagcacttcaagcgatcactcaataacagataaaagaatataccttttaggttcccgctccagtggtttggtaaggtgtggtattgcggatgaatcctcaaatgaaggccaaaattctgtacatgaacagtcttgtcagagccatgactctgttaaagaaattgatgggtatggtcagccagataagaatacaaacacaggagatgaggataatctttgtttcatatcctccaaatcatttcagagaacaagaaagaaagataccaaacagcagaaacactacttcacaacgaaaaatgcttcacaggctccattgtcattttggcctcactgggcttatgagatgtatgattcgtattcactttccaggagagctgcagatttgtggagacaagtaattttaaacccaagcatggatgatcatgtgagaaaaccaaattatttgtcatattgcattggaagcaaacttcctatctcagaatctctgaggcaagaattgcttgagattgatggagtctaaaaaaaaacttgacctgcggggggtaagacagcccccgggcattgtattaagaagaagaccttctcacacaggtcaagaaaacccccgaacccctaccccacccatacacagcggcatcaaagcccatgtgagaacgacc

SEQ ID NO: 32022 - DNA, 2572 bp, Zea Mays
gaactccgccgccacctccacagctggcgctgcgagcggtgcgtcctgcggccgcggagaaatggcggagcgagaccgggtcttggagagagagcgaaggcagatggagcagatcctagagctggatatggaggagctccaggtagaggaggtcgacgacgacggctcatcctcctcctccgacgtcgacaccttccttagaaatactcatggagatggagggattaacacttatgaggagctttcaatcgatacatctactgtttccttgcaggatcacacctatcttggggcaaaggttgatggtgcccgaggcaaatttgctttcctgcatggagacagagtcctcaatctgccaatgttttatctccaaggagttgttttgtttcctgaagcttccctacatcttcgagtattccagcctagattagtggaagctattgacaaggctattaatcatgttgatgctccatgcatgataggtgtggtttatgtttatcgacacacaaatgatggacattatactattgcttctgtcgggacaatggcagagatactgaaaattcaacagctgtatgatggttcatcatgtattttctcccatggtcagcagcggtttcgtcttttgcgccattggttggatgtcgacggagtaccatggggtgaagtccaaattattgaagaagatacacctcaaagaactccaagagatgcttttgcacaattagctgcacctaacagtttcagggattcactatcacccactagcacttcaagcgatcactcaataacagataaaagaatataccttttaggttcccgctccagtggtttggtaaggtgtggtattgcggatgaatcctcaaatgaaggccaaaattctgtacatgaacagtcttgtcagagccatgactctgttaaagaaattgatgggtatggtcagccagataagaatacaaacacaggagatgaggataatctttgtttcatatcctccaaatcatttcagagaacaagaaagaaagataccaaacagcagaaacactacttcacaacgaaaaatgcttcacaggctccattgtcattttggcctcactgggcttatgagatgtatgattcgtattcactttccaggagagctgcagattgatggagtctcatatcgactacagcgggagattcagctgctcaaagccttcaatatcatacgatgtagaaattgcctgatccgtattgcaagacgaagtgacatggtggtgacgtccagtgacagccctatgtctttgcacagcaggcctcacggttttgtgaaagagattattacagtatacaatgccactggccttgcactgcgtggcgacccttccaaaactcacagctggtttccagaatacacatggacgatcgcgttgtgcaatgcctgccagtccaatataggctggctgttcagagtcgatgacaagaacctgcatccgagatccttctgggcgatacgcagttcccaaatttcagacgatacacagtcaagagatagaactgatcagaccatccatgtataagctgcgtgaccatttgttgaaattccaacaatccattaacatctgccttccattattctctgcgagattcaatttggctgcatggtgtccccaagtggctaaggtttctagtaaaatgaaactgaaaacaaagatactgagatcataagcttaacccgccacatgggcacctacgttacctgaaaccttcctttgtggggtacaatcaggcctttctcaatatgctccgggtgtattcagcacgacagatttatctaagggctagtttgagagtccaaaaaccggagaggattggaggggctaaaatcaactttattttagcccctttaatctcctctgtttttgtgacttccaaattagccctaaaagctactatctgtctggatatctccaaagctaccagttcagcaaggcccttaccagggtgcaagacagacagatggaccttcagactgcaatgctcgtacttctggcaagtttcccccactgttggtatatacacaactggaagcagacattgtcaatcaggagcttgactcattatttatctcctggaaaacaaatgcatcgttcaatcaacaagataaaagcactcccaactgaaataataacctggctagcaattgactctgtgaatccaaattttctcttggagaagtcgattagcgtagtgcagcgcagcgctacaagcctacaaagggaccttgaactgccgaacattctgcaacgtcctgttctttggtacaagatgcacaagcttcactgaaatcacgaactgctaaggcaggtgttagatttagacgtgtttagtttatagagactaatttttagtcccttcattttattccattggcgtctagaacggattggttatacccgttggggtaccggatatgagtagtgcaaatacccgtttttttggatacggattcgggtagttttatattcgggacggatacgtgtaaatacccggatactgtagcttcggattcgggtcggatacagagcaagaa

SEQ ID NO: 32023 - DNA, 1346 bp, Zea Mays
cacagctggcgctgcgagcggtgcgtcctgcggccgcggagaaatggcggagcgagaccgggtcttggagagagagcgaaggcagatggagcagatcctagagctggatatggaggagctccaggtagaggaggtcgacgacgacggctcatcctcctcctccgacgtcgacaccttccttagaaatactcatggagatggagggattaacacttatgaggagctttcaatcgatacatctactgtttccttgcaggatcacacctatcttggggcaaaggttgatggtgcccgaggcaaatttgctttcctgcatggagacagagtcctcaatctgccaatgttttatctccaaggagttgttttgtttcctgaagcttccctacatcttcgagtattccagcctagattagtggaagctattgacaaggctattaatcatgttgatgctccatgcatgataggtgtggtttatgtttatcgacacacaaatgatggacattatactattgcttctgtcgggacaatggcagagcggtttcgtcttttgcgccattggttggatgtcgacggagtaccatggggtgaagtccaaattattgaagaagatacacctcaaagaactccaagagatgcttttgcacaattagctgcacctaacagtttcagggattcactatcacccactagcacttcaagcgatcactcaataacagataaaagaatataccttttaggttcccgctccagtggtttggtaaggtgtggtattgcggatgaatcctcaaatgaaggccaaaattctgtacatgaacagtcttgtcagagccatgactctgttaaagaaattgatgggtatggtcagccagataagaatacaaacacaggagatgaggataatctttgtttcatatcctccaaatcatttcagagaacaagaaagaaagataccaaacagcagaaacactacttcacaacgaaaaatgcttcacaggctccattgtcattttggcctcactgggcttatgagatgtatgattcgtattcactttccaggagagctgcagatttgtggagacaagtaattttaaacccaagcatggatgatcatgtgagaaaaccaaattatttgtcatattgcattggaagcaaacttcctatctcagaatctctgaggcaagaattgcttgagattgatggagtctaaaaaaaaacttgacctgcggggggtaagacagcccccgggcattgtattaagaagaagaccttctcacacaggtcaagaaaacccccgaacccctaccccacccatacacagcggcatcaaagcccatgtgagaacgacc

SEQ ID NO: 32024 - DNA, 3422 bp, Zea Mays
cacagctggcgctgcgagcggtgcgtcctgcggccgcggagaaatggcggagcgagaccgggtcttggagagagagcgaaggcagatggagcagatcctagagctggatatggaggagctccaggtagaggaggtcgacgacgacggctcatcctcctcctccgacgtcgacaccttccttagaaatactcatggagatggagggattaacacttatgaggagctttcaatcgatacatctactgtttccttgcaggatcacacctatcttggggcaaaggttgatggtgcccgaggcaaatttgctttcctgcatggagacagagtcctcaatctgccaatgttttatctccaaggagttgttttgtttcctgaagcttccctacatcttcgagtattccagcctagattagtggaagctattgacaaggctattaatcatgttgatgctccatgcatgataggtgtggtttatgtttatcgacacacaaatgatggacattatactattgcttctgtcgggacaatggcagagatactgaaaattcaacagctgtatgatggttcatcatgtattttctcccatggtcagcagcggtttcgtcttttgcgccattggttggatgtcgacggagtaccatggggtgaagtccaaattattgaagaagatacacctcaaagaactccaagagatgcttttgcacaattagctgcacctaacagtttcagggattcactatcacccactagcacttcaagcgatcactcaataacagataaaagaatataccttttaggttcccgctccagtggtttggtaaggtgtggtattgcggatgaatcctcaaatgaaggccaaaattctgtacatgaacagtcttgtcagagccatgactctgttaaagaaattgatgggtatggtcagccagataagaatacaaacacaggagatgaggataatctttgtttcatatcctccaaatcatttcagagaacaagaaagaaagataccaaacagcagaaacactacttcacaacgaaaaatgcttcacaggctccattgtcattttggcctcactgggcttatgagatgtatgattcgtattcactttccaggagagctgcaggaaaactctatatctttatattatagagagataagtcctgttatacgaaagggcatctagcgtaatggttaagccttccgagtagcacctctaggtcctgggttcgatccctctcggtggcgaatttctggcttggttaaaaaagttccctcactgtgcctcgcccgctcccggattacgccttgtgcgctaccctccggctgggccgttgcagagtgggcggtgacggcccgctagtgatgggggttagggttaaaggattttctcggctgggaccatgtttcggtctcttcttaatataataccgggagggcggtctttccctccccggccgagttttttgataagtcctgttatgtcaaagtataaatatgtgcagttgtgatttaagtgttgttgtatgtatgatcttgaattttcttcatggcagatttgtggagacaagtaattttaaacccaagcatggatgatcatgtgagaaaaccaaattatttgtcatattgcattggaagcaaacttcctatctcagaatctctgaggcaagaattgcttgagattgatggagtctaaaaaaaaacttgacctgcggggggtaagacagcccccgggcattgtattaagaagaagaccttctcacacaggtcaagaaaacccccgaacccctaccccacccatacacagcggcatcaaagcccatgtgagaacgaccacgaccggggctgagccttagacctgtgctttggcgtgggacagacgaggggatttttttaaccacagcctgaaattcgctcccacggggagtcgaacccaggacctgaggagtgctactcagaccacctaaccaactcagctagaggccctttcgcagattgatggagtctcatatcgactacagcgggagattcagctgctcaaagccttcaatatcatacgatgtagaaattgcctgatccgtattgcaagacgaagtgacatggtggtgacgtccagtgacagccctatgtctttgcacagcaggcctcacggttttgtgaaagagattattacagtatacaatgccactggccttgcactgcgtggcgacccttccaaaactcacagctggtttccagaatacacatggacgatcgcgttgtgcaatgcctgccagtccaatataggctggctgttcagagtcgatgacaagaacctgcatccgagatccttctgggcgatacgcagttcccaaatttcagacgatacacagtcaagagatagaactgatcagaccatccatgtataagctgcgtgaccatttgttgaaattccaacaatccattaacatctgccttccattattctctgcgagattcaatttggctgcatggtgtccccaagtggctaaggtttctagtaaaatgaaactgaaaacaaagatactgagatcataagcttaacccgccacatgggcacctacgttacctgaaaccttcctttgtggggtacaatcaggcctttctcaatatgctccgggtgtattcagcacgacagatttatctaagggctagtttgagagtccaaaaaccggagaggattggaggggctaaaatcaactttattttagcccctttaatctcctctgtttttgtgacttccaaattagccctaaaagctactatctgtctggatatctccaaagctaccagttcagcaaggcccttaccagggtgcaagacagacagatggaccttcagactgcaatgctcgtacttctggcaagtttcccccactgttggtatatacacaactggaagcagacattgtcaatcaggagcttgactcattatttatctcctggaaaacaaatgcatcgttcaatcaacaagataaaagcactcccaactgaaataataacctggctagcaattgactctgtgaatccaaattttctcttggagaagtcgattagcgtagtgcagcgcagcgctacaagcctacaaagggaccttgaactgccgaacattctgcaacgtcctgttctttggtacaagatgcacaagcttcactgaaatcacgaactgctaaggcaggtgttagatttagacgtgtttagtttatagagactaatttttagtcccttcattttattccattggcgtctagaacggattggttatacccgttggggtaccggatatgagtagtgcaaatacccgtttttttggatacggattcgggtagttttatattcgggacggatacgtgtaaatacccggatactgtagcttcggattcgggtcggatacagagcaagaa

SEQ ID NO: 32025 - DNA, 2390 bp, Zea Mays
cacagctggcgctgcgagcggtgcgtcctgcggccgcggagaaatggcggagcgagaccgggtcttggagagagagcgaaggcagatggagcagatcctagagctggatatggaggagctccaggtagaggaggtcgacgacgacggctcatcctcctcctccgacgtcgacaccttccttagaaatactcatggagatggagggattaacacttatgaggagctttcaatcgatacatctactgtttccttgcaggatcacacctatcttggggcaaaggttgatggtgcccgaggcaaatttgctttcctgcatggagacagagtcctcaatctgccaatgttttatctccaaggagttgttttgtttcctgaagcttccctacatcttcgagtattccagcctagattagtggaagctattgacaaggctattaatcatgttgatgctccatgcatgataggtgtggtttatgtttatcgacacacaaatgatggacattatactattgcttctgtcgggacaatggcagagatactgaaaattcaacagctgtatgatggttcatcatgtattttctcccatggtcagcagcggtttcgtcttttgcgccattggttggatgtcgacggagtaccatggggtgaagtccaaattattgaagaagatacacctcaaagaactccaagagatgcttttgcacaattagctgcacctaacagtttcagggattcactatcacccactagcacttcaagcgatcactcaataacagataaaagaatataccttttaggttcccgctccagtggtttggtaaggtgtggtattgcggatgaatcctcaaatgaaggccaaaattctgtacatgaacagtcttgtcagagccatgactctgttaaagaaattgatgggtatggtcagccagataagaatacaaacacaggagatgaggataatctttgtttcatatcctccaaatcatttcagagaacaagaaagaaagataccaaacagcagaaacactacttcacaacgaaaaatgcttcacaggctccattgtcattttggcctcactgggcttatgagatgtatgattcgtattcactttccaggagagctgcagattgatggagtctcatatcgactacagcgggagattcagctgctcaaagccttcaatatcatacgatgtagaaattgcctgatacacatggacgatcgcgttgtgcaatgcctgccagtccaatataggctggctgttcagagtcgatgacaagaacctgcatccgagatccttctgggcgatacgcagttcccaaatttcagacgatacacagtcaagagatagaactgatcagaccatccatgtataagctgcgtgaccatttgttgaaattccaacaatccattaacatctgccttccattattctctgcgagattcaatttggctgcatggtgtccccaagtggctaaggtttctagtaaaatgaaactgaaaacaaagatactgagatcataagcttaacccgccacatgggcacctacgttacctgaaaccttcctttgtggggtacaatcaggcctttctcaatatgctccgggtgtattcagcacgacagatttatctaagggctagtttgagagtccaaaaaccggagaggattggaggggctaaaatcaactttattttagcccctttaatctcctctgtttttgtgacttccaaattagccctaaaagctactatctgtctggatatctccaaagctaccagttcagcaaggcccttaccagggtgcaagacagacagatggaccttcagactgcaatgctcgtacttctggcaagtttcccccactgttggtatatacacaactggaagcagacattgtcaatcaggagcttgactcattatttatctcctggaaaacaaatgcatcgttcaatcaacaagataaaagcactcccaactgaaataataacctggctagcaattgactctgtgaatccaaattttctcttggagaagtcgattagcgtagtgcagcgcagcgctacaagcctacaaagggaccttgaactgccgaacattctgcaacgtcctgttctttggtacaagatgcacaagcttcactgaaatcacgaactgctaaggcaggtgttagatttagacgtgtttagtttatagagactaatttttagtcccttcattttattccattggcgtctagaacggattggttatacccgttggggtaccggatatgagtagtgcaaatacccgtttttttggatacggattcgggtagttttatattcgggacggatacgtgtaaatacccggatactgtagcttcggattcgggtcggatacagagcaagaa

SEQ ID NO: 32026 - DNA, 1814 bp, Zea Mays
atggcggagcgagaccgggtcttggagagagagcgaaggcagatggagcagatcctagagctggatatggaggagctccaggtagaggaggtcgacgacgacggctcatcctcctcctccgacgtcgacaccttccttagaaatactcatggagatggagggattaacacttatgaggagctttcaatcgatacatctactgtttccttgcaggatcacacctatcttggggcaaaggttgatggtgcccgaggcaaatttgctttcctgcatggagacagagtcctcaatctgccaatgttttatctccaaggagttgttttgtttcctgaagcttccctacatcttcgagtattccagcctagattagtggaagctattgacaaggctattaatcatgttgatgctccatgcatgataggtgtggtttatgtttatcgacacacaaatgatggacattatactattgcttctgtcgggacaatggcagagcggtttcgtcttttgcgccattggttggatgtcgacggagtaccatggggtgaagtccaaattattgaagaagatacacctcaaagaactccaagagatgcttttgcacaattagctgcacctaacagtttcaggcaatgtgcttcatcgataatgcccagtttgcatgtgtattgttctacacaacttgatcatgtggattctgatatggacagggattcactatcacccactagcacttcaagcgatcactcaataacagataaaagaatataccttttaggttcccgctccagtggtttggtaaggtgtggtattgcggatgaatcctcaaatgaaggccaaaattctgtacatgaacagtcttgtcagagccatgactctgttaaagaaattgatgggtatggtcagccagataagaatacaaacacaggagatgaggataatctttgtttcatatcctccaaatcatttcagagaacaagaaagaaagataccaaacagcagaaacactacttcacaacgaaaaatgcttcacaggctccattgtcattttggcctcactgggcttatgagatgtatgattcgtattcactttccaggagagctgcaggaaaactctatatctttatattatagagagataagtcctgttatacgaaagggcatctagcgtaatggttaagccttccgagtagcacctctaggtcctgggttcgatccctctcggtggcgaatttctggcttggttaaaaaagttccctcactgtgcctcgcccgctcccggattacgccttgtgcgctaccctccggctgggccgttgcagagtgggcggtgacggcccgctagtgatgggggttagggttaaaggattttctcggctgggaccatgtttcggtctcttcttaatataataccgggagggcggtctttccctccccggccgagttttttgataagtcctgttatgtcaaagtataaatatgtgcagttgtgatttaagtgttgttgtatgtatgatcttgaattttcttcatggcagatttgtggagacaagtaattttaaacccaagcatggatgatcatgtgagaaaaccaaattatttgtcatattgcattggaagcaaacttcctatctcagaatctctgaggcaagaattgcttgagattgatggagtctaaaaaaaaacttgacctgcggggggtaagacagcccccgggcattgtattaagaagaagaccttctcacacaggtcaagaaaacccccgaacccctaccccacccatacacagcggcatcaaagcccatgtgagaacgacc

SEQ ID NO: 32027 - DNA, 1772 bp, Zea Mays
atggcggagcgagaccgggtcttggagagagagcgaaggcagatggagcagatcctagagctggatatggaggagctccaggtagaggaggtcgacgacgacggctcatcctcctcctccgacgtcgacaccttccttagaaatactcatggagatggagggattaacacttatgaggagctttcaatcgatacatctactgtttccttgcaggatcacacctatcttggggcaaaggttgatggtgcccgaggcaaatttgctttcctgcatggagacagagtcctcaatctgccaatgttttatctccaaggagttgttttgtttcctgaagcttccctacatcttcgagtattccagcctagattagtggaagctattgacaaggctattaatcatgttgatgctccatgcatgataggtgtggtttatgtttatcgacacacaaatgatggacattatactattgcttctgtcgggacaatggcagagatactgaaaattcaacagctgtatgatggttcatcatgtattttctcccatggtcagcagcggtttcgtcttttgcgccattggttggatgtcgacggagtaccatggggtgaagtccaaattattgaagaagatacacctcaaagaactccaagagatgcttttgcacaattagctgcacctaacagtttcagcacttcaagcgatcactcaataacagataaaagaatataccttttaggttcccgctccagtggtttggtaaggtgtggtattgcggatgaatcctcaaatgaaggccaaaattctgtacatgaacagtcttgtcagagccatgactctgttaaagaaattgatgggtatggtcagccagataagaatacaaacacaggagatgaggataatctttgtttcatatcctccaaatcatttcagagaacaagaaagaaagataccaaacagcagaaacactacttcacaacgaaaaatgcttcacaggctccattgtcattttggcctcactgggcttatgagatgtatgattcgtattcactttccaggagagctgcaggaaaactctatatctttatattatagagagataagtcctgttatacgaaagggcatctagcgtaatggttaagccttccgagtagcacctctaggtcctgggttcgatccctctcggtggcgaatttctggcttggttaaaaaagttccctcactgtgcctcgcccgctcccggattacgccttgtgcgctaccctccggctgggccgttgcagagtgggcggtgacggcccgctagtgatgggggttagggttaaaggattttctcggctgggaccatgtttcggtctcttcttaatataataccgggagggcggtctttccctccccggccgagttttttgataagtcctgttatgtcaaagtataaatatgtgcagttgtgatttaagtgttgttgtatgtatgatcttgaattttcttcatggcagatttgtggagacaagtaattttaaacccaagcatggatgatcatgtgagaaaaccaaattatttgtcatattgcattggaagcaaacttcctatctcagaatctctgaggcaagaattgcttgagattgatggagtctaaaaaaaaacttgacctgcggggggtaagacagcccccgggcattgtattaagaagaagaccttctcacacaggtcaagaaaacccccgaacccctaccccacccatacacagcggcatcaaagcccatgtgagaacgacc

SEQ ID NO: 32028 - DNA, 2520 bp, Zea Mays
atggcggagcgagaccgggtcttggagagagagcgaaggcagatggagcagatcctagagctggatatggaggagctccaggtagaggaggtcgacgacgacggctcatcctcctcctccgacgtcgacaccttccttagaaatactcatggagatggagggattaacacttatgaggagctttcaatcgatacatctactgtttccttgcaggatcacacctatcttggggcaaaggttgatggtgcccgaggcaaatttgctttcctgcatggagacagagtcctcaatctgccaatgttttatctccaaggagttgttttgtttcctgaagcttccctacatcttcgagtattccagcctagattagtggaagctattgacaaggctattaatcatgttgatgctccatgcatgataggtttatgtttatcgacacacaaatgatggacattatactattgcttctgtcgggacaatggcagagatactgaaaattcaacagctgtatgatggttcatcatgtattttctcccatggtcagcagcggtttcgtcttttgcgccattggttggatgtcgacggagtaccatggggtgaagtccaaattattgaagaagatacacctcaaagaactccaagagatgcttttgcacaattagctgcacctaacagtttcagggattcactatcacccactagcacttcaagcgatcactcaataacagataaaagaatataccttttaggttcccgctccagtggtttggtaaggtgtggtattgcggatgaatcctcaaatgaaggccaaaattctgtacatgaacagtcttgtcagagccatgactctgttaaagaaattgatgggtatggtcagccagataagaatacaaacacaggagatgaggataatctttgtttcatatcctccaaatcatttcagagaacaagaaagaaagataccaaacagcagaaacactacttcacaacgaaaaatgcttcacaggctccattgtcattttggcctcactgggcttatgagatgtatgattcgtattcactttccaggagagctgcagaggccctttcgcagattgatggagtctcatatcgactacagcgggagattcagctgctcaaagccttcaatatcatacgatgtagaaattgcctgatccgtattgcaagacgaagtgacatggtggtgacgtccagtgacagccctatgtctttgcacagcaggcctcacggttttgtgaaagagattattacagtatacaatgccactggccttgcactgcgtggcgacccttccaaaactcacagctggtttccagaatacacatggacgatcgcgttgtgcaatgcctgccagtccaatataggctggctgttcagagtcgatgacaagaacctgcatccgagatccttctgggcgatacgcagttcccaaatttcagacgatacacagtcaagagatagaactgatcagaccatccatgtataagctgcgtgaccatttgttgaaattccaacaatccattaacatctgccttccattattctctgcgagattcaatttggctgcatggtgtccccaagtggctaaggtttctagtaaaatgaaactgaaaacaaagatactgagatcataagcttaacccgccacatgggcacctacgttacctgaaaccttcctttgtggggtacaatcaggcctttctcaatatgctccgggtgtattcagcacgacagatttatctaagggctagtttgagagtccaaaaaccggagaggattggaggggctaaaatcaactttattttagcccctttaatctcctctgtttttgtgacttccaaattagccctaaaagctactatctgtctggatatctccaaagctaccagttcagcaaggcccttaccagggtgcaagacagacagatggaccttcagactgcaatgctcgtacttctggcaagtttcccccactgttggtatatacacaactggaagcagacattgtcaatcaggagcttgactcattatttatctcctggaaaacaaatgcatcgttcaatcaacaagataaaagcactcccaactgaaataataacctggctagcaattgactctgtgaatccaaattttctcttggagaagtcgattagcgtagtgcagcgcagcgctacaagcctacaaagggaccttgaactgccgaacattctgcaacgtcctgttctttggtacaagatgcacaagcttcactgaaatcacgaactgctaaggcaggtgttagatttagacgtgtttagtttatagagactaatttttagtcccttcattttattccattggcgtctagaacggattggttatacccgttggggtaccggatatgagtagtgcaaatacccgtttttttggatacggattcgggtagttttatattcgggacggatacgtgtaaatacccggatactgtagcttcggattcgggtcggatacagagcaagaa

SEQ ID NO: 32029 - DNA, 2484 bp, Zea Mays
atggcggagcgagaccgggtcttggagagagagcgaaggcagatggagcagatcctagagctggatatggaggagctccaggtagaggaggtcgacgacgacggctcatcctcctcctccgacgtcgacaccttccttagaaatactcatggagatggagggattaacacttatgaggagctttcaatcgatacatctactgtttccttgcaggatcacacctatcttggggcaaaggttgatggtgcccgaggcaaatttgctttcctgcatggagacagagtcctcaatctgccaatgttttatctccaaggagttgttttgtttcctgaagcttccctacatcttcgagtattccagcctagattagtggaagctattgacaaggctattaatcatgttgatgctccatgcatgataggtgtggtttatgtttatcgacacacaaatgatggacattatactattgcttctgtcgggacaatggcagagatactgaaaattcaacagctgtatgatggttcatcatgtattttctcccatggtcagcagcggtttcgtcttttgcgccattggttggatgtcgacggagtaccatggggtgaagtccaaattattgaagaagatacacctcaaagaactccaagagatgcttttgcacaattagctgcacctaacagtttcagggattcactatcacccactagcacttcaagcgatcactcaataacagataaaagaatataccttttaggttcccgctccagtggtttggtaaggtgtggtattgcggatgaatcctcaaatgaaggccaaaattctgtacatgaacagtcttgtcagagccatgactctgttaaagaaattgatgggtatggtcagccagataagaatacaaacacaggagatgaggataatctttgtttcatatcctccaaatcatttcagagaacaagaaagaaagataccaaacagcagaaacactacttcacaacgaaaaatgcttcacaggctccattgtcattttggcctcactgggcttatgagatgtatgattcgtattcactttccaggagagctgcaggaaaagagtagtttctggtgtacagccaacaggatcggttcaccttggaaattatctaggggcaattaagaattgggttgcacttcaggattcatatgagacattctttttcatcgtggatcttcatgcaattactttaccatatgaggcgccactgctttctaaagcaacaagaagcactgctgcaatatatcttgcatgtggcgtcgacagctccaaggcttctatctttgtacagtctcatgtccgtgctcatgttgagttgatgtggctattgagttcttctactcctattggctggctgaatagaatgatccagttcaaagagaagtctcgcaaggcggtgcgtcacttgctggtgatgaaaatgttggggttgcacttttgacttatcctgttctaatggcttctgacattcttttgtaccagtccgatctggtacctgttggtgaagatcaaacacaacatttagaattaactcgtgaaatagctgagcgtgtaaataatctttatggtggaagaaagtggaagaaattgggagggagagggggtttgctatttaaggttcctgaagcccttattcctccagcaggggctcgtgttatgtccctaactgatggtctctccaagatgtccaagtctgctccttcagaccagtctcgtattaaccttcttgacccaaaagatgtgattgcaaataagatcaagcgctgcaaaactgactcattcccaggtatggagtttgacaacccagagaggccggaatgcagaaatcttctctctatataccagattatcactgagaagactaaggaggaagttgttagtgagtgccaacacatgaactggggtacattcaagactacactcacggaagctctaattgatcatttgcagcctattcaggttcgttatgaggagataatgtctgatccagcctacttggataatgtccttttagaaggagcagtaaaagctgctgagatagcggacatcaccctgaacaatgtttaccaagccatgggtttcttgcgtagataatgtatgggtcaaaacatttgttcgggagctcttatcttttttttttttggctttgagcttcgagcatgcttcacattagggcgctactgtttttcacacgcagggccttcattttacgacttcaaccccctttgagtcgtctcatgatttccatatcatttgattcatgtgataattttctgtctgctgttccttcagattctgctggggaaatgttctagtttctatgtttgagcaatttttattttgagtttctttacatattagagtgaagtaaacaagaaactgacctacatgtattgaatctaccaaaagaacctaacaagttgtttggacctaccaaaaaaaacagctttagc

SEQ ID NO: 32030 - DNA, 1878 bp, Zea Mays
gatctgcaccgtccggttccattccacccgacctgttttacgcggcccaccctgcctgggctcgccatcgccgaacacacacacgtcggtccaaacacgcgccgtccgctcgcggcttctccaaccaaagccgtgcagccaaatccgaagggtagcgtagcacggggacgacgccatgagccgcgcgctcctctcccacgtcctccaccgtccgccgcacttcgcgtacacctgcttaaggagtggcgttggtgcccgaggaggagtgctcgcttctggcatccacccactccgtcgtctcaattgcagcgcggttgaagccgttcccggccccaccgaggaggcgcctgctcctcaggcaaggaagaaaagagtagtttctggtgtacagccaacaggatcggttcaccttggaaattatctaggggcaattaagaattgggttgcacttcaggattcatatgagacattctttttcatcgtggatcttcatgcaattactttaccatatgaggcgccactgctttctaaagcaacaagaagcactgctgcaatatatcttgcatgtggcgtcgacagctccaaggcttctatctttgtacagtctcatgtccgtgctcatgttgagttgatgtggctattgagttcttctactcctattggctggctgaatagaatgatccagttcaaagagaagtctcgcaaggcgggtgatgaaaatgttggggttgcacttttgacttatcctgttctaatggcttctgacattcttttgtaccagtccgatctggtacctgttggtgaagatcaaacacaacatttagaattaactcgtgaaatagctgagcgtgtaaataatctttatggtggaagaaagtggaagaaattgggagggagagggggtttgctatttaaggttcctgaagcccttattcctccagcaggggctcgtgttatgtccctaactgatggtctctccaaggtgattgacagaactgccagtttagatatgcatttaattattgaatgtccaagtctgctccttcagaccagtctcgtattaaccttcttgacccaaaagatgtgattgcaaataagatcaagcgctgcaaaactgactcattcccagggtttctctcttctcgcttctgcgctctctctacctctcttttcattattatggaaactcattccattgaactcatatttcagtatggagtttgacaacccagagaggccggaatgcagaaatcttctctctatataccagattatcactgagaagactaaggaggaagttgttagtgagtgccaacacatgaactggggtacattcaagactacactcacggaagctctaattgatcatttgcagcctattcaggttcgttatgaggagataatgtctgatccagcctacttggataatgtccttttagaaggagcagtaaaagctgctgagatagcggacatcaccctgaacaatgtttaccaagccatgggtttcttgcgtagataatgtatgggtcaaaacatttgttcgggagctcttatcttttttttttttggctttgagcttcgagcatgcttcacattagggcgctactgtttttcacacgcagggccttcattttacgacttcaaccccctttgagtcgtctcatgatttccatatcatttgattcatgtgataattttctgtctgctgttccttcagattctgctggggaaatgttctagtttctatgtttgagcaatttttattttgagtttctttacatattagagtgaagtaaacaagaaactgacctacatgtattgaatctaccaaaagaacctaacaagttgtttggacctaccaaaaaaaacagctttagc

SEQ ID NO: 32031 - DNA, 1643 bp, Zea Mays
ctgcctgggctcgccatcgccgaacacacacacgtcggtccaaacacgcgccgtccgctcgcggcttctccaaccaaagccgtgcagccaaatccgaagggtagcgtagcacggggacgacgccatgagccgcgcgctcctctcccacgtcctccaccgtccgccgcacttcgcgtacacctgcttaaggagtggcgttggtgcccgaggaggagtgctcgcttctggcatccacccactccgtcgtctcaattgcagcgcggttgaagccgttcccggccccaccgaggaggcgcctgctcctcaggcaaggaagaaaagagtagtttctggtgtacagccaacaggatcggttcaccttggaaattatctaggggcaattaagaattgggttgcacttcaggattcatatgagacattctttttcatcgtggatcttcatgcaattactttaccatatgaggcgccactgctttctaaagcaacaagaagcactgctgcaatatatcttgcatgtggcgtcgacagctccaaggcttctatctttgtacagtctcatgtccgtgctcatgttgagttgatgtggctattgagttcttctactcctattggctggctgaatagaatgatccagttcaaagagaagtctcgcaaggcgggtgatgaaaatgttggggttgcacttttgacttatcctgttctaatggcttctgacattcttttgtaccagctccagcagtagtctgtcttttactgacaattcatttatactttttgattggcaggagagggggtttgctatttaaggttcctgaagcccttattcctccagcaggggctcgtgttatgtccctaactgatggtctctccaagatgtccaagtctgctccttcagaccagtctcgtattaaccttcttgacccaaaagatgtgattgcaaataagatcaagcgctgcaaaactgactcattcccaggtatggagtttgacaacccagagaggccggaatgcagaaatcttctctctatataccagattatcactgagaagactaaggaggaagttgttagtgagtgccaacacatgaactggggtacattcaagactacactcacggaagctctaattgatcatttgcagcctattcaggttcgttatgaggagataatgtctgatccagcctacttggataatgtccttttagaaggagcagtaaaagctgctgagatagcggacatcaccctgaacaatgtttaccaagccatgggtttcttgcgtagataatgtatgggtcaaaacatttgttcgggagctcttatcttttttttttttggctttgagcttcgagcatgcttcacattagggcgctactgtttttcacacgcagggccttcattttacgacttcaaccccctttgagtcgtctcatgatttccatatcatttgattcatgtgataattttctgtctgctgttccttcagattctgctggggaaatgttctagtttctatgtttgagcaatttttattttgagtttctttacatattagagtgaagtaaacaagaaactgacctacatgtattgaatctaccaaaagaacctaacaagttgtttggacctaccaaaaaaaacagctttagc

SEQ ID NO: 32032 - DNA, 1582 bp, Zea Mays
cgccgaacacacacacgtcggtccaaacacgcgccgtccgctcgcggcttctccaaccaaagccgtgcagccaaatccgaagggtagcgtagcacggggacgacgccatgagccgcgcgctcctctcccacgtcctccaccgtccgccgcacttcgcgtacacctgcttaaggagtggcgttggtgcccgaggaggagtgctcgcttctggcatccacccactccgtcgtctcaattgcagcgcggttgaagccgttcccggccccaccgaggaggcgcctgctcctcaggcaaggaagaaaagagtagtttctggtgtacagccaacaggatcggttcaccttggaaattatctaggggcaattaagaattgggttgcacttcaggattcatatgagacattctttttcatcgtggatcttcatgcaattactttaccatatgaggcgccactgctttctaaagcaacaagaagcactgctgcaatatatcttgcatgtggcgtcgacagctccaaggcttctatctttgtacagtctcatgtccgtgctcatgttgagttgatgtggctattgagttcttctactcctattggctggctgaatagaatgatccagttcaaagagaagtctcgcaaggcgggtgatgaaaatgttggggttgcacttttgacttatcctgttctaatggcttctgacattcttttgtaccagtccgatctggtacctgttggtgaagatcaaacacaacatttagaattaactcgtgaaatagctgagcgtgtaaataatctttatggtggaagaaagtggaagaaattgggagggagagggggtttgctatttaaggttcctgaagcccttattcctccagcaggggctcgtgttatgtccctaactgatggtctctccaagatgtccaagtctgctccttcagaccagtctcgtattaaccttcttgacccaaaagatgtgattgcaaataagatcaagcgctgcaaaactgactcattcccaggtatggagtttgacaacccagagaggccggaatgcagaaatcttctctctatataccagattatcactgagaagactaaggaggaagttgttagtgagtgccaacacatgaactggggtacattcaagactacactcacggaagctctaattgatcatttgcagcctattcaggttcgttatgaggagataatgtctgatccagcctacttggataatgtccttttagaaggagcagtaaaagctgctgagatagcggacatcaccctgaacaatgtttaccaagccatgggtttcttgcgtagataatggccttcattttacgacttcaaccccctttgagtcgtctcatgatttccatatcatttgattcatgtgataattttctgtctgctgttccttcagattctgctggggaaatgttctagtttctatgtttgagcaatttttattttgagtttctttacatattagagtgaagtaaacaagaaactgacctacatgtattgaatctaccaaaagaacctaacaagttgtttggacctaccaaaaaaaacagctttagc

SEQ ID NO: 32033 - DNA, 1674 bp, Zea Mays
gaacacacacacgtcggtccaaacacgcgccgtccgctcgcggcttctccaaccaaagccgtgcagccaaatccgaagggtagcgtagcacggggacgacgccatgagccgcgcgctcctctcccacgtcctccaccgtccgccgcacttcgcgtacacctggagtggcgttggtgcccgaggaggagtgctcgcttctggcatccacccactccgtcgtctcaattgcagcgcggttgaagccgttcccggccccaccgaggaggcgcctgctcctcaggcaaggaagaaaagagtagtttctggtgtacagccaacaggatcggttcaccttggaaattatctaggggcaattaagaattgggttgcacttcaggattcatatgagacattctttttcatcgtggatcttcatgcaattactttaccatatgaggcgccactgctttctaaagcaacaagaagcactgctgcaatatatcttgcatgtggcgtcgacagctccaaggcttctatctttgtacagtctcatgtccgtgctcatgttgagttgatgtggctattgagttcttctactcctattggctggctgaatagaatgatccagttcaaagagaagtctcgcaaggcgggtgatgaaaatgttggggttgcacttttgacttatcctgttctaatggcttctgacattcttttgtaccagtccgatctggtacctgttggtgaagatcaaacacaacatttagaattaactcgtgaaatagctgagcgtgtaaataatctttatggtggaagaaagtggaagaaattgggagggagagggggtttgctatttaaggttcctgaagcccttattcctccagcaggggctcgtgttatgtccctaactgatggtctctccaagatgtccaagtctgctccttcagaccagtctcgtattaaccttcttgacccaaaagatgtgattgcaaataagatcaagcgctgcaaaactgactcattcccaggtatggagtttgacaacccagagaggccggaatgcagaaatcttctctctatataccagattatcactgagaagactaaggaggaagttgttagtgagtgccaacacatgaactggggtacattcaagactacactcacggaagctctaattgatcatttgcagcctattcaggttcgttatgaggagataatgtctgatccagcctacttggataatgtccttttagaaggagcagtaaaagctgctgagatagcggacatcaccctgaacaatgtttaccaagccatgggtttcttgcgtagataatgtatgggtcaaaacatttgttcgggagctcttatcttttttttttttggctttgagcttcgagcatgcttcacattagggcgctactgtttttcacacgcagggccttcattttacgacttcaaccccctttgagtcgtctcatgatttccatatcatttgattcatgtgataattttctgtctgctgttccttcagattctgctggggaaatgttctagtttctatgtttgagcaatttttattttgagtttctttacatattagagtgaagtaaacaagaaactgacctacatgtattgaatctaccaaaagaacctaacaagttgtttggacctaccaaaaaaaacagctttagc

SEQ ID NO: 32034 - DNA, 2164 bp, Zea Mays
gccaggggccacaccagcgtaccaaacgcacttggcagtggcagctcgtgaaccgtggcgactcgttcgacttatgccactcctccattccctttctgttctcttcttgcccgtgaccgtgatcgagctccttaaattcccccctcccaccatctatcctctccgcctcccctacctcgccacagttccacacccacacctgccacgtccctccagcttccgcactcgctgcgaaatccggaatgggcacgccacgagcacgattgttggcccgcattgccgtggcggccgtcgtgctcctcgcgccgacgacgacgtgcggggtggccgggcactcgcgggcgctgcggcccggcggcgggcgcggccagcagcagccgtcgtcgctgttcccggcgaacgcgacgcgcgcggaggcgatcgagcggcagttcgtggagtgggtgcggtacgtgggcgggctccggcacagcacgttccagcacgcggtcgcccgcgcgtccccctcctactcgctcgtggtggacaaggaccccgcgctcggcgacttcacgaccatccaggccgccgtcgactcgctcccggccatcaacctcgtccgcgtcgtcatcagggtcaacgccggcacctacacggagaaggtgaccgtctcggcgatgcgcgcgttcatcaccctggagggcgccggcgcggacaagacggtcgtgcagtggggcgacaccgcggactcgccgaccgggcccaagggccggcccctcggcacgttcaactcggcgtccttcgccgtgaacgcgcagtacttcctggcaaggaacatcactttcaagaacacgtcgccggtgccgaagcctggggcggcggggaagcaggcggtggcgctgcgggtgtcggcggacaacgcggcgttcgtggggtgcaggttcctgggcgcgcaggacacgctgtacgaccactcgggccgccactactacaaggactgctacatccaagggtccgtggacttcatcttcggcaacgcgctgtcgctgtacgaggactgccacgtgcacgcgatcgcgcgggactacggggcgctgacggcgcagaaccggcagagcatgctggaggacacggggttctcgttcgtcaactgccgggtgacggggtccggcgcgctctacctgggccgcgcctggggcaccttctcccgcgtcgtcttcgcctacacccacatggacgacatcatcgtccccaacgggtggttcaactggggcgaccccaaccgcgagctgtacgtcgtccccatctatccatcctctgctgttgcttgcgccattgccttctgatggggctagcggacgccatgccaggcgtgcaaaagcgcacacaaagggagggaacactcaccgcaccggctccattccattccattccacttccggtgaatcatccgtcgtgatcgtggaggggcttttaagattcgattcccgctggcccgccgccaccagcacaggcgcaccgcgcacgggcagcactcacccgtcaaatgccaaaggctaccaaaaaatgaccttctctcgtgttgctgctgcaggacggtgttctacgggcagtacaagtgcacgggcccgggcgcgacctatgccggccgggtggcgtggtcgcacgagctcaccgacgacgaggccaagcccttcatctcgctcagcttcatcgatggcaccgagtgggtcaggctgtagctgtaaatctcgcagccgctcacgccaccacgccgcacactgtaaagaaacagagcaagacagtatatacagattttatactttccgttcctcgaccgagcccaaaactctggagtctggatgcagcgtctcgatggaatgagcttttgcccaaaacccgtactcgtcagataagggcgggtttgttggatacgagaggaattcttttgctatttaaattgaaaagcaagatgatttctcttcatagatctcgtgattcatgttcaccaaaccatccgcacgggaagaaatctcctctccatagatctcgtgatccatgaatcctatcactatccccatactttagtaacctcaaatccccttcgggattagaggggattatagtgaaaataaactaatttcctatctaatcccctttaatccgaaagagatttgactttcca

SEQ ID NO: 32035 - DNA, 1750 bp, Zea Mays
cgtgaccgtgatcgagctccttaaattcccccctcccaccatctatcctctccgcctcccctacctcgccacagttccacacccacacctgccacgtccctccagcttccgcactcgctgcgaaatccggaatgggcacgccacgagcacgattgttggcccgcattgccgtggcggccgtcgtgctcctcgcgccgacgacgacgtgcggggtggccgggcactcgcgggcgctgcggcccggcggcgggcgcggccagcagcagccgtcgtcgctgttcccggcgaacgcgacgcgcgcggaggcgatcgagcggcagttcgtggagtgggtgcggtacgtgggcgggctccggcacagcacgttccagcacgcggtcgcccgcgcgtccccctcctactcgctcgtggtggacaaggaccccgcgctcggcgacttcacgaccatccaggccgccgtcgactcgctcccggccatcaacctcgtccgcgtcgtcatcagggtcaacgccggcacctacacggagaaggtgaccgtctcggcgatgcgcgcgttcatcaccctggagggcgccggcgcggacaagacggtcgtgcagtggggcgacaccgcggactcgccgaccgggcccaagggccggcccctcggcacgttcaactcggcgtccttcgccgtgaacgcgcagtacttcctggcaaggaacatcactttcaagaacacgtcgccggtgccgaagcctggggcggcggggaagcaggcggtggcgctgcgggtgtcggcggacaacgcggcgttcgtggggtgcaggttcctgggcgcgcaggacacgctgtacgaccactcgggccgccactactacaaggactgctacatccaagggtccgtggacttcatcttcggcaacgcgctgtcgctgtacgaggactgccacgtgcacgcgatcgcgcgggactacggggcgctgacggcgcagaaccggcagagcatgctggaggacacggggttctcgttcgtcaactgccgggtgacggggtccggcgcgctctacctgggccgcgcctggggcaccttctcccgcgtcgtcttcgcctacacccacatggacgacatcatcgtccccaacgggtggttcaactggggcgaccccaaccgcgagctgacggtgttctacgggcagtacaagtgcacgggcccgggcgcgacctatgccggccgggtggcgtggtcgcacgagctcaccgacgacgaggccaagcccttcatctcgctcagcttcatcgatggcaccgagtgggtcaggctgtagctgtaaatctcgcagccgctcacgccaccacgccgcacactgtaaagaaacagagcaagacagtatatacagattttatactttccgttcctcgaccgagcccaaaactctggagtctggatgcagcgtctcgatggaatgagcttttgcccaaaacccgtactcgtcagataagggcgggtttgttggatacgagaggaattcttttgctatttaaattgaaaagcaagatgatttctcttcatagatctcgtgattcatgttcaccaaaccatccgcacgggaagaaatctcctctccatagatctcgtgatccatgaatcctatcactatccccatactttagtaacctcaaatccccttcgggattagaggggattatagtgaaaataaactaatttcctatctaatcccctttaatccgaaagagatttgactttcca

SEQ ID NO: 32036 - DNA, 1760 bp, Zea Mays
ccttatcccacgaacgtgggggatccaggccgtcagcgcccaggacaaccaaatcgcagccgttcacacttaaggggatgaacatggtctgttttatgcactggaccttggcgggaccaactttcgtgtcatccgggtccaacttggcggaagggacagacgtgtcgtgaagcaacagtatgaagaggtctccattccgcctcatcttatggttggaacttctacggaactatttgatttcattgctgctgagttggaaaaatttgtgcggactgaaggagaagatttccacctaccagatagcaagcagagggaactgggtttcaccttttctttcccagtgcaccaaacatctatatcatcggggactctaattaagtggaccaaaggattttgcatcaatggcacggttggagaagatgttgtggctgaattgagtagggccatggaaaggcagggtcttgatatgaaagttgcagctctggttaatgatactgtaggcacattggctggtgggagatatgctgataatgatgttgttgctgctgtaatattgggcactggcacaaatgcagcttatgtggaacatgcaaatgtgattcctaaatggaccgggctgctacctagatcagggaacatggtaatcaacatggagtggggaaacttcagatcagataaacttccaaggtcggagtatgataaatccttagacttcgaaagtttgaaccctggtgagcagatatatgaaaagatgatttctggaatgtatcttggagaaattgtccggaggatcctgctgaaactggctcatgatgcttcattgtttggggatgttgttcctccgaaactggaacagctatttatactgaggacgccagatatgtcagccatgcaccatgacacctcacatgatctcaaacacctgggagctaagctgaaggacattcttggggttcctgatacttctctggaagcaagatacatcactcttcatgtgtgcgaccttgtcgcagagagaggtgcacgcctggctgctgctggtatatatggtattctgaagaagctgggtaaagacaaattgctaggtgactttagccaacaaaggactgtagttgctattgacggtggcctatacgagcactacaagaagttcagtgcctgcctagaggcgacgctcacagacctgctcggcgaggaggttgcctcatcggttgttgtcaagttggccaacgacggctcaggaattggagctgcacttcttgctgcctcgcactcccagtatgctgaagctgcatagttctaggagctcgggggtcctagtgtaacctttttttttgtttcccaccatttcccccttcaatcgagaagcccccctcgtgcgattcgcatctctctattttctttcctcagcagcgggatatagctaggatggtgccattgagcttggagtacattatcactagcaacaagcattagcagcggcaggaaagaagtggaagcggaggcctgaataagccgttccattcctgccgattctttttcttcccaatcccttgaagtttgtattatgaggcgatatcacaaaacagccagttcttatctgtgtgatctcgtctttcaaaataaggagagaggtgggggaccaaatcatacagtctttactcattttttattgaatcgtgcagtgcttctgcctttatttcagaaacaactgcaatggcaatatttgcttgttcttatgtttgattggtcaaatgtgt

SEQ ID NO: 32037 - DNA, 1736 bp, Zea Mays
gagaagcggggggctcgcagaggcgtagctcgcgatccgggcgccgagctgggatgaacatggtctgttttatgcactggaccttggcgggaccaactttcgtgtcatccgggtccaacttggcggaagggacagacgtgtcgtgaagcaacagtatgaagaggtctccattccgcctcatcttatggttggaacttctacggaactatttgatttcattgctgctgagttggaaaaatttgtgcggactgaaggagaagatttccacctaccagatagcaagcagagggaactgggtttcaccttttctttcccagtgcaccaaacatctatatcatcggggactctaattaagtggaccaaaggattttgcatcaatggcacggttggagaagatgttgtggctgaattgagtagggccatggaaaggcagggtcttgatatgaaagttgcagctctggttaatgatactgtaggcacattggctggtgggagatatgctgataatgatgttgttgctgctgtaatattgggcactggcacaaatgcagcttatgtggaacatgcaaatgtgattcctaaatggaccgggctgctacctagatcagggaacatggtaatcaacatggagtggggaaacttcagatcagataaacttccaaggtcggagtatgataaatccttagacttcgaaagtttgaaccctggtgagcagatatatgaaaagatgatttctggaatgtatcttggagaaattgtccggaggatcctgctgaaactggctcatgatgcttcattgtttggggatgttgttcctccgaaactggaacagctatttatactgaggacgccagatatgtcagccatgcaccatgacacctcacatgatctcaaacacctgggagctaagctgaaggacattcttggggttcctgatacttctctggaagcaagatacatcactcttcatgtgtgcgaccttgtcgcagagagaggtgcacgcctggctgctgctggtatatatggtattctgaagaagctgggtaaagacaaattgctaggtgactttagccaacaaaggactgtagttgctattgacggtggcctatacgagcactacaagaagttcagtgcctgcctagaggcgacgctcacagacctgctcggcgaggaggttgcctcatcggttgttgtcaagttggccaacgacggctcaggaattggagctgcacttcttgctgcctcgcactcccagtatgctgaagctgcatagttctaggagctcgggggtcctagtgtaacctttttttttgtttcccaccatttcccccttcaatcgagaagcccccctcgtgcgattcgcatctctctattttctttcctcagcagcgggatatagctaggatggtgccattgagcttggagtacattatcactagcaacaagcattagcagcggcaggaaagaagtggaagcggaggcctgaataagccgttccattcctgccgattctttttcttcccaatcccttgaagtttgtattatgaggcgatatcacaaaacagccagttcttatctgtgtgatctcgtctttcaaaataaggagagaggtgggggaccaaatcatacagtctttactcattttttattgaatcgtgcagtgcttctgcctttatttcagaaacaactgcaatggcaatatttgcttgttcttatgtttgattggtcaaatgtgt

SEQ ID NO: 32038 - DNA, 1711 bp, Zea Mays
gtctcatttacaccaccacctttccgggatgaacatggtctgttttatgcactggaccttggcgggaccaactttcgtgtcatccgggtccaacttggcggaagggacagacgtgtcgtgaagcaacagtatgaagaggtctccattccgcctcatcttatggttggaacttctacggaactatttgatttcattgctgctgagttggaaaaatttgtgcggactgaaggagaagatttccacctaccagatagcaagcagagggaactgggtttcaccttttctttcccagtgcaccaaacatctatatcatcggggactctaattaagtggaccaaaggattttgcatcaatggcacggttggagaagatgttgtggctgaattgagtagggccatggaaaggcagggtcttgatatgaaagttgcagctctggttaatgatactgtaggcacattggctggtgggagatatgctgataatgatgttgttgctgctgtaatattgggcactggcacaaatgcagcttatgtggaacatgcaaatgtgattcctaaatggaccgggctgctacctagatcagggaacatggtaatcaacatggagtggggaaacttcagatcagataaacttccaaggtcggagtatgataaatccttagacttcgaaagtttgaaccctggtgagcagatatatgaaaagatgatttctggaatgtatcttggagaaattgtccggaggatcctgctgaaactggctcatgatgcttcattgtttggggatgttgttcctccgaaactggaacagctatttatactgaggacgccagatatgtcagccatgcaccatgacacctcacatgatctcaaacacctgggagctaagctgaaggacattcttggggttcctgatacttctctggaagcaagatacatcactcttcatgtgtgcgaccttgtcgcagagagaggtgcacgcctggctgctgctggtatatatggtattctgaagaagctgggtaaagacaaattgctaggtgactttagccaacaaaggactgtagttgctattgacggtggcctatacgagcactacaagaagttcagtgcctgcctagaggcgacgctcacagacctgctcggcgaggaggttgcctcatcggttgttgtcaagttggccaacgacggctcaggaattggagctgcacttcttgctgcctcgcactcccagtatgctgaagctgcatagttctaggagctcgggggtcctagtgtaacctttttttttgtttcccaccatttcccccttcaatcgagaagcccccctcgtgcgattcgcatctctctattttctttcctcagcagcgggatatagctaggatggtgccattgagcttggagtacattatcactagcaacaagcattagcagcggcaggaaagaagtggaagcggaggcctgaataagccgttccattcctgccgattctttttcttcccaatcccttgaagtttgtattatgaggcgatatcacaaaacagccagttcttatctgtgtgatctcgtctttcaaaataaggagagaggtgggggaccaaatcatacagtctttactcattttttattgaatcgtgcagtgcttctgcctttatttcagaaacaactgcaatggcaatatttgcttgttcttatgtttgattggtcaaatgtgt

SEQ ID NO: 32039 - DNA, 911 bp, Zea Mays
ccaaaatcaacttatataaaggacgccagatatgtcagccatgcaccatgacacctcacatgatctcaaacacctgggagctaagctgaaggacattcttggggttcctgatacttctctggaagcaagatacatcactcttcatgtgtgcgaccttgtcgcagagagaggtgcacgcctggctgctgctggtatatatggtattctgaagaagctgggtaaagacaaattgctaggtgactttagccaacaaaggactgtagttgctattgacggtggcctatacgagcactacaagaagttcagtgcctgcctagaggcgacgctcacagacctgctcggcgaggaggttgcctcatcggttgttgtcaagttggccaacgacggctcaggaattggagctgcacttcttgctgcctcgcactcccagtatgctgaagctgcatagttctaggagctcgggggtcctagtgtaacctttttttttgtttcccaccatttcccccttcaatcgagaagcccccctcgtgcgattcgcatctctctattttctttcctcagcagcgggatatagctaggatggtgccattgagcttggagtacattatcactagcaacaagcattagcagcggcaggaaagaagtggaagcggaggcctgaataagccgttccattcctgccgattctttttcttcccaatcccttgaagtttgtattatgaggcgatatcacaaaacagccagttcttatctgtgtgatctcgtctttcaaaataaggagagaggtgggggaccaaatcatacagtctttactcattttttattgaatcgtgcagtgcttctgcctttatttcagaaacaactgcaatggcaatatttgcttgttcttatgtttgattggtcaaatgtgt

SEQ ID NO: 32040 - DNA, 1292 bp, Zea Mays
cctccaaccctaactggaatcaaacgcagggtccgctgtgcagctgtgctagcgccgccatacgcccatacggtcctccctcctcccaacgtctccacctctctctccacctgacggcaaccttcatgctccctctctctctctccacctgacggcaacctccgtgctccccaacatctccctcctccccaacgtctccctccaccactacctcctccccaacacctccctcatccactccctcctccccaacatggaaaccgacgagtgcctcaacaacaagggcggttgctgatctgctacgccgatgtgaccttcagatccgccgttctcgagtatctcgccgtcaagaataatccagatgcaaaagggttgtatggagtgtcctttccttactatgatgaactttcaatggtatattccaaggacatggccataggtgaaggtgcggaagacatgacagatgctgttcaaaacttggaagaagagttagttcgtgtaaatgctaatgatgaagaggatggagaggatatgacatctgtagagacaccaaggcgttctgttgactcaacatcatctagctccaagaagcggaagaaagagtggaaaggaaagaagacttcatcaagtgacccgcttcttgatgtgttcaatgaagtgagtggtgatctcaaggttgccaccatgtcaattggaaaaatggcgcaagctatggatcgtgaggcatccaatcaagagaaggcaagagatgaggatccacaacaaaagctaagagagaaggcaatcaatgaggtccggagacttgaatttactggctcaaaagttatcaaagcagctggtgtgtttgttaggatgccagatcaaatggggatgttgtttgcacttccagaacgactgaggagggaatacattgtcgacatgctacgtgatgaagcagcaaggagagagagaaagaggtcaaagtgaaggtgctggtctagatgttgaatgatggagctttggaagttgctgttggtttagttggtctcaatctgtttacctttagtgttcttcatatgttgctgttgaatgacggtgaatgatgataaaaactgaatttttatgatgttgaacgttgttgaatgttcacaagtggtgttgaatatgatattgtatctgtgggtagctttcaatgtggtttgttgaatgtcggtacctttcaatatggtaaaaactgaaattttatgagttttgaatgttgtttaatgttcacgaagggaatgatgttgaacgatggtaaatactgaattttt

SEQ ID NO: 32041 - DNA, 317 bp, Zea Mays
ctccacctctctctccacctgacggcaaccttcatgctccctctctctctctccacctgacggcaacctccgtgctccccaacatctccctcctccccaacgtctccctccaccactacctcctccccaacacctccctcatccactccctcctccccaacatggaaaccgacgagtgcctcaacaacaagggcggttgctgatctgctacgccgatgtgaccttcagatccgccgttctcgagtatctcgccgtcaaggtaatcgccgtcaacgtttccctccctgtcaagaaccgaacaattggaaggattttat

SEQ ID NO: 32042 - DNA, 1036 bp, Zea Mays
gaaaccgacgagtgcctcgacaacaagggcgactgctgatctgctacgccgatgtgaccttcagatccgccgttctcgagtatctcgccgtcaagaataatccagatgcaaaagggttgtatggagtgtcctttccttactatgatgaactttcaatggtatattccaaggacatggccataggtgaaggtgcggaagacatgacagatgctgttcaaaacttggaagaagagttagttcgtgtaaatgctaatgatgaagaggatggagaggatatgacatctgtagagacaccaaggcgttctgttgactcaacatcatctagctccaagaagcggaagaaagagtggaaaggaaagaagacttcatcaagtgacccgcttcttgatgtgttcaatgaagtgagtggtgatctcaaggttgccaccatgtcaattggaaaaatggcgcaagctatggatcgtgaggcatccaatcaagagaaggcaagagatgaggatccacaacaaaagctaagagagaaggcaatcaatgaggtccggagacttgaatttactggctcaaaagttatcaaagcagctggtgtgtttgttaggatgccagatcaaatggggatgttgtttgcacttccagaacgactgaggagggaatacattgtcgacatgctacgtgatgaagcagcaaggagagagagaaagaggtcaaagtgaaggtgctggtctagatgttgaatgatggagctttggaagttgctgttggtttagttggtctcaatctgtttacctttagtgttcttcatatgttgctgttgaatgacggtgaatgatgataaaaactgaatttttatgatgttgaacgttgttgaatgttcacaagtggtgttgaatatgatattgtatctgtgggtagctttcaatgtggtttgttgaatgtcggtacctttcaatatggtaaaaactgaaattttatgagttttgaatgttgtttaatgttcacgaagggaatgatgttgaacgatggtaaatactgaattttt

SEQ ID NO: 32043 - DNA, 2106 bp, Zea Mays
cagcgtgcgtttcgtaagccgagtagccgaccacgcgaagcatccagcagtgctcaactctgttcgccaccgccagtctgccacactccatgccccaccaccacctcgccgcctcgaaggcagaaccctaggcagcccccaatgccgccccaccgcctccttccccttctcctcctactcctgcctctcggcgtctccggcgccgccgctgccggggggaacgccacgtcggcgccgctcccctgctccgagctctcgcgcgtctgcacggccttcatcgccttcccgactgccggcgcggggcccgccaatgccacggtgctcgagtccatgttcgacgccgcgccgggcgacctcacggccgacgccgcggccagcccgaggtacgccttcgtgcgtaagaactgctcctgcctcccgtcccgcacctacctcgccaacaccacctacaccatcccctcctccgcgacgacctccttccccaataccaccgccgccgatgtcgcggctgcggcgtactcgggcctcgccgtgccgccgcctggcggggcggcgcagcgaccgccgcgaccgggagcggttgtggcgctccacctgctctgcggctgctcgtccgggccctggaactaccttctcacctatgtcggcgtcgaaggggacacagtggaatcactatcgagtaggttcggggcgagcatggatgccatcgagactgccaatgccatggccggccccgaccccatcaccgcgggaaaggtgtactacatcccactcaactcagttcctggacaggcatatgttaaaaccaactcctcctgccccagccccagcgccaacagactatacattgtcagggacaccagattaccattcaagcaaatttccttatggatgggttattggtagcatgggagttgcgcttgctttaattgttattgctgttcttgcacttgtcctatggaaattctttggatataaaccccaagatcgtaacggccagagaaagagcccagaccgacataagtttcaactccttaagagtggtagtttctgttatggttctggaagatatttgtgttgccaatttggaaatgcaaagccaacaagagcggatggtggtgagcatcatatcaatgtccccaaaggtgtagcagcagacgtatttgatagggagaagcctattgtgtttacgcacgaagaaatactcatatcaactgactcattttcggatgcaaatcttcttggtcatggtacatatggttctgtctattacggtgttctccgagagcaggaggttgcgataaagagaatgatggccactaaaacaaaagaattcatagtggaaatgaaagttctttgcaaggttcatcatgctagtctgaattgattggctatgcagcaggcaaggatgagcttttcctggtttatgagtactctcaaaatggttcactcaaaaatcatctacatgatcctgaaagaaaggggtgttcatcactttcatggatctttcgggtccaaattgcacttgatgctgccagaggactagaatacattcatgagcacaccaaagatcattatgttcatagagacattaaatcaagtaatatcttgcttgatggttccttcagagcgaagatttcagattttggccttgcaaaacttgtagtgaaatccaatgacgcagaggcttctgtcactaaggttgttggaacttttggttatttagcccctgaatacctgcgggatggcctggcaactacgaagagtgatgtctatgcttttggtgtggtactttttgagctaatatctggaaaggaggcgattacaagagctgaaggaatgggtgcaagctcaaactccgagcgatgctcactggcatcagttatgttagctgccgtaaggaaatgtcctaattcaacgtatatggggaacctgaaagactgcattgaccataatctaagggatctgtatccttatgactgtgcgtacaagatggccatgctagcaaaacagtgcgtggacgaagaccctgttctacggccggacatgaagcaggctgcagctgtattcctgtgggtgtggccctatcacaaaagaatattgtag

SEQ ID NO: 32044 - DNA, 2488 bp, Zea Mays
cgtaagccgagtagccgaccacgcgaagcatccagcagtgctcaactctgttcgccaccgccagtctgccacactccatgccccaccaccacctcgccgcctcgaaggcagaaccctaggcagcccccaatgccgccccaccgcctccttccccttctcctcctactcctgcctctcggcgtctccggcgccgccgctgccggggggaacgccacgtcggcgccgctcccctgctccgagctctcgcgcgtctgcacggccttcatcgccttcccgactgccggcgcggggcccgccaatgccacggtgctcgagtccatgttcgacgccgcgccgggcgacctcacggccgacgccgcggccagcccgaggtacgccttcgtgcgtaagaactgctcctgcctcccgtcccgcacctacctcgccaacaccacctacaccatcccctcctccgcgacgacctccttccccaataccaccgccgccgatgtcgcggctgcggcgtactcgggcctcgccgtgccgccgcctggcggggcggcgcagcgaccgccgcgaccgggagcggttgtggcgctccacctgctctgcggctgctcgtccgggccctggaactaccttctcacctatgtcggcgtcgaaggggacacagtggaatcactatcgagtaggttcggggcgagcatggatgccatcgagactgccaatgccatggccggccccgaccccatcaccgcgggaaaggtgtactacatcccactcaactcagttcctggacaggcatatgttaaaaccaactcctcctgccccagccccagcgccaacagactatacattgtcagggacaccagattaccattcaagcaaatttccttatggatgggttattggtagcatgggagttgcgcttgctttaattgttattgctgttcttgcacttgtcctatggaaattctttggatataaaccccaagatcgtaacggccagagaaagagcccagaccgacataagtttcaactccttaagagtggtagtttctgttatggttctggaagatatttgtgttgccaatttggaaatgcaaagccaacaagagcggatggtggtgagcatcatatcaatgtccccaaaggtgtagcagcagacgtatttgatagggagaagcctattgtgtttacgcacgaagaaatactcatatcaactgactcattttcggatgcaaatcttcttggtcatggtacatatggttctgtctattacggtgttctccgagagcaggaggttgcgataaagagaatgatggccactaaaacaaaagaattcatagtggaaatgaaagttctttgcaaggttcatcatgctagtctggtagaattgattggctatgcagcaggcaaggatgagcttttcctggtttatgagtactctcaaaatggttcactcaaaaatcatctacatgatcctgaaagaaaggggtgttcatcactttcatggatctttcgggtccaaattgcacttgatgctgccagaggactagaatacattcatgagcacaccaaagatcattatgttcatagagacattaaatcaagtaatatcttgcttgatggttccttcagagcgaagatttcagattttggccttgcaaaacttgtagtgaaatccaatgacgcagaggcttctgtcactaaggttgttggaacttttggttatttagcccctgaatacctgcgggatggcctggcaactacgaagagtgatgtctatgcttttggtgtggtactttttgagctaatatctggaaaggaggcgattacaagagctgaaggaatgggtgcaagctcaaactccgagcgatgctcactggcatcagttatgttagctgccgtaaggaaatgtcctaattcaacgtatatggggaacctgaaagactgcattgaccataatctaagggatctgtatccttatgactgtgcgtacaagatggccatgctagcaaaacagtgcgtggacgaagaccctgttctacggccggacatgaagcaggtggtaatcacgctctctcaaatactgctgtcttctatcgagtgggaggcaacacaggctgggaacagccaagtgtttagtggtcttgtggcggggaggtgatctggtcaacacaggctgctgtacatgctcttgagtgatctactcacctgatccaccggagacatattcgcctatggccctcctctttatatcttactggtcctttgtccagttgagcgattttcaggtttcttctgagctctgagagaatacctaccagagtgcaatatattttttggtgggtggtacagtatgtagcaacgtatgtatacaagaatctaccttgtgatgcaatgtcctgatgagtcatttcgtttgttccgctgctgctatgccctgacttgtgtttgtagaccaaattcagcagcagcgactgcaacgtgtacttgtgtattgtgg

SEQ ID NO: 32045 - DNA, 2456 bp, Zea Mays
cgtaagccgagtagccgaccacgcgaagcatccagcagtgctcaactctgttcgccaccgccagtctgccacactccatgccccaccaccacctcgccgcctcgaaggcagaaccctaggcagcccccaatgccgccccaccgcctccttccccttctcctcctactcctgcctctcggcgtctccggcgccgccgctgccggggggaacgccacgtcggcgccgctcccctgctccgagctctcgcgcgtctgcacggccttcatcgccttcccgactgccggcgcggggcccgccaatgccacggtgctcgagtccatgttcgacgccgcgccgggcgacctcacggccgacgccgcggccagcccgaggtacgccttcgtgcgtaagaactgctcctgcctcccgtcccgcacctacctcgccaacaccacctacaccatcccctcctccgcgacgacctccttccccaataccaccgccgccgatgtcgcggctgcggcgtactcgggcctcgccgtgccgccgcctggcggggcggcgcagcgaccgccgcgaccgggagcggttgtggcgctccacctgctctgcggctgctcgtccgggccctggaactaccttctcacctatgtcggcgtcgaaggggacacagtggaatcactatcgagtaggttcggggcgagcatggatgccatcgagactgccaatgccatggccggccccgaccccatcaccgcgggaaaggtgtactacatcccactcaactcagttcctggacaggcatatgttaaaaccaactcctcctgccccagccccagcgccaacagactatacattgtcagggacaccagattaccattcaagcaaatttccttatggatgggttattggtagcatgggagttgcgcttgctttaattgttattgctgttcttgcacttgtcctatggaaattctttggatataaaccccaagatcgtaacggccagagaaagagcccagaccgacataagtttcaactccttaagagtggtagtttctgttatggttctggaagatatttgtgttgccaatttggaaatgcaaagccaacaagagcggatggtggtgagcatcatatcaatgtccccaaaggtgtagcagcagacgtatttgatagggagaagcctattgtgtttacgcacgaagaaatactcatatcaactgactcattttcggatgcaaatcttcttggtcatggtacatatggttctgtctattacggtgttctccgagagcaggaggttgcgataaagagaatgatggccactaaaacaaaagaattcatagtggaaatgaaagttctttgcaaggttcatcatgctagtctggtagaattgattggctatgcagcaggcaaggatgagcttttcctggtttatgagtactctcaaaatggttcactcaaaaatcatctacatgatcctgaaagaaaggggtgttcatcactttcatggatctttcgggtccaaattgcacttgatgctgccagaggactagaatacattcatgagcacaccaaagatcattatgttcatagagacattaaatcaagtaatatcttgcttgatggttccttcagagcgaagatttcagattttggccttgcaaaacttgtagtgaaatccaatgacgcagaggcttctgtcactaagatacctgcgggatggcctggcaactacgaagagtgatgtctatgcttttggtgtggtactttttgagctaatatctggaaaggaggcgattacaagagctgaaggaatgggtgcaagctcaaactccgagcgatgctcactggcatcagttatgttagctgccgtaaggaaatgtcctaattcaacgtatatggggaacctgaaagactgcattgaccataatctaagggatctgtatccttatgactgtgcgtacaagatggccatgctagcaaaacagtgcgtggacgaagaccctgttctacggccggacatgaagcaggtggtaatcacgctctctcaaatactgctgtcttctatcgagtgggaggcaacacaggctgggaacagccaagtgtttagtggtcttgtggcggggaggtgatctggtcaacacaggctgctgtacatgctcttgagtgatctactcacctgatccaccggagacatattcgcctatggccctcctctttatatcttactggtcctttgtccagttgagcgattttcaggtttcttctgagctctgagagaatacctaccagagtgcaatatattttttggtgggtggtacagtatgtagcaacgtatgtatacaagaatctaccttgtgatgcaatgtcctgatgagtcatttcgtttgttccgctgctgctatgccctgacttgtgtttgtagaccaaattcagcagcagcgactgcaacgtgtacttgtgtattgtgg

SEQ ID NO: 32046 - DNA, 2484 bp, Zea Mays
cgtaagccgagtagccgaccacgcgaagcatccagcagtgctcaactctgttcgccaccgccagtctgccacactccatgccccaccaccacctcgccgcctcgaaggcagaaccctaggcagcccccaatgccgccccaccgcctccttccccttctcctcctactcctgcctctcggcgtctccggcgccgccgctgccggggggaacgccacgtcggcgccgctcccctgctccgagctctcgcgcgtctgcacggccttcatcgccttcccgactgccggcgcggggcccgccaatgccacggtgctcgagtccatgttcgacgccgcgccgggcgacctcacggccgacgccgcggccagcccgaggtacgccttcgtgcgtaagaactgctcctgcctcccgtcccgcacctacctcgccaacaccacctacaccatcccctcctccgcgacgacctccttccccaataccaccgccgccgatgtcgcggctgcggcgtactcgggcctcgccgtgccgccgcctggcggggcggcgcagcgaccgccgcgaccgggagcggttgtggcgctccacctgctctgcggctgctcgtccgggccctggaactaccttctcacctatgtcggcgtcgaaggggacacagtggaatcactatcgagtaggttcggggcgagcatggatgccatcgagactgccaatgccatggccggccccgaccccatcaccgcgggaaaggtgtactacatcccactcaactcagttcctggacaggcatatgttaaaaccaactcctcctgccccagccccagcgccaacagactatacattgtcagggacaccagattaccattcaagcaaatttccttatggatgggttattggtagcatgggagttgcgcttgctttaattgttattgctgttcttgcacttgtcctatggaaattctttggatataaaccccaagatcgtaacggccagagaaagagcccagaccgacataagtttcaactccttaagagtggtagtttctgttatggttctggaagatatttgtgttgccaatttggaaatgcaaagccaacaagagcggatggtggtgagcatcatatcaatgtccccaaaggtgtagcagcagacgtatttgatagggagaagcctattgtgtttacgcacgaagaaatactcatatcaactgactcattttcggatgcaaatcttcttggtcatggtacatatggttctgtctattacggtgttctccgagagcaggaggttgcgataaagagaatgatggccactaaaacaaaagaattcatagtggaaatgaaagttctttgcaaggttcatcatgctagtctgaattgattggctatgcagcaggcaaggatgagcttttcctggtttatgagtactctcaaaatggttcactcaaaaatcatctacatgatcctgaaagaaaggggtgttcatcactttcatggatctttcgggtccaaattgcacttgatgctgccagaggactagaatacattcatgagcacaccaaagatcattatgttcatagagacattaaatcaagtaatatcttgcttgatggttccttcagagcgaagatttcagattttggccttgcaaaacttgtagtgaaatccaatgacgcagaggcttctgtcactaaggttgttggaacttttggttatttagcccctgaatacctgcgggatggcctggcaactacgaagagtgatgtctatgcttttggtgtggtactttttgagctaatatctggaaaggaggcgattacaagagctgaaggaatgggtgcaagctcaaactccgagcgatgctcactggcatcagttatgttagctgccgtaaggaaatgtcctaattcaacgtatatggggaacctgaaagactgcattgaccataatctaagggatctgtatccttatgactgtgcgtacaagatggccatgctagcaaaacagtgcgtggacgaagaccctgttctacggccggacatgaagcaggtggtaatcacgctctctcaaatactgctgtcttctatcgagtgggaggcaacacaggctgggaacagccaagtgtttagtggtcttgtggcggggaggtgatctggtcaacacaggctgctgtacatgctcttgagtgatctactcacctgatccaccggagacatattcgcctatggccctcctctttatatcttactggtcctttgtccagttgagcgattttcaggtttcttctgagctctgagagaatacctaccagagtgcaatatattttttggtgggtggtacagtatgtagcaacgtatgtatacaagaatctaccttgtgatgcaatgtcctgatgagtcatttcgtttgttccgctgctgctatgccctgacttgtgtttgtagaccaaattcagcagcagcgactgcaacgtgtacttgtgtattgtgg

SEQ ID NO: 32047 - DNA, 2318 bp, Zea Mays
agtccaaagtggtgaacctctcccgccgacgacgctcgcatacactccaattccccccccccccccccccccccccccccccttcctagtcagttcccccacctcatgactcctgaggtcttgctctagctcgagcgccatggccacgtctcgctgcggtaaacagcggcagccgctcctccactctcccacgcccgcagacgccaacggtggcggcgcagccaagaggcgcaggttcgtctcgttcctcgccgtcacggcagctcttgtcgcgtcctaccacctcctcgtgccaaccaattcgtcgcactaccacgcactattcctctccctcggttccaacgccaccgcggcggcccacctacgcgcgctcaccctccgcccccacgtcgctggcaccgaggccaacgcggccaccgcccgctacgtgctccacgccttctcctccctctccttcccagcacacatcaccccttactcggttctcctctcctaccccgtccaccgctccctctccctcgccgcggcgcccggcctagccgccaggccgttctccttggtgcaagagacctacaaaggcgacccgtacgctgaggccgccgcggaggtcctcccgacgtacttcgcctactcgggatccggctccgtcaccgccgagcgaggagatgccgggcatcccggcgctgccagtgtcggccagggacggggagacaatcctcaaggcgatgggcggcgatgtcgcgccacccaagtggcagggcggcgacggcgcgcccgtgtaccggctcggccccggcccggccgtgttgaacctcacctacattggaaacgagactttagcaacaatcgaaaatgtgtttgcggtgatagaaggaaaagaggagcctgacagatatgtgatcataggcaaccatcgtgatgcttggacatttggagcagttgatcctaacagtggaacagcagccatgcttgagatcgcggagaggctgtccaagctacaagcgaaagggtggaggcctagaagaacaataatcctatgcagttgggacgcagaagagtttgccctgatagggtctactgaatgggccgaggagaacatggacactctagcttcaagagctatagcttacctgaacgtggacatatcagtgtttggtcctgggggtcttatgccccgtgcgacccctcaacttgatgaattgatcaaagaagcaagtaaaatggtaccagatcctgatgaaccatctcaaaccttgtatgacaccatgatgcgccatcatccaccgatcactagagtggctggtgctggaacagattttgcagcatttgtccagcatataggagtcccgtcactcgacatgtcttatgggctgtttgaagaataccctgtttaccactcgttgtatgatgattatgtttgggtggagaggtttggagaccccttgttccacaggcatgttgcaggagtgcacaaaagatatcgtagataaatgtaaaggatttcctgtcagtttctctcctttgcagaactccatcaagcagctcgagagtgctgccaccaaaatttacaaagagaagaagttgctgcaagcagaaaactggagcctaaagacaagtaagtatacgctgaaagtcagggagataaacgaccggttgatgatggccgagcgagcgttcaccaaccgagaaggactggtcgggagaccatggtacaagcatatgatatatgcatcatcggatcaagacgactgggggaccaaagccttccctggtatagtctcggccatggacaaggctaagaagtccaacacaaccgagacgtggcgactgctgcagcacgagatttacagggttgccagggctgtgtccaaggcttctgcagtcctggatggtaaactaacatgatgtgcacgtgcactgcagattttcattctattctacatagatcgaagtacccgatggattcagtttccatttcgtttcttgaaagctgaagtgcgtggaatacctgtcaggcatcattggataattgtgtaaataatgaagaaatatgctcaagttagtgtcctatgaataaagaatagtggaatcatctctcacgatgattcccttgagagtatcgccaatcattttcctgggagttgcatgttgttcttgctctcgctatctcggcgaccgctgcaaattgagcgtaccatctgtgtataaatatatctcatctatgaggtgtggagctaggctgaaactgattggcgcggtgtcggactggtatacaccatgtcagcagcatgggacctacaataaaaccattcttgttt

SEQ ID NO: 32048 - DNA, 1060 bp, Zea Mays
gtgaatttgcaagatttttaaaatgcagttaattcacaagactgggaaccatggctttgcatgatcaataaccactaatgaggtttggagaccccttgttccacaggcatgttgcagtggccagcgtttggggtctgattgcactgaaacttgctgacgacgagatcatacccttcaattacgtctcttatgcctccgaactggaggagtgcacaaaagatatcgtagataaatgtaaaggatttcctgtcagtttctctcctttgcagaactccatcaagcagctcgagagtgctgccaccaaaatttacaaagagaagaagttgctgcaagcagaaaactggagcctaaagacaagtaagtatacgctgaaagtcagggagataaacgaccggttgatgatggccgagcgagcgttcaccaaccgagaaggactggtcgggagaccatggtacaagcatatgatatatgcatcatcggatcaagacgactgggggaccaaagccttccctggtatagtctcggccatggacaaggctaagaagtccaacacaaccgagacgtggcgactgctgcagcacgagatttacagggttgccagggctgtgtccaaggcttctgcagtcctggatggtaaactaacatgatgtgcacgtgcactgcagattttcattctattctacatagatcgaagtacccgatggattcagtttccatttcgtttcttgaaagctgaagtgcgtggaatacctgtcaggcatcattggataattgtgtaaataatgaagaaatatgctcaagttagtgtcctatgaataaagaatagtggaatcatctctcacgatgattcccttgagagtatcgccaatcattttcctgggagttgcatgttgttcttgctctcgctatctcggcgaccgctgcaaattgagcgtaccatctgtgtataaatatatctcatctatgaggtgtggagctaggctgaaactgattggcgcggtgtcggactggtatacaccatgtcagcagcatgggacctacaataaaaccattcttgttt

SEQ ID NO: 32049 - DNA, 2964 bp, Zea Mays
aaccaacattccagatcaagtaacctgtccggcgtgcgaggagtggaagttgacagcacccgccgctttaaaccccgtccgtgtcccgctagccgccattgcagagcactgactgagcacaccacccaccagctccgaagtcatgtcccacctcgacgcggcctcgctcctcgccccctcgccgccgctggcaaagccccacccgcgcagccgcttcctctgcctcatctcctccatgctcgccgtcctcggcgcctccctcgcgggtctcctcttattcgcgctccaccccgcgccgaacccggtcccgaactacgcgtcgctcttcctctccctcggatccaacgacaccgccgcctcgcacctccgagcgctcactctccacccgcacgtcgcggggaccaaggcgaacgccctcaccgcccgctacgtgttcgacgcgctctccgcgctctccttccccacccacatcacgccttactccgtcctcctctcctaccccgtccaccgctccctctccctctcggcgccaggccgcggcgtcgtcacctccttctccctaaagcaggagacctaccccaacgacccctacgcagcagccgcggcggagaccatcccgacgttctacgcgtactcggcctccgggtcggtctccgcggaggccgtgtatgctaactacggccgcgaggaggacttctcttacctcgcctcccgcggcgtggacgtcgcgggcaaggtcgcgttcgcgcggtacgggaggatccactgcgaggacatagcgcacaacgcgcgcgccgccggcgccgcggccgcggtggtgtacactgacccgctgcagtacggcggcgcacccggtgaggggtggttccccgactcgcggtggctgccgcccagcggtgtgcaggtggggagcctcttccggggcgtgggggacccgacgacgccgatgtgggcatcgtccgagggctgcgagcgcgtcagcttggaggaggccatgaataccgatgacatgccgctcatcccagccctgccggtatcggctcaggacgcgatggagatacacagagccatgggcggggccgtggcgccggaggactggcagggccgtgaagacggacccgtttaccgcctcgggccagggccggcagttttgaacctgacatatcttgggaatgattcgatggcaacgattgagaatgtcttcgccattatcgagggcgccgaagagcccgatagatatgtcattcttggtaaccatcgtgatgcttggacgttcggtgcatctgatcccaacagtggaacagcagctatgattgagttagctaaaaggttttcaatgctgcaaaaacaaggatggaggcctcgaagaactattatcttctgtagttgggacgcggaagaatacggactgacagggtcaactgaatgggttgaagaaaaccgggagatgttgtattctagagctgttgcttatctgaatattgacgtttcagtcgttggtccaggattcctgccttctacaactccccaacttgatgagttacttcagcaagtaactaaagtggttcaagaccctgataattcatctcagactgtgtatgattcatggattaaatcgagcactcctctccggactaggtgatggaggatcagactattcagcattcgtccaacatgttggtattccttcgatgaatataatttttggagaaggaccaggatatccggtttaccactccttatatgatgactacgtatggatggcgaaattcggagatcctgcgttccgtaggcatgtggcagctgctagcatatggggaatgatggctttgaggttggcaaatgaagacatcctacccttcaattacatgtcctatgcaattgagcttgaggcatacacaaaaacggtagagaatgaagtgaagggaacaactgtcacttgttcccctctgtacaactcaatcagaactctcggagcggcagctaccaaagtgaataacgaacaaaaggaacttcaaaagctactcttgagcaagcagctgaacaaggattcactgaaaatccgacaactcaatgaccgtcttatgcagaccgagcgtgcattcactagcagggaaggcatcttcaagctagaatggtttaagcatctggtgtatggaccttcagaccagaatgactgggatactgcagtctatccaggtatagccaatgccatagccagcgcccggagcagcaacacttcggagtcctggaagtttgtacagcatgagatctacagagtagccagggccgtgacacaagcatctgctatactgagtggccgtctgacatgacaggattcaaaccatattcgttaaaaaagattgttactgtggatttcggaagttttgacattttttgaaactttcgactatgaaatatctgagttgcagagaaagaccgtgcaccacattagggcttgttcgttttgctctcaatccatgtggattgggtgggattggatgagtttcaatcccaaacaagtcaaaatctttcacaattttttccaatcccatccaatccacatgagataggaataaccgaacaagcccttaaaaggatttggtataggtcagaactttccgatagggggttggaaatttcaacttgggcatactttccaaacacaaaaaagaagtgtgcagtgttgtgcttagtgtctctcagttttatattaaagaatttgttatgcacttaagcacaactagtagtgagagttgagccgctttttagtacaggttccctatactcaagaatagaaaacaagtttacaaagcattgaggttgaagcttgattgaaagctctcatttcctgtacatctattggacaaatctccatttgtgcttaacaactataatcatatcccatatgacttgttggatcctaaatttcttgtcatcaatacaccaaaaacccacttcaac

SEQ ID NO: 32050 - DNA, 3288 bp, Zea Mays
aaccaacattccagatcaagtaacctgtccggcgtgcgaggagtggaagttgacagcacccgccgctttaaaccccgtccgtgtcccgctagccgccattgcagagcactgactgagcacaccacccaccagctccgaagtcatgtcccacctcgacgcggcctcgctcctcgccccctcgccgccgctggcaaagccccacccgcgcagccgcttcctctgcctcatctcctccatgctcgccgtcctcggcgcctccctcgcgggtctcctcttattcgcgctccaccccgcgccgaacccggtcccgaactacgcgtcgctcttcctctccctcggatccaacgacaccgccgcctcgcacctccgagcgctcactctccacccgcacgtcgcggggaccaaggcgaacgccctcaccgcccgctacgtgttcgacgcgctctccgcgctctccttccccacccacatcacgccttactccgtcctcctctcctaccccgtccaccgctccctctccctctcggcgccaggccgcggcgtcgtcacctccttctccctaaagcaggagacctaccccaacgacccctacgcagcagccgcggcggagaccatcccgacgttctacgcgtactcggcctccgggtcggtctccgcggaggccgtgtatgctaactacggccgcgaggaggacttctcttacctcgcctcccgcggcgtggacgtcgcgggcaaggtcgcgttcgcgcggtacgggaggatccactgcgaggacatagcgcacaacgcgcgcgccgccggcgccgcggccgcggtggtgtacactgacccgctgcagtacggcggcgcacccggtgaggggtggttccccgactcgcggtggctgccgcccagcggtgtgcaggtggggagcctcttccggggcgtgggggacccgacgacgccgatgtgggcatcgtccgagggctgcgagcgcgtcagcttggaggaggccatgaataccgatgacatgccgctcatcccagccctgccggtatcggctcaggacgcgatggagatacacagagccatgggcggggccgtggcgccggaggactggcagggccgtgaagacggacccgtttaccgcctcgggccagggccggcagttttgaacctgacatatcttgggaatgattcgatggcaacgattgagaatgtcttcgccattatcgagggcgccgaagagcccgatagatatgtcattcttggtaaccatcgtgatgcttggacgttcggtgcatctgatcccaacagtggaacagcagctatgattgagttagctaaaaggttttcaatgctgcaaaaacaaggatggaggcctcgaagaactattatcttctgtagttgggacgcggaagaatacggactgacagggtcaactgaatgggttgaagaaaaccgggagatgttgtattctagagctgttgcttatctgaatattgacgtttcagtcgttggtccaggattcctgccttctacaactccccaacttgatgagttacttcagcaagtaactaaagtggttcaagaccctgataattcatctcagactgtgtatgattcatggattaaatcgagcactcctctccgggtgagttgttgcaacttgcttatccaacagcctaccttctatgtagtgctgagaatccagttagttgtcactataaaatagtgattgtattgttaccaagctacaagttccttttcagtttcagttccattcctcgagaattatgtggtttcaggaggacagaccacttcgacttcctgacaaattatataacattactcactattcactgcatatctcttgcgttaaggttcttagactaggtgatggaggatcagactattcagcattcgtccaacatgttggtattccttcgatgaatataatttttggagaaggtaatgcccctgctctcttctatttgtctgctcagtgacttttatttttcaatgaactttcctgggtacttttgcttttgtaggaccaggatatccggtttaccactccttatatgatgactacgtatggatggcgaaattcggagatcctgcgttccgtaggcatgtggcaggttgctcacttatactgtttttgtgcagaatattagttgaggtgttatctgcatcacatggtaaccaagatgtttcatcttgcagctgctagcatatggggaatgatggctttgaggttggcaaatgaagacatcctacccttcaattacatgtcctatgcaattgagcttgaggcatacacaaaaacggtagagaatgaagtgaagggaacaactgtcacttgttcccctctgtacaactcaatcagaactctcggagcggcagctaccaaagtgaataacgaacaaaagaccgagcgtgcattcactagcagggaaggcatcttcaagctagaatggtttaagcatctggtgtatggaccttcagaccagaatgactgggatactgcagtctatccaggtatagccaatgccatagccagcgcccggagcagcaacacttcggagtcctggaagtttgtacagcatgagatctacagagtagccagggccgtgacacaagcatctgctatactgagtggccgtctgacatgacaggattcaaaccatattcgttaaaaaagattgttactgtggatttcggaagttttgacattttttgaaactttcgactatgaaatatctgagttgcagagaaagaccgtgcaccacattagggcttgttcgttttgctctcaatccatgtggattgggtgggattggatgagtttcaatcccaaacaagtcaaaatctttcacaattttttccaatcccatccaatccacatgagataggaataaccgaacaagcccttaaaaggatttggtataggtcagaactttccgatagggggttggaaatttcaacttgggcatactttccaaacacaaaaaagaagtgtgcagtgttgtgcttagtgtctctcagttttatattaaagaatttgttatgcacttaagcacaactagtagtgagagttgagccgctttttagtacaggttccctatactcaagaatagaaaacaagtttacaaagcattgaggttgaagcttgattgaaagctctcatttcctgtacatctattggacaaatctccatttgtgcttaacaactataatcatatcccatatgacttgttggatcctaaatttcttgtcatcaatacaccaaaaacccacttcaac

SEQ ID NO: 32051 - DNA, 2878 bp, Zea Mays
aaccaacattccagatcaagtaacctgtccggcgtgcgaggagtggaagttgacagcacccgccgctttaaaccccgtccgtgtcccgctagccgccattgcagagcactgactgagcacaccacccaccagctccgaagtcatgtcccacctcgacgcggcctcgctcctcgccccctcgccgccgctggcaaagccccacccgcgcagccgcttcctctgcctcatctcctccatgctcgccgtcctcggcgcctccctcgcgggtctcctcttattcgcgctccaccccgcgccgaacccggtcccgaactacgcgtcgctcttcctctccctcggatccaacgacaccgccgcctcgcacctccgagcgctcactctccacccgcacgtcgcggggaccaaggcgaacgccctcaccgcccgctacgtgttcgacgcgctctccgcgctctccttccccacccacatcacgccttactccgtcctcctctcctaccccgtccaccgctccctctccctctcggcgccaggccgcggcgtcgtcacctccttctccctaaagcaggagacctaccccaacgacccctacgcagcagccgcggcggagaccatcccgacgttctacgcgtactcggcctccgggtcggtctccgcggaggccgtgtatgctaactacggccgcgaggaggacttctcttacctcgcctcccgcggcgtggacgtcgcgggcaaggtcgcgttcgcgcggtacgggaggatccactgcgaggacatagcgcacaacgcgcgcgccgccggcgccgcggccgcggtggtgtacactgacccgctgcagtacggcggcgcacccggtgaggggtggttccccgactcgcggtggctgccgcccagcggtgtgcaggtggggagcctcttccggggcgtgggggacccgacgacgccgatgtgggcatcgtccgagggctgcgagcgcgtcagcttggaggaggccatgaataccgatgacatgccgctcatcccagccctgccggtatcggctcaggacgcgatggagatacacagagccatgggcggggccgtggcgccggaggactggcagggccgtgaagacggacccgtttaccgcctcgggccagggccggcagttttgaacctgacatatcttgggaatgattcgatggcaacgattgagaatgtcttcgccattatcgagggcgccgaagagcccgatagatatgtcattcttggtaaccatcgtgatgcttggacgttcggtgcatctgatcccaacagtggaacagcagctatgattgagttagctaaaaggttttcaatgctgcaaaaacaaggatggaggcctcgaagaactattatcttctgtagttgggacgcggaagaatacggactggattcctgccttctacaactccccaacttgatgagttacttcagcaagtaactaaagtggttcaagaccctgataattcatctcagactgtgtatgattcatggattaaatcgagcactcctctccgggttcttagactaggtgatggaggatcagactattcagcattcgtccaacatgttggtattccttcgatgaatataatttttggagaaggaccaggatatccggtttaccactccttatatgatgactacgtatggatggcgaaattcggagatcctgcgttccgtaggcatgtggcagctgctagcatatggggaatgatggctttgaggttggcaaatgaagacatcctacccttcaattacatgtcctatgcaattgagcttgaggcatacacaaaaacggtagagaatgaagtgaagggaacaactgtcacttgttcccctctgtacaactcaatcagaactctcggagcggcagctaccaaagtgaataacgaacaaaaggaacttcaaaagctactcttgagcaagcagctgaacaaggattcactgaaaatccgacaactcaatgaccgtcttatgcagaccgagcgtgcattcactagcagggaaggcatcttcaagctagaatggtttaagcatctggtgtatggaccttcagaccagaatgactgggatactgcagtctatccaggtatagccaatgccatagccagcgcccggagcagcaacacttcggagtcctggaagtttgtacagcatgagatctacagagtagccagggccgtgacacaagcatctgctatactgagtggccgtctgacatgacaggattcaaaccatattcgttaaaaaagattgttactgtggatttcggaagttttgacattttttgaaactttcgactatgaaatatctgagttgcagagaaagaccgtgcaccacattagggcttgttcgttttgctctcaatccatgtggattgggtgggattggatgagtttcaatcccaaacaagtcaaaatctttcacaattttttccaatcccatccaatccacatgagataggaataaccgaacaagcccttaaaaggatttggtataggtcagaactttccgatagggggttggaaatttcaacttgggcatactttccaaacacaaaaaagaagtgtgcagtgttgtgcttagtgtctctcagttttatattaaagaatttgttatgcacttaagcacaactagtagtgagagttgagccgctttttagtacaggttccctatactcaagaatagaaaacaagtttacaaagcattgaggttgaagcttgattgaaagctctcatttcctgtacatctattggacaaatctccatttgtgcttaacaactataatcatatcccatatgacttgttggatcctaaatttcttgtcatcaatacaccaaaaacccacttcaac

SEQ ID NO: 32052 - DNA, 3197 bp, Zea Mays
aaccaacattccagatcaagtaacctgtccggcgtgcgaggagtggaagttgacagcacccgccgctttaaaccccgtccgtgtcccgctagccgccattgcagagcactgactgagcacaccacccaccagctccgaagtcatgtcccacctcgacgcggcctcgctcctcgccccctcgccgccgctggcaaagccccacccgcgcagccgcttcctctgcctcatctcctccatgctcgccgtcctcggcgcctccctcgcgggtctcctcttattcgcgctccaccccgcgccgaacccggtcccgaactacgcgtcgctcttcctctccctcggatccaacgacaccgccgcctcgcacctccgagcgctcactctccacccgcacgtcgcggggaccaaggcgaacgccctcaccgcccgctacgtgttcgacgcgctctccgcgctctccttccccacccacatcacgccttactccgtcctcctctcctaccccgtccaccgctccctctccctctcggcgccaggccgcggcgtcgtcacctccttctccctaaagcaggagacctaccccaacgacccctacgcagcagccgcggcggagaccatcccgacgttctacgcgtactcggcctccgggtcggtctccgcggaggccgtgtatgctaactacggccgcgaggaggacttctcttacctcgcctcccgcggcgtggacgtcgcgggcaaggtcgcgttcgcgcggtacgggaggatccactgcgaggacatagcgcacaacgcgcgcgccgccggcgccgcggccgcggtggtgtacactgacccgctgcagtacggcggcgcacccggtgaggggtggttccccgactcgcggtggctgccgcccagcggtgtgcaggtggggagcctcttccggggcgtgggggacccgacgacgccgatgtgggcatcgtccgagggctgcgagcgcgtcagcttggaggaggccatgaataccgatgacatgccgctcatcccagccctgccggtatcggctcaggacgcgatggagatacacagagccatgggcggggccgtggcgccggaggactggcagggccgtgaagacggacccgtttaccgcctcgggccagggccggcagttttgaacctgacatatcttgggaatgattcgatggcaacgattgagaatgtcttcgccattatcgagggcgccgaagagcccgatagatatgtcattcttggtaaccatcgtgatgcttggacgttcggtgcatctgatcccaacagtggaacagcagctatgattgagttagctaaaaggttttcaatgctgcaaaaacaaggatggaggcctcgaagaactattatcttctgtagttgggacgcggaagaatacggactgggtcaactgaatgggttgaagaaaaccgggagatgttgtattctagagctgttgcttatctgaatattgacgtttcagtcgttggtccaggattcctgccttctacaactccccaacttgatgagttacttcagcaagtaactaaagtggttcaagaccctgataattcatctcagactgtgtatgattcatggattaaatcgagcactcctctccgggtgagttgttgcaacttgcttatccaacagcctaccttctatgtagtgctgagaatccagttagttgtcactataaaatagtgattgtattgttaccaagctacaagttccttttcagtttcagttccattcctcgagaattatgtggtttcaggaggacagaccacttcgacttcctgacaaattatataacattactcactattcactgcatatctcttgcgttaaggttcttagactaggtgatggaggatcagactattcagcattcgtccaacatgttggtattccttcgatgaatataatttttggagaaggaccaggatatccggtttaccactccttatatgatgactacgtatggatggcgaaattcggagatcctgcgttccgtaggcatgtggcagctgctagcatatggggaatgatggctttgaggttggcaaatgaagacatcctacccttcaattacatgtcctatgcaattgagcttgaggcatacacaaaaacggtagagaatgaagtgaagggaacaactgtcacttgttcccctctgtacaactcaatcagaactctcggagcggcagctaccaaagtgaataacgaacaaaaggaacttcaaaagctactcttgagcaagcagctgaacaaggattcactgaaaatccgacaactcaatgaccgtcttatgcagaccgagcgtgcattcactagcagggaaggcatcttcaagctagaatggtttaagcatctggtgtatggaccttcagaccagaatgactgggatactgcagtctatccaggtatagccaatgccatagccagcgcccggagcagcaacacttcggagtcctggaagtttgtacagcatgagatctacagagtagccagggccgtgacacaagcatctgctatactgagtggccgtctgacatgacaggattcaaaccatattcgttaaaaaagattgttactgtggatttcggaagttttgacattttttgaaactttcgactatgaaatatctgagttgcagagaaagaccgtgcaccacattagggcttgttcgttttgctctcaatccatgtggattgggtgggattggatgagtttcaatcccaaacaagtcaaaatctttcacaattttttccaatcccatccaatccacatgagataggaataaccgaacaagcccttaaaaggatttggtataggtcagaactttccgatagggggttggaaatttcaacttgggcatactttccaaacacaaaaaagaagtgtgcagtgttgtgcttagtgtctctcagttttatattaaagaatttgttatgcacttaagcacaactagtagtgagagttgagccgctttttagtacaggttccctatactcaagaatagaaaacaagtttacaaagcattgaggttgaagcttgattgaaagctctcatttcctgtacatctattggacaaatctccatttgtgcttaacaactataatcatatcccatatgacttgttggatcctaaatttcttgtcatcaatacaccaaaaacccacttcaac

SEQ ID NO: 32053 - DNA, 2522 bp, Zea Mays
cagctccgaagtcatgtcccacctcgacgcggcctcgctcctcgccccctcgccgccgctggcaaagccccacccgcgcagccgcttcctctgcctcatctcctccatgctcgccgtcctcggcgcctccctcgcgggtctcctcttattcgcgctccaccccgcgccgaacccggtcccgaactacgcgtcgctcttcctctccctcggatccaacgacaccgccgcctcgcacctccgagcgctcactctccacccgcacgtcgcggggaccaaggcgaacgccctcaccgcccgctacgtgttcgacgcgctctccgcgctctccttccccacccacatcacgccttactccgtcctcctctcctaccccgtccaccgctccctctccctctcggcgccaggccgcggcgtcgtcacctccttctccctaaagcaggagacctaccccaacgacccctacgcagcagccgcggcggagaccatcccgacgttctacgcgtactcggcctccgggtcggtctccgcggaggccgtgtatgctaactacggccgcgaggaggacttctcttacctcgcctcccgcggcgtggacgtcgcgggcaaggtcgcgttcgcgcggtacgggaggatccactgcgaggactggcagggccgtgaagacggacccgtttaccgcctcgggccagggccggcagttttgaacctgacatatcttgggaatgattcgatggcaacgattgagaatgtcttcgccattatcgagggcgccgaagagcccgatagatatgtcattcttggtaaccatcgtgatgcttggacgttcggtgcatctgatcccaacagtggaacagcagctatgattgagttagctaaaaggttttcaatgctgcaaaaacaaggatggaggcctcgaagaactattatcttctgtagttgggacgcggaagaatacggactgacagggtcaactgaatgggttgaagaaaaccgggagatgttgtattctagagctgttgcttatctgaatattgacgtttcagtcgttggtccaggattcctgccttctacaactccccaacttgatgagttacttcagcaagtaactaaagtggttcaagaccctgataattcatctcagactgtgtatgattcatggattaaatcgagcactcctctccgggttcttagactaggtgatggaggatcagactattcagcattcgtccaacatgttggtattccttcgatgaatataatttttggagaaggaccaggatatccggtttaccactccttatatgatgactacgtatggatggcgaaattcggagatcctgcgttccgtaggcatgtggcagctgctagcatatggggaatgatggctttgaggttggcaaatgaagacatcctacccttcaattacatgtcctatgcaattgagcttgaggcatacacaaaaacggtagagaatgaagtgaagggaacaactgtcacttgttcccctctgtacaactcaatcagaactctcggagcggcagctaccaaagtgaataacgaacaaaaggaacttcaaaagctactcttgagcaagcagctgaacaaggattcactgaaaatccgacaactcaatgaccgtcttatgcagaccgagcgtgcattcactagcagggaaggcatcttcaagctagaatggtttaagcatctggtgtatggaccttcagaccagaatgactgggatactgcagtctatccaggtatagccaatgccatagccagcgcccggagcagcaacacttcggagtcctggaagtttgtacagcatgagatctacagagtagccagggccgtgacacaagcatctgctatactgagtggccgtctgacatgacaggattcaaaccatattcgttaaaaaagattgttactgtggatttcggaagttttgacattttttgaaactttcgactatgaaatatctgagttgcagagaaagaccgtgcaccacattagggcttgttcgttttgctctcaatccatgtggattgggtgggattggatgagtttcaatcccaaacaagtcaaaatctttcacaattttttccaatcccatccaatccacatgagataggaataaccgaacaagcccttaaaaggatttggtataggtcagaactttccgatagggggttggaaatttcaacttgggcatactttccaaacacaaaaaagaagtgtgcagtgttgtgcttagtgtctctcagttttatattaaagaatttgttatgcacttaagcacaactagtagtgagagttgagccgctttttagtacaggttccctatactcaagaatagaaaacaagtttacaaagcattgaggttgaagcttgattgaaagctctcatttcctgtacatctattggacaaatctccatttgtgcttaacaactataatcatatcccatatgacttgttggatcctaaatttcttgtcatcaatacaccaaaaacccacttcaac

SEQ ID NO: 32054 - DNA, 2984 bp, Zea Mays
cttttaacgacttttagtggtttccaccaaacgatttttagctttttaacaacacacagcctacagcagctttttccacagctcacagcccacagcaactttttccacagtcacagcccacagcaactttttccacagccaaagcccaaccaaacagaccctaagttggtcgccatcccctctagatgcctagatggacacacgaaatttgagcaccagcaagccgtgtgcaacccactgccacgcgccggagccactgccggcagccatcgacggccctggcaaacgcggccaccgaagcaagcagacgccaggcgcgagcgccacacaacacgccgccagcagcatatggcgtcgcacctcctgttggccagatctgacagcagcagccgcgacacattggatctgtggtgctggcgcgcgcaccgcagtagacacgccctcggccgccgtcgagccaaccaacctcggagcaccgccgcaagaccagacagccgccgccgccccagcccctcgcggcctccaagccccgcacgccgctgatcggcagcgccgtcttccccaatgcaccgtccgcggcgaggcgcgccgccgagagcgccgtccggcgaacgcacattgccagggaggctgacatgacgctgccgtcgtcgaagcagctcctctccctccacgacgccgctgccaacggcaccgacgcaggccacggggaggcaccgcgcaccaagcgggaccttggcgagcggacggacgcgtcccgcgcgcgcagcgatgcccccgcggggagacccaaagaagaagaaagaacgccccgccgccgccatccttggggcccgcgccggcgtctggcagactcctccggcgacgatgagaggaggggagggaggggagggggtggtggcgctagggttttggtggccacccgtgtcgcccgagaggaggacgacgcgggggcgtttttcaatttcaagaattaaagcaaacttttcttgaacgaacaaaagcaaaaaaaaaataagatatgtcattcttggtaaccatcgtgatgcttggacgttcggtgcatctgatcccaacagtggaacagcagctatgattgagttagctaaaaggttttcaatgctgcaaaaacaaggatggaggcctcgaagaactattatcttctgtagttgggacgcggaagaatacggactgacagggtcaactgaatgggttgaagaaaaccgggagatgttgtattctagagctgttgcttatctgaatattgacgtttcagtcgttggtccaggattcctgccttctacaactccccaacttgatgagttacttcagcaagtaactaaagtggttcaagaccctgataattcatctcagactgtgtatgattcatggattaaatcgagcactcctctccgggtgagttgttgcaacttgcttatccaacagcctaccttctatgtagtgctgagaatccagttagttgtcactataaaatagtgattgtattgttaccaagctacaagttccttttcagtttcagttccattcctcgagaattatgtggtttcaggaggacagaccacttcgacttcctgacaaattatataacattactcactattcactgcatatctcttgcgttaaggttcttagactaggtgatggaggatcagactattcagcattcgtccaacatgttggtattccttcgatgaatataatttttggagaaggaccaggatatccggtttaccactccttatatgatgactacgtatggatggcgaaattcggagatcctgcgttccgtaggcatgtggcagctgctagcatatggggaatgatggctttgaggttggcaaatgaagacatcctacccttcaattacatgtcctatgcaattgagcttgaggcatacacaaaaacggtagagaatgaagtgaagggaacaactgtcacttgttcccctctgtacaactcaatcagaactctcggagcggcagctaccaaagtgaataacgaacaaaaggaacttcaaaagctactcttgagcaagcagctgaacaaggattcactgaaaatccgacaactcaatgaccgtcttatgcagaccgagcgtgcattcactagcagggaaggcatcttcaagctagaatggtttaagcatctggtgtatggaccttcagaccagaatgactgggatactgcagtctatccaggtatagccaatgccatagccagcgcccggagcagcaacacttcggagtcctggaagtttgtacagcatgagatctacagagtagccagggccgtgacacaagcatctgctatactgagtggccgtctgacatgacaggattcaaaccatattcgttaaaaaagattgttactgtggatttcggaagttttgacattttttgaaactttcgactatgaaatatctgagttgcagagaaagaccgtgcaccacattagggcttgttcgttttgctctcaatccatgtggattgggtgggattggatgagtttcaatcccaaacaagtcaaaatctttcacaattttttccaatcccatccaatccacatgagataggaataaccgaacaagcccttaaaaggatttggtataggtcagaactttccgatagggggttggaaatttcaacttgggcatactttccaaacacaaaaaagaagtgtgcagtgttgtgcttagtgtctctcagttttatattaaagaatttgttatgcacttaagcacaactagtagtgagagttgagccgctttttagtacaggttccctatactcaagaatagaaaacaagtttacaaagcattgaggttgaagcttgattgaaagctctcatttcctgtacatctattggacaaatctccatttgtgcttaacaactataatcatatcccatatgacttgttggatcctaaatttcttgtcatcaatacaccaaaaacccacttcaac

SEQ ID NO: 32055 - DNA, 2978 bp, Zea Mays
cttttaacgacttttagtggtttccaccaaacgatttttagctttttaacaacacacagcctacagcagctttttccacagctcacagcccacagcaactttttccacagtcacagcccacagcaactttttccacagccaaagcccaaccaaacagaccctaagttggtcgccatcccctctagatgcctagatggacacacgaaatttgagcaccagcaagccgtgtgcaacccactgccacgcgccggagccactgccggcagccatcgacggccctggcaaacgcggccaccgaagcaagcagacgccaggcgcgagcgccacacaacacgccgccagcagcatatggcgtcgcacctcctgttggccagatctgacagcagcagccgcgacacattggatctgtggtgctggcgcgcgcaccgcagtagacacgccctcggccgccgtcgagccaaccaacctcggagcaccgccgcaagaccagacagccgccgccgccccagcccctcgcggcctccaagccccgcacgccgctgatcggcagcgccgtcttccccaatgcaccgtccgcggcgaggcgcgccgccgagagcgccgtccggcgaacgcacattgccagggaggctgacatgacgctgccgtcgtcgaagcagctcctctccctccacgacgccgctgccaacggcaccgacgcaggccacggggaggcaccgcgcaccaagcgggaccttggcgagcggacggacgcgtcccgcgcgcgcagcgatgcccccgcggggagacccaaagaagaagaaagaacgccccgccgccgccatccttggggcccgcgccggcgtctggcagactcctccggcgacgatgagaggaggggagggaggggagggggtggtggcgctagggttttggtggccacccgtgtcgcccgagaggaggacgacgcgggggcgtttttcaatttcaagaattaaagcaaacttttcttgaacgaacaaaagcaaaaaaaaaataagatatgtcattcttggtaaccatcgtgatgcttggacgttcggtgcatctgatcccaacagtggaacagcagctatgattgagttagctaaaaggttttcaatgctgcaaaaacaaggatggaggcctcgaagaactattatcttctgtagttgggacgcggaagaatacggactgacagggtcaactgaatgggttgaagaaaaccgggagatgttgtattctagagctgttgcttatctgaatattgacgtttcagtcgttggtccaggattcctgccttctacaactccccaacttgatgagttacttcagcaagtaactaaagtggttcaagaccctgataattcatctcagactgtgtatgattcatggattaaatcgagcactcctctccgggtgagttgttgcaacttgcttatccaacagcctaccttctatgtagtgctgagaatccagttagttgtcactataaaatagtgattgtattgttaccaagctacaagttccttttcagtttcagttccattcctcgagaattatgtggtttcaggaggacagaccacttcgacttcctgacaaattatataacattactcactattcactgcatatctcttgcgttaaggttcttagactaggtgatggaggatcagactattcagcattcgtccaacatgttggtattccttcgatgaatataatttttggagaaggatatccggtttaccactccttatatgatgactacgtatggatggcgaaattcggagatcctgcgttccgtaggcatgtggcagctgctagcatatggggaatgatggctttgaggttggcaaatgaagacatcctacccttcaattacatgtcctatgcaattgagcttgaggcatacacaaaaacggtagagaatgaagtgaagggaacaactgtcacttgttcccctctgtacaactcaatcagaactctcggagcggcagctaccaaagtgaataacgaacaaaaggaacttcaaaagctactcttgagcaagcagctgaacaaggattcactgaaaatccgacaactcaatgaccgtcttatgcagaccgagcgtgcattcactagcagggaaggcatcttcaagctagaatggtttaagcatctggtgtatggaccttcagaccagaatgactgggatactgcagtctatccaggtatagccaatgccatagccagcgcccggagcagcaacacttcggagtcctggaagtttgtacagcatgagatctacagagtagccagggccgtgacacaagcatctgctatactgagtggccgtctgacatgacaggattcaaaccatattcgttaaaaaagattgttactgtggatttcggaagttttgacattttttgaaactttcgactatgaaatatctgagttgcagagaaagaccgtgcaccacattagggcttgttcgttttgctctcaatccatgtggattgggtgggattggatgagtttcaatcccaaacaagtcaaaatctttcacaattttttccaatcccatccaatccacatgagataggaataaccgaacaagcccttaaaaggatttggtataggtcagaactttccgatagggggttggaaatttcaacttgggcatactttccaaacacaaaaaagaagtgtgcagtgttgtgcttagtgtctctcagttttatattaaagaatttgttatgcacttaagcacaactagtagtgagagttgagccgctttttagtacaggttccctatactcaagaatagaaaacaagtttacaaagcattgaggttgaagcttgattgaaagctctcatttcctgtacatctattggacaaatctccatttgtgcttaacaactataatcatatcccatatgacttgttggatcctaaatttcttgtcatcaatacaccaaaaacccacttcaac

SEQ ID NO: 32056 - DNA, 2734 bp, Zea Mays
gccggagccactgccggcagccatcgacggccctggcaaacgcggccaccgaagcaagcagacgccaggcgcgagcgccacacaacacgccgccagcagcatatggcgtcgcacctcctgttggccagatctgacagcagcagccgcgacacattggatctgtggtgctggcgcgcgcaccgcagtagacacgccctcggccgccgtcgagccaaccaacctcggagcaccgccgcaagaccagacagccgccgccgccccagcccctcgcggcctccaagccccgcacgccgctgatcggcagcgccgtcttccccaatgcaccgtccgcggcgaggcgcgccgccgagagcgccgtccggcgaacgcacattgccagggaggctgacatgacgctgccgtcgtcgaagcagctcctctccctccacgacgccgctgccaacggcaccgacgcaggccacggggaggcaccgcgcaccaagcgggaccttggcgagcggacggacgcgtcccgcgcgcgcagcgatgcccccgcggggagacccaaagaagaagaaagaacgccccgccgccgccatccttggggcccgcgccggcgtctggcagactcctccggcgacgatgagaggaggggagggaggggagggggtggtggcgctagggttttggtggccacccgtgtcgcccgagaggaggacgacgcgggggcgtttttcaatttcaagaattaaagcaaacttttcttgaacgaacaaaagcaaaaaaaaaataagatatgtcattcttggtaaccatcgtgatgcttggacgttcggtgcatctgatcccaacagtggaacagcagctatgattgagttagctaaaaggttttcaatgctgcaaaaacaaggatggaggcctcgaagaactattatcttctgtagttgggacgcggaagaatacggactgggtcaactgaatgggttgaagaaaaccgggagatgttgtattctagagctgttgcttatctgaatattgacgtttcagtcgttggtccaggattcctgccttctacaactccccaacttgatgagttacttcagcaagtaactaaagtggttcaagaccctgataattcatctcagactgtgtatgattcatggattaaatcgagcactcctctccgggtgagttgttgcaacttgcttatccaacagcctaccttctatgtagtgctgagaatccagttagttgtcactataaaatagtgattgtattgttaccaagctacaagttccttttcagtttcagttccattcctcgagaattatgtggtttcaggaggacagaccacttcgacttcctgacaaattatataacattactcactattcactgcatatctcttgcgttaaggttcttagactaggtgatggaggatcagactattcagcattcgtccaacatgttggtattccttcgatgaatataatttttggagaaggaccaggatatccggtttaccactccttatatgatgactacgtatggatggcgaaattcggagatcctgcgttccgtaggcatgtggcagctgctagcatatggggaatgatggctttgaggttggcaaatgaagacatcctacccttcaattacatgtcctatgcaattgagcttgaggcatacacaaaaacggtagagaatgaagtgaagggaacaactgtcacttgttcccctctgtacaactcaatcagaactctcggagcggcagctaccaaagtgaataacgaacaaaaggaacttcaaaagctactcttgagcaagcagctgaacaaggattcactgaaaatccgacaactcaatgaccgtcttatgcagaccgagcgtgcattcactagcagggaaggcatcttcaagctagaatggtttaagcatctggtgtatggaccttcagaccagaatgactgggatactgcagtctatccaggtatagccaatgccatagccagcgcccggagcagcaacacttcggagtcctggaagtttgtacagcatgagatctacagagtagccagggccgtgacacaagcatctgctatactgagtggccgtctgacatgacaggattcaaaccatattcgttaaaaaagattgttactgtggatttcggaagttttgacattttttgaaactttcgactatgaaatatctgagttgcagagaaagaccgtgcaccacattagggcttgttcgttttgctctcaatccatgtggattgggtgggattggatgagtttcaatcccaaacaagtcaaaatctttcacaattttttccaatcccatccaatccacatgagataggaataaccgaacaagcccttaaaaggatttggtataggtcagaactttccgatagggggttggaaatttcaacttgggcatactttccaaacacaaaaaagaagtgtgcagtgttgtgcttagtgtctctcagttttatattaaagaatttgttatgcacttaagcacaactagtagtgagagttgagccgctttttagtacaggttccctatactcaagaatagaaaacaagtttacaaagcattgaggttgaagcttgattgaaagctctcatttcctgtacatctattggacaaatctccatttgtgcttaacaactataatcatatcccatatgacttgttggatcctaaatttcttgtcatcaatacaccaaaaacccacttcaac

SEQ ID NO: 32057 - DNA, 1915 bp, Zea Mays
aaaccatgtgctctctctgtatagtaagctgaagtgactggagttagctaaaaggttttcaatgctgcaaaaacaaggatggaggcctcgaagaactattatcttctgtagttgggacgcggaagaatacggactggattcctgccttctacaactccccaacttgatgagttacttcagcaagtaactaaagtggttcaagaccctgataattcatctcagactgtgtatgattcatggattaaatcgagcactcctctccgggtgagttgttgcaacttgcttatccaacagcctaccttctatgtagtgctgagaatccagttagttgtcactataaaatagtgattgtattgttaccaagctacaagttccttttcagtttcagttccattcctcgagaattatgtggtttcaggaggacagaccacttcgacttcctgacaaattatataacattactcactattcactgcatatctcttgcgttaaggttcttagactaggtgatggaggatcagactattcagcattcgtccaacatgttggtattccttcgatgaatataatttttggagaaggtaatgcccctgctctcttctatttgtctgctcagtgacttttatttttcaatgaactttcctgggtacttttgcttttgtaggaccaggatatccggtttaccactccttatatgatgactacgtatggatggcgaaattcggagatcctgcgttccgtaggcatgtggcagctgctagcatatggggaatgatggctttgaggttggcaaatgaagacatcctacccttcaattacatgtcctatgcaattgagcttgaggcatacacaaaaacggtagagaatgaagtgaagggaacaactgtcacttgttcccctctgtacaactcaatcagaactctcggagcggcagctaccaaagtgaataacgaacaaaaggaacttcaaaagctactcttgagcaagcagctgaacaaggattcactgaaaatccgacaactcaatgaccgtcttatgcagaccgagcgtgcattcactagcagggaaggcatcttcaagctagaatggtttaagcatctggtgtatggaccttcagaccagaatgactgggatactgcagtctatccaggtatagccaatgccatagccagcgcccggagcagcaacacttcggagtcctggaagtttgtacagcatgagatctacagagtagccagggccgtgacacaagcatctgctatactgagtggccgtctgacatgacaggattcaaaccatattcgttaaaaaagattgttactgtggatttcggaagttttgacattttttgaaactttcgactatgaaatatctgagttgcagagaaagaccgtgcaccacattagggcttgttcgttttgctctcaatccatgtggattgggtgggattggatgagtttcaatcccaaacaagtcaaaatctttcacaattttttccaatcccatccaatccacatgagataggaataaccgaacaagcccttaaaaggatttggtataggtcagaactttccgatagggggttggaaatttcaacttgggcatactttccaaacacaaaaaagaagtgtgcagtgttgtgcttagtgtctctcagttttatattaaagaatttgttatgcacttaagcacaactagtagtgagagttgagccgctttttagtacaggttccctatactcaagaatagaaaacaagtttacaaagcattgaggttgaagcttgattgaaagctctcatttcctgtacatctattggacaaatctccatttgtgcttaacaactataatcatatcccatatgacttgttggatcctaaatttcttgtcatcaatacaccaaaaacccacttcaac

SEQ ID NO: 32058 - DNA, 1050 bp, Zea Mays
ctgtaatgtaatttccttattattaaagcagaaaggaaatctgcttctatatgcgtccacgtcggcaaaatttccttggccgtttgatcgtagatcatcggttcctgttcttttccgtgcagcccgtgtgtagatgcttctaggtgcttctctcctcgcatcttctctgcgtctccgtcctgcacatctcgcgctccctcccccgcccgttcgtagctccgatgacagccgccatagcttcgggctccagatcccagcgccagcgccagcgccccaaaggtccaggggcatatgactggttcaatcaaggccatgctcctgctgtgacattttaatgctaacgaataagatatcagcatcgatgaaaacagcctgaacataacccagacatggatgcacccgattttccctgccctcttctatgcctgtgaaagagtcatcaggaaatttcatgagaacgactaccattcaggtattgtgagtaatttatctgggagatgtgctctctattcacatgaagaagcctcggggtttcaagtactaaagtggaatgcatcttttttttgtaaaataccaggcaccccttctctataactctggcaccaggagataactacttgactgtgcatatccgcacgctgggtgaccggacatccaaactttcgattctctgagattttgaactttgatggcagtgaaagggatcaggctccgaaaacagggagcaagaatatgtgaaagggaaatgtgcccttgggccatttctaagtgttttggtgatttagtgtccaacacaagtgcctaagtgtaaaaaggtagacaaagtacaaatcaaggataaaggtatgtttctcagacttagtacattgttttatggactaatgtattgtgtctaagtgctggaaacaggaaaaatccaattggaaatgtcttggctcgagcagccaagaatctgctgagtctgggagcaccggactgtccggtggtgcaccggacagtgtccggtgcgccaggctggctcgagtgaactggccgctctcgggaattcac

SEQ ID NO: 32059 - DNA, 901 bp, Zea Mays
cttctctcctcgcatcttctctgcgtctccgtcctgcacatctcgcgctccctcccccgcccgttcgtagctccgatgacagccgccatagcttcgggctccagatcccagcgccagcgccagcgccccaaaggtccagacatggatgcacccgattttccctgccctcttctatgcctgtgaaagagtcatcaggaaatttcatgagaacgactaccattcaggtattgtgagtaatttatctgggagatgtgctctctattcacatgaagaagcctcggggtttcaagtactaaagtggaatgcatcttttttttgtaaaataccaggtcttacctttcgactggtatcattttattaattattgcacacatatccgagaagtaatttatctgtggttcttgcttacagttttcccatatatacaggcaccccttctctataactctggcaccaggagataactacttgactgtgcatatccgcacgctgggtgaccggacatccaaactttcgattctctgagattttgaactttgatggcagtgaaagggatcaggctccgaaaacagggagcaagaatatgtgaaagggaaatgtgcccttgggccatttctaagtgttttggtgatttagtgtccaacacaagtgcctaagtgtaaaaaggtagacaaagtacaaatcaaggataaaggtatgtttctcagacttagtacattgttttatggactaatgtattgtgtctaagtgctggaaacaggaaaaatccaattggaaatgtcttggctcgagcagccaagaatctgctgagtctgggagcaccggactgtccggtggtgcaccggacagtgtccggtgcgccaggctggctcgagtgaactggccgctctcgggaattcac

SEQ ID NO: 32060 - DNA, 1780 bp, Zea Mays
ctccgtcctgcacatctcgcgctccctcccccgcccgttcgtagctccgatgacagccgccatagcttcgggctccagatcccagcgccagcgccagcgccccaaaggtccaggggcatatgactggttcaatcaaggccatgctcctgctgtgacattttaatgctaacgaataagatatcagcatcgatgaaaacagcctgaacataacccaggtaacctatgtcagttgtacttacattttccatataacaccatggctttaggcttctatcaaactgatgaagactgaaatttgtctaagtttttttaaagcatactaacattcaagacaacatagcaataaaccaaatcaatacttctagctcattggaatgtcctcctgccttattttatccgaattctttgagaaagaggtaagctcaatgtttgtttcagtctaatttttttagtatgttttaatttcttcgcatctgctgaagactttaaatttgaactaagtctcaggagaagcatttgaattgttacaggtacttttggtctcacctaattgtgtggtatttatagtttgctcatttgtatacaatcatcggctttacaaccttgtttgctcaacccaaaaaaaagggtggacagagactgtctgtttcatcactcaccaagcacacccaacgtacatttaaggagaacagcacaagaagacaagaagcacctaaacggaagtgaataattaattaaccatgtaaaaccatgtcctcacacgtttaaattgtttacatttcctcataaatgaatttgtaccaattcaaacaagcttgatagcaagtacgagtagcatttgtgttagaaaaatacaagaaaaaaagatctcttaagttctcaacttttgcttgatcttgtgtgttagactgttagtgttcatatggcgcatcccaaatattcctgtcctgtaattgaacacagatagcccaaatactccttctgtaattgaacacaagaatatgtttagttgatggtctggtcatggagctcaaatttggttcaacatgaattatgatacttactgtgtactctagatatttatgtttattttttgcaatttttttgttcatttcagacatggatgcacccgattttccctgccctcttctatgcctgtgaaagagtcatcaggaaatttcatgagaacgactaccattcaggtattgtgagtaatttatctgggagatgtgctctctattcacatgaagaagcctcggggtttcaagtactaaagtggaatgcatcttttttttgtaaaataccaggcaccccttctctataactctggcaccaggagataactacttgactgtgcatatccgcacgctgggtgaccggacatccaaactttcgattctctgagattttgaactttgatggcagtgaaagggatcaggctccgaaaacagggagcaagaatatgtgaaagggaaatgtgcccttgggccatttctaagtgttttggtgatttagtgtccaacacaagtgcctaagtgtaaaaaggtagacaaagtacaaatcaaggataaaggtatgtttctcagacttagtacattgttttatggactaatgtattgtgtctaagtgctggaaacaggaaaaatccaattggaaatgtcttggctcgagcagccaagaatctgctgagtctgggagcaccggactgtccggtggtgcaccggacagtgtccggtgcgccaggctggctcgagtgaactggccgctctcgggaattcac

SEQ ID NO: 32061 - DNA, 1413 bp, Zea Mays
ccgtcctgcacatctcgcgctccctcccccgcccgttcgtagctccgatgacagccgccatagcttcgggctccagatcccagcgccagcgccagcgccccaaaggtccaggggcatatgactggttcaatcaaggccatgctcctgctgtgacattttaatgctaacgaataagatatcagcatcgatgaaaacagcctgaacataacccagtttttttaaagcatactaacattcaagacaacatagcaataaaccaaatcaatacttctagctcattggaatgtcctcctgccttattttatccgaattctttgagaaagaggtaagctcaatgtttgtttcagtctaatttttttagtatgttttaatttcttcgcatctgctgaagactttaaatttgaactaagtctcaggagaagcatttgaattgttacaggtacttttggtctcacctaattgtgtggtatttatagtttgctcatttgtatacaatcatcggctttacaaccttgtttgctcaacccaaaaaaaagggtggacagagactgtctgtttcatcactcaccaagcacacccaacgtacatttaaggagaacagcacaagaagacaagaagcacctaaacggaagtgaataattaattaaccatacatggatgcacccgattttccctgccctcttctatgcctgtgaaagagtcatcaggaaatttcatgagaacgactaccattcaggtattgtgagtaatttatctgggagatgtgctctctattcacatgaagaagcctcggggtttcaagtactaaagtggaatgcatcttttttttgtaaaataccaggtcttacctttcgactggtatcattttattaattattgcacacatatccgagaagtaatttatctgtggttcttgcttacagttttcccatatatacaggcaccccttctctataactctggcaccaggagataactacttgactgtgcatatccgcacgctgggtgaccggacatccaaactttcgattctctgagattttgaactttgatggcagtgaaagggatcaggctccgaaaacagggagcaagaatatgtgaaagggaaatgtgcccttgggccatttctaagtgttttggtgatttagtgtccaacacaagtgcctaagtgtaaaaaggtagacaaagtacaaatcaaggataaaggtatgtttctcagacttagtacattgttttatggactaatgtattgtgtctaagtgctggaaacaggaaaaatccaattggaaatgtcttggctcgagcagccaagaatctgctgagtctgggagcaccggactgtccggtggtgcaccggacagtgtccggtgcgccaggctggctcgagtgaactggccgctctcgggaattcac

SEQ ID NO: 32062 - DNA, 1518 bp, Zea Mays
gttctcctacgtttcaacctcgaggggaacactcacattccaagcgcatctctcaaggtgcccaagatatactaagcaaaaatcttgtatcctaatctgataacatgcataaatgtggatggaataggggcatatgactggttcaatcaaggccatgctcctgctgtgacattttaatgctaacgaataagatatcagcatcgatgaaaacagcctgaacataacccaggtaacctatgtcagttgtacttacattttccatataacaccatggctttaggcttctatcaaactgatgaagactgaaatttgtctaagtttttttaaagcatactaacattcaagacaacatagcaataaaccaaatcaatacttctagctcattggaatgtcctcctgccttattttatccgaattctttgagaaagaggtaagctcaatgtttgtttcagtctaatttttttagtatgttttaatttcttcgcatctgctgaagactttaaatttgaactaagtctcaggagaagcatttgaattgttacaggtacttttggtctcacctaattgtgtggtatttatagtttgctcatttgtatacaatcatcggctttacaaccttgtttgctcaacccaaaaaaaagggtggacagagactgtctgtttcatcactcaccaagcacacccaacgtacatttaaggagaacagcacaagaagacaagaagcacctaaacggaagtgaataattaattaaccatacatggatgcacccgattttccctgccctcttctatgcctgtgaaagagtcatcaggaaatttcatgagaacgactaccattcaggtattgtgagtaatttatctgggagatgtgctctctattcacatgaagaagcctcggggtttcaagtactaaagtggaatgcatcttttttttgtaaaataccaggtcttacctttcgactggtatcattttattaattattgcacacatatccgagaagtaatttatctgtggttcttgcttacagttttcccatatatacaggcaccccttctctataactctggcaccaggagataactacttgactgtgcatatccgcacgctgggtgaccggacatccaaactttcgattctctgagattttgaactttgatggcagtgaaagggatcaggctccgaaaacagggagcaagaatatgtgaaagggaaatgtgcccttgggccatttctaagtgttttggtgatttagtgtccaacacaagtgcctaagtgtaaaaaggtagacaaagtacaaatcaaggataaaggtatgtttctcagacttagtacattgttttatggactaatgtattgtgtctaagtgctggaaacaggaaaaatccaattggaaatgtcttggctcgagcagccaagaatctgctgagtctgggagcaccggactgtccggtggtgcaccggacagtgtccggtgcgccaggctggctcgagtgaactggccgctctcgggaattcac

SEQ ID NO: 32063 - DNA, 1070 bp, Zea Mays
ctgtcttttgggtctgggtgtggaggtatttgaagatatgaagaataatgtctgaattggaccacactaattgttgttgacatgttctgccatatggagatggaaagtgatgccacttttctttgcaacattatcaacgtctatccatatttgactatttaatcttaacgacgtgatgtttatttttctcatattctcaaaggggaacactcacattccaagcgcatctctcaaggtgcccaagatatactaagcaaaaatcttgtatcctaatctgataacatgcataaatgtggatggaataggggcatatgactggttcaatcaaggccatgctcctgctgtgacattttaatgctaacgaataagatatcagcatcgatgaaaacagcctgaacataacccagacatggatgcacccgattttccctgccctcttctatgcctgtgaaagagtcatcaggaaatttcatgagaacgactaccattcaggtattgtgagtaatttatctgggagatgtgctctctattcacatgaagaagcctcggggtttcaagtactaaagtggaatgcatcttttttttgtaaaataccaggcaccccttctctataactctggcaccaggagataactacttgactgtgcatatccgcacgctgggtgaccggacatccaaactttcgattctctgagattttgaactttgatggcagtgaaagggatcaggctccgaaaacagggagcaagaatatgtgaaagggaaatgtgcccttgggccatttctaagtgttttggtgatttagtgtccaacacaagtgcctaagtgtaaaaaggtagacaaagtacaaatcaaggataaaggtatgtttctcagacttagtacattgttttatggactaatgtattgtgtctaagtgctggaaacaggaaaaatccaattggaaatgtcttggctcgagcagccaagaatctgctgagtctgggagcaccggactgtccggtggtgcaccggacagtgtccggtgcgccaggctggctcgagtgaactggccgctctcgggaattcac

SEQ ID NO: 32064 - DNA, 362 bp, Zea Mays
tcattcaggttgctgcgagagaaggcttcaagcttcctccttgacgacttctacaggactccaggaggtattcagttcgaagggcctggttcagatgcaaagcccatcacgctgaccattgagaaccaggactacatgggtgacattgagatactgaaagagtaccttggcaaggttaggaccatggtgaagccagggtgctcctgggagatcctgaaggcggcgatcagttccatggtgtcggtgacggatgtgctgactgtgatgtcccaccccctcaacgccgagctgcccctctaccatttcaagctgcatatattcaacattatgaatgcatggacaaaaatctatgttggtgttat

SEQ ID NO: 32065 - DNA, 758 bp, Zea Mays
cccataaacaatcaccccgaagaagaaaatcacgggcagacatcatcagcaacgccggccggcgtcaccgccaccctcccctctcgcggacaccggaaaccatcacatcaaaccggaaaccacccttccctccagaactccagaccattcccttctccctttcctcttctccacgcttcgcccctcgccgactattttaaacccacgcttcttttagttctttcttccccgtcggcttccggagtggaaaccattttcctaccacccgcgggagatccacacgcccacgagcagtggagctcggcagcgaggcttcggagttctgccattaatgcagctcatgtggaagcttcaagtgctgaaaatggaataggtttagtgaagcttatgggtcgctatagtggatttattgccatgtatgctactcttgcaaacaggatgtgggcgaggctgctgtcttcaaccaaccaaccgagtttcctgagccagaaggacatcgacgcggccagagaagccgacaaggcggccaaccgcatgaagagcagagaggacgcgaagaagcaatctacaccagtgttggcaaatggtgagaaatagtgtgcttttgacggttctttgttgtatgcagtagctgctgcaagctggctgagatcagtaggccaaaactgcgaggtcgatgagttttacttccatttgcatgcgaacagaattcacgtaataaaagcttcatagtgtgtatttgcgttagtaaacatata

SEQ ID NO: 32066 - DNA, 2595 bp, Zea Mays
cccataaacaatcaccccgaagaagaaaatcacgggcagacatcatcagcaacgccggccggcgtcaccgccaccctcccctctcgcggacaccggaaaccatcacatcaaaccggaaaccacccttccctccagaactccagaccattcccttctccctttcctcttctccacgcttcgcccctcgccgactattttaaacccacgcttcttttagttctttcttccccgtcggcttccggagtggaaaccattttcctaccacccgcgggagatccacacgcccacgagcagtggagctcggcagcgaggcttcggagttctgccatggcgtcgtcccacatcatcctgcccaaggaggaggaggaggaggcggctgcggcagcggtggcggaggtcgggttgggagcggcggtggaggcggaccacgaccaccggccgtaccaggagcaggggcccgggaaggcggcgctgccgttctcggcaacgtgcgtccggatctcccgcgactcgtacccgaacctccgcgcgctgcggaacgcgtcgaccatgacactccacgatgatgacgccgccttcgtcaagctcgaggagggcgactacggatacgtgctcgacgacgtcccgcacctcaccgactacctcccggacctccccacttttcctaatcctctgcaagatcatcctgcgtattcaactgtcaagcaatattttgtcaatgcagatgatacagtccctgaaaaggtagttgttcagaagaacagtccacgaggagttcacttccgtcgtgctggacctcgtcagagggtgtattttgagtcagaagaagcgaaagcttgcattgtaacctgtggaggcctttgccctgggctcaatactgtcatcagagagttggtttgtggcttgtcccacatgtacaacgttagcaatgtcttcggaatacagaatgggtacaaggggttctattcgagcaattatcttcccatgacaccaaagagtgtgaatgatatccacaaacgaggtggtacagttcttggaacatcacgaggtggccatgataccaaaaagattgttgacaacattcaagatcgtggaattaatcaggtgttcattataggaggagatggaactcagaagggtgcatatgagatttacaaggaaatccggagacgtggtctacaagtagctgttgctggtattcccaagactattgataatgatatagcggttatagacaagtcatttggttttgatactgctgtagaagaagcccagcgtgccattaatgcagctcatgtggaagcttcaagtgctgaaaatggaataggtttagtgaagcttatgggtcgctatagtggatttattgccatgtatgctactcttgcaagcagagatgtggactgctgcttgattcctgagtcacccttttatttggaaggggagggtggactatttgagtatatagataggaggttgaaggagaacaatcacacggttattgttgtcgcggagggagcaggacaggatcttattgctcaaagtatacctgctgcagatcagcaagatgcatctggaaataagctgcttcttgatgttggtctctggttgactcacaagattaaggattattgcaagagcaagaagatggagatgactattaaatacatagatccaacttacatgatccgtgctattccaagcaatgcatcagacaatgtctattgcaccctgctcgcacatagtgccattcatggtgcaatggcgggatacagctttacagtcggaatggttaatggcaggcatgcatatataccatttcatgcaccgacggcgtcgaagcgcaactcgccgcgccgatactcccacagcagccggcaaccgatggtcctgtgccacaacctgcaagacccgacgtcaacaacgcgacggcacctgatgcaggtgatcaggaggaagcacgaaccacggggaccgacgttgcaggcggaaccctgacgcaggcggaggtgaagccgacacccggaacaaacgtctcgtggcccacgacaccacctgatacgccagagcgcgacgtggcgccggcgcctcgaaccgagcacgcacaggcgaccgagatggaactggacgtcgacaccgcgaggcccgaaggctgcaccacgccgccgccggtgcaggactcggaggggtccgacacgcagagcgccgactgccgcgggagccccatgcatgggatgcaggcaggcgcgagcgtgaagcgggacgatgtggccgcctccaagtcgaggctgttcgcgttccggtccttcacgcgggacaagaagaaggtgatcaagcccgccggggccgcagacacggcatctccagatagtcgcaagacggaggaggcggccgcggagaacaaggagaggcggaagagattctggaagcgatgatggatggggtgtgtgctagtttttgccatgcacgtcacacagcggtgactgcagagttgtttagcaccatgtgtgtaataagtatcatgacaaggtatatataacatgaatttatcgctggttctcttttcgtgtaatattttgtcaacagatgaaaagttac

SEQ ID NO: 32067 - DNA, 613 bp, Zea Mays
taatcaggttcattataggaggagatggaactcagaagggtgcatatgagatttacaaggaaatccggagacgtggtctacaagtagctgttgctggtattcccaagactattgataatgatatagcggttatagacaagtcatttggttttgatactgctgtagaagaagcccagcgtgccattaatgcagctcatgtggaagcttcaagtgctgaaaatggaataggtttagtgaagcttatgggtcgctatagtggatttattgccatgtatgctactcttgcaaacaggatgtgggcgaggctgctgtcttcaaccaaccaaccgagtttcctgagccagaaggacatcgacgcggccagagaagccgacaaggcggccaaccgcatgaagagcagagaggacgcgaagaagcaatctacaccagtgttggcaaatggtgagaaatagtgtgcttttgacggttctttgttgtatgcagtagctgctgcaagctggctgagatcagtaggccaaaactgcgaggtcgatgagttttacttccatttgcatgcgaacagaattcacgtaataaaagcttcatagtgtgtatttgcgttagtaaacatata

SEQ ID NO: 32068 - DNA, 3761 bp, Zea Mays
ttccttttccccaccgctataagtgttggcattttctcctccattaatgtcggccgtttatcagcatcaatggccattgaacacgccagcaattccctctcctcgcctataaaaacacctgcgcgctgcatcgaagccatcccggcctttcctccctctcctccgcacactactctctcttcctctcttacatactcctctgttgcttctcgctctactcctacgcaacgcctcgcaccgcgcctgttcatcgcaacatccgcgcccagacaccgtcatgacaccgctggagtctagtcgactctccttgtttgtgtcgttcctctgcatcttgcaccgctcgccggagttcgtcgccataatatcgcgggagctctgcgtcctgcttactgctccagcatccttcctcccgcgatgccgtgattccggcaccgttgctgcctccccgctcatcagcaccacgacttcatcgtgcagctgattcccctgtccgagccccctacgtcgcccgttgtcgctccctcgtcgttgccttgttgctgttaccctcactggcgcctgcacatcactggagttcactgtcacggtgtcactagaacctctacgcccagcttgtcgcgccgaccgtcatcgtcattctctgttccgctccgcgacgatttgttttctatccgcaatccgaaggtaaaagaaagttctaattttacacgctactccctatcgtctatgtttaattttgagctgaccactgcaacaatttttctatattttaaaatatgtatgtgagactcaaataaattaaatattaatttgttaacttcgtaaatttacaccgatttatatgtccaataatttacttgttttcgcaaaaaaatggaattatgtttgctacaatcgatttatgcgtattcaatatccagataaattaaatagtatttagatagctatgtgttaatgcagtgattagttttaattgatagttgcaacgatttacatgtgtttaaattaatttatattatgtttgttataattaattaggtgtagtttgtaaataaggaacataaaataaatataaaaggtcgcttgcaatagatatcatgttttgataatttaatattgtttgacatagttatttaagtatagccttcttaaatagaaatttaaaagaaattgtaaaccatatgtttcttaataaaaataaaagataaatatatgtctaattatatttcccataaatttgatttagccttatattcaagttcttataaatgatgatatattatgtctcacaatgtttaaatgtaatatcgagctttttcctaaaataagtgttaaaatggattaattagtctcattgattttataaactaaaatgatagtttatacataatttcctttctaatgaattagatcatttgttcctacaatagaattaaagataattaactatcataatgtattatttaaacttatagtcaatttgttcttaactagatttatgacatgattaatgatttcatagaatttagtccatattatatgaatcacttagttttttctaaaagaataaactaaggaaattagtgttcatattctttaataataattaaaacgttagtttatatattgttttgtatatagctttcttaataaagaatataagacatgtactttctaatagaaataaaatatagttgtttgttcattgtcttttacataaaagttcatccaaggcatatatcataacttttcataaataggtgtttaataataatgatcttttcacataaaacttatttagacttatatcctagtttatcgtaagtgaatatttaacaatgatttataagatgttccataatgcttctaaaattaataacgcgtttcgtagctcattaaccttagatatataacatatatcatttataaaaggttaaaaaggttttatatcgttataacgtgttttatcgtcttataaacccttaatcttagacagatcacatatgacgttttataaaagattaaaactgatgaacccaatatttgtatattttaattaagatatttttaagctcatgtcttgttttataaagtatagatcacacattttttgaaaagaatatcttcttattataaccattacttgcgacgtttttgaaaaacgaacgctcttttcgttaggttttcttttagctttacgtatggtgaatgtggtatgttattgagtggtgtttgttcttcttgtttgtttgtgtgatattcagtggttgatctagtagttaagaatcaagatctattcctatccgtggaggaacctcaagttttcaataagcaaggcaagtggacttctccatctgcatactctgtttgatcccaaacaatacatttaataaagtttattcttttggatatatatgcataatttgatgggttacctatttagataacctttccaaccttattccttgatcaaacctgggaattatactttaccttcgtagctatgctattgctacaacttaactttatgcagtcgctcccgcttatgatattaatgttccaaaatggtaagtttacattattgttgttaacccgatggttaaacaagattattgcatattaattggaacatggagtgaccacccgggaaaacagtgcaaccacgagtgctatcatggctctggctttggtaattagctttatatgcttagtgcctggcaaccttacctgaaatatgggcaagagggggagcggtaggtgttggcagcccacgttaacatggggacgtattcttggctaaggtacctcacccagggggccaccaccattgtctttagaaaccttagcgggttgcttcgtattaagtgtattttgtgaaagcctcatagtggatccctagccactcacctcggaagtgtttacgggttttggccgacccaggctagaggggatacacggcttgtgggtaaagttgtaccatctctgcagagtgtaaaactgatatatcagtcgtgctcacggttatgagcagcctggactcctcaaatgataattgaacttgaagatggaaataaatcgagatccgatgatctaccaatggttttcttaagtggtttcacttaagtgtttttgatatactcttgtaactttgtttaatgggaatacttgggattcacacttattagtaggacaggtgttgttaataaaatgttgaccaactaaaatgcttactgctcaaccttagcctcaccttgttaccttgcattagtttctcccccacttgctgagccccgaccataagtgagctcacccttgcttaattttgatcagaagttgcagatgaagatatgatgctgagctccatggatgctagtctagtgatacccccggtcatcttcatgtggatggatgtccatgtttgttgtactttgatgaataaaggttaagacattatgtctgttcgaagtgtaatatgttaatataatcgttatttacgcttttatgcattgttcttttgatatattacacttgtgacgtcaacatatgtgtggaaatagatcctggcacacatatgctatgcacccggctctgcccttagaaacgggtgtgacatatagccgattgtatttgccgacggaagacagcacaatcataggtgttatggagaaaggagccatgccatttgcaataaacgcgcactttttaattgtacaaccggaggaattacatgtgacaatttaatattaccatgtttaagcaac

SEQ ID NO: 32069 - DNA, 1292 bp, Zea Mays
atttcttcctttccactttcccaactttacgccgcgtctcatccccacctagagtcctaatcgaaaaccctcgtttgttcgcttgaacagaagcctcccccgccgcacccgccaggcggcgcgggcgcgcggcaatggccgcgcagaacgctgggatcatcatcgattgtcgacaggcgatgtcccccgatcccccggccgtggagttggaggtcatcggctcatcttctccgtccatcacgccatgtcccgctgcagcggcgcccgccgacgccgatttcgatcatgacggatgcaccgcggaattatcttcttcaactgatcgagaattacaggaccatatcagacagtgggaagggtcctatgggcagggtgtactccgtaggatgccggatggtggcgagaagatgcattcacgtgtcctccggatgaagaaggagctcgagcggcggagggccagacagaggatggatgtcacgcccttgagacagacagtgcaagctaagcgtactggtggcagcagtggagaaatctacaacttaaagtctgatgatgagaccatggacagtacggctagcaaacactatccaaactcaagttgtactacatctacaaagacctatacccaggttaagggagctgcatatgaagaacaaagttctttaagccatggcaaatatgcttacccaaagaatggtggtcaaatttcaaaagagtcgttgaggcatcaatcaaaaacgtggaaccttgccaaaaataaggcctcacccttggagattaaaaaggatgtagttctgttggatgacgatgatgatatagagcctgctagatcagctgatgttcagatatctaataagtgggaggagtcaaatatccactatccttcaagcactgatccagaagcggttgaactgacctactctgacatgaaatgtcttgaaccagaagaatatttaaaatcacctgttataaatttttaccttcagtacctcaagaaggcaagacctcgcagggatttacacatgtttaacacctatttttatagcaaactcgaagaagcactatccatgccgaattcagcaagttacggagatggtggagaggtgtagatatttttaagaaagcgtacataattttgccgattaatgaatcgatgcactggagcttgatcattgtttgcatgcctacaaaagaggcagattctgggccaataatacttcacttggactctcttggtcttcactccagtcaaaagctttttgacatagttgcgagggcgaacccagtgccgg

SEQ ID NO: 32070 - DNA, 1861 bp, Zea Mays
atttcttcctttccactttcccaactttacgccgcgtctcatccccacctagagtcctaatcgaaaaccctcgtttgttcgcttgaacagaagcctcccccgccgcacccgccaggcggcgcgggcgcgcggcaatggccgcgcagaacgctgggatcatcatcgattgtcgacaggcgatgtcccccgatcccccggccgtggagttggaggtcatcggctcatcttctccgtccatcacgccatgtcccgctgcagcggcgcccgccgacgccgatttcgatcatgacggatgcaccgcggaattatcttcttcaactgatcgagaattacaggaccatatcagacagtgggaagggtcctatgggcagggtgtactccgtaggatgccggatggtggcgagaagatgcattcacgtgtcctccggatgaagaaggagctcgagcggcggagggccagacagaggatggatgtcacgcccttgagacagacagtgcaagctaagcgtactggtggcagcagtggagaaatctacaacttaaagtctgatgatgagaccatggacagtacggctagcaaacactatccaaactcaagttgtactacatctacaaagacctatacccaggttaagggagctgcatatgaagaacaaagttctttaagccatggcaaatatgcttacccaaagaatggtggtcaaatttcaaaagagtcgttgaggcatcaatcaaaaacgtggaaccttgccaaaaataaggcctcacccttggagattaaaaaggatgtagttctgttggatgacgatgatgatatagagcctgctagatcagctgatgttcagatatctaataagtgggaggagtcaaatatccactatccttcaagcactgatccagaagcggttgaactgacctactctgacatgaaatgtcttgaaccagaagaatatttaaaatcacctgttataaatttttaccttcagtacctcaagaaggcaagacctcgcagggatttacacatgtttaacacctatttttatagcaaactcgaagaagcactatccatgccgaattcagcaagttacggagatggtggagaggtgtagatatttttaagaaagcgtacataattttgccgattaatgaatcgatgcactggagcttgatcattgtttgcatgcctacaaaagaggcagattctgggccaataatacttcacttggactctcttggtcttcactccagtcaaaagctttttgacatagttgcgaggtatattcaagcagaacggtggcacctagggatggattcgtcttatgatattccattttcagggaggatatggaggcgtctttcgaaaaatatcaatagggaaaagattgaggtttattcaagatgcgccagagaggttgacaaaagagggccttggcatgtttggacgcagatggttcaaccatgaagaggcttcagcgtttcggggagggatacgggcgctactgattgatctatttcatagtgctctagacgacgatggaccatcggaggcagagcttgaagacaaggacattcagatggactgagcctgctgttgctgctttgattgaatatgtaacctcgttcactcccaagtgaagtttggccgtggagggaatgcgccccgttggctacacacttttgtttacacgctcgttcattcggcggtggaaatgtacagttcaacgttatctaagggcctgtttggaaccggattcagattcaacaaaaatatatttacgaaaagttagctaaatggtttagggtttagatcaataaaatccagattcacaaaatggtgcctttagatttaacaaaaaaaaca

SEQ ID NO: 32071 - DNA, 1858 bp, Zea Mays
atttcttcctttccactttcccaactttacgccgcgtctcatccccacctagagtcctaatcgaaaaccctcgtttgttcgcttgaacagaagcctcccccgccgcacccgccaggcggcgcgggcgcgcggcaatggccgcgcagaacgctgggatcatcatcgattgtcgacaggcgatgtcccccgatcccccggccgtggagttggaggtcatcggctcatcttctccgtccatcacgccatgtcccgctgcagcggcgcccgccgacgccgatttcgatcatgacggatgcaccgcggaattatcttcttcaactgatcgagaattacaggaccatatcagacagtgggaagggtcctatgggcagggtgtactccgtaggatgccggatggtggcgagaagatgcattcacgtgtcctccggatgaagaaggagctcgagcggcggagggccagacagaggatggatgtcacgcccttgagacagacagtgcaagctaagcgtactggtggcagcagtggagaaatctacaacttaaagtctgatgatgagaccatggacagtacggctagcaaacactatccaaactcaagttgtactacatctacaaagacctatacccaggttaagggagctgcatatgaagaacaaagttctttaagccatggcaaatatgcttacccaaagaatggtggtcaaatttcaaaagagtcgttgaggcatcaatcaaaaacgtggaaccttgccaaaaataaggcctcacccttggagattaaaaaggatgtagttctgttggatgacgatgatgatatagagcctgctagatcagctgatgttcagatatctaataagtgggaggagtcaaatatccactatccttcaagcactgatccagaagcggttgaactgacctactctgacatgaaatgtcttgaaccagaagaatatttaaaatcacctgttataaatttttaccttcagtacctcaagaaggcaagacctcgcagggatttacacatgtttaacacctatttttatagcaaactcgaagaagcactatccatgccgaattcagcaagttacggagatggtggagaggtgtagatatttttaagaaagcgtacataattttgccgattaatgaatcgatgcactggagcttgatcattgtttgcatgcctacaaaagaggcagattctgggccaataatacttcacttggactctcttggtcttcactccagtcaaaagctttttgacatagttgcgagggaggatatggaggcgtctttcgaaaaatatcaatagggaaaagattgaggtgccacgtcagcgtaacgagtatgattgtggcctctttatgctttactatattgacaggtttattcaagatgcgccagagaggttgacaaaagagggccttggcatgtttggacgcagatggttcaaccatgaagaggcttcagcgtttcggggagggatacgggcgctactgattgatctatttcatagtgctctagacgacgatggaccatcggaggcagagcttgaagacaaggacattcagatggactgagcctgctgttgctgctttgattgaatatgtaacctcgttcactcccaagtgaagtttggccgtggagggaatgcgccccgttggctacacacttttgtttacacgctcgttcattcggcggtggaaatgtacagttcaacgttatctaagggcctgtttggaaccggattcagattcaacaaaaatatatttacgaaaagttagctaaatggtttagggtttagatcaataaaatccagattcacaaaatggtgcctttagatttaacaaaaaaaaca

SEQ ID NO: 32072 - DNA, 1920 bp, Zea Mays
atttcttcctttccactttcccaactttacgccgcgtctcatccccacctagagtcctaatcgaaaaccctcgtttgttcgcttgaacagaagcctcccccgccgcacccgccaggcggcgcgggcgcgcggcaatggccgcgcagaacgctgggatcatcatcgattgtcgacaggcgatgtcccccgatcccccggccgtggagttggaggtcatcggctcatcttctccgtccatcacgccatgtcccgctgcagcggcgcccgccgacgccgatttcgatcatgacggatgcaccgcggaattatcttcttcaactgatcgagaattacaggaccatatcagacagtgggaagggtcctatgggcagggtgtactccgtaggatgccggatggtggcgagaagatgcattcacgtgtcctccggatgaagaaggagctcgagcggcggagggccagacagaggatggatgtcacgcccttgagacagacagtgcaagctaagcgtactggtggcagcagtggagaaatctacaacttaaagtctgatgatgagaccatggacagtacggctagcaaacactatccaaactcaagttgtactacatctacaaagacctatacccaggttaagggagctgcatatgaagaacaaagttctttaagccatggcaaatatgcttacccaaagaatggtggtcaaatttcaaaagagtcgttgaggcatcaatcaaaaacgtggaaccttgccaaaaataaggcctcacccttggagattaaaaaggatgtagttctgttggatgacgatgatgatatagagcctgctagatcagctgatgttcagatatctaataagtgggaggagtcaaatatccactatccttcaagcactgatccagaagcggttgaactgacctactctgacatgaaatgtcttgaaccagaagaatatttaaaatcacctgttataaatttttaccttcagtacctcaagaaggcaagacctcgcagggatttacacatgtttaacacctatttttatagcaaactcgaagaagcactatccatgccgaattcagcaagttacggagatggtggagaggtgtagatatttttaagaaagcgtacataattttgccgattaatgaatcgatgcactggagcttgatcattgtttgcatgcctacaaaagaggcagattctgggccaataatacttcacttggactctcttggtcttcactccagtcaaaagctttttgacatagttgcgaggtatattcaagcagaacggtggcacctagggatggattcgtcttatgatattccattttcagggaggatatggaggcgtctttcgaaaaatatcaatagggaaaagattgaggtgccacgtcagcgtaacgagtatgattgtggcctctttatgctttactatattgacaggtttattcaagatgcgccagagaggttgacaaaagagggccttggcatgtttggacgcagatggttcaaccatgaagaggcttcagcgtttcggggagggatacgggcgctactgattgatctatttcatagtgctctagacgacgatggaccatcggaggcagagcttgaagacaaggacattcagatggactgagcctgctgttgctgctttgattgaatatgtaacctcgttcactcccaagtgaagtttggccgtggagggaatgcgccccgttggctacacacttttgtttacacgctcgttcattcggcggtggaaatgtacagttcaacgttatctaagggcctgtttggaaccggattcagattcaacaaaaatatatttacgaaaagttagctaaatggtttagggtttagatcaataaaatccagattcacaaaatggtgcctttagatttaacaaaaaaaaca

SEQ ID NO: 32073 - DNA, 1847 bp, Zea Mays
atttcttcctttccactttcccaactttacgccgcgtctcatccccacctagagtcctaatcgaaaaccctcgtttgttcgcttgaacagaagcctcccccgccgcacccgccaggcggcgcgggcgcgcggcaatggccgcgcagaacgctgggatcatcatcgattgtcgacaggcgatgtcccccgatcccccggccgtggagttggaggtcatcggctcatcttctccgtccatcacgccatgtcccgctgcagcggcgcccgccgacgccgatttcgatcatgacggatgcaccgcggaattatcttcttcaactgatcgagaattacaggaccatatcagacagtgggaagggtcctatgggcagggtgtactccgtaggatgccggatggtggcgagaagatgcattcacgtgtcctccggatgaagaaggagctcgagcggcggagggccagacagaggatggatgtcacgcccttgagacagacagtgcaagctaagcgtactggtggcagcagtggagaaatctacaacttaaagtctgatgatgagaccatggacagtacggctagcaaacactatccaaactcaagttgtactacatctacaaagacctatacccaggttaagggagctgcatatgaagaacaaagttctttaagccatggcaaatatgcttacccaaagaatggtggtcaaatttcaaaagagtcgttgaggcatcaatcaaaaacgtggaaccttgccaaaaataaggcctcacccttggagattaaaaaggatgtagttctgttggatgacgatgatgatatagagcctgctagatcagctgatgttcagatatctaataagtgggaggagtcaaatatccactatccttcaagcactgatccagaagcggttgaactgacctactctgacatgaaatgtcttgaaccagaagaatatttaaaatcacctgttataaatttttaccttcagtacctcaagaaggcaagacctcgcagggatttacacatgtttaacacctatttttatagcaaactcgaagaagcactatccatgccgaattcagcaagttacggagatggtggagaggtgtagatatttttaagaaagcgtacataattttgccgattaatgaatcgatgcactggagcttgatcattgtttgcatgcctacaaaagaggcagattctgggccaataatacttcacttggactctcttggtcttcactccagtcaaaagctttttgacatagttgcgagggaggatatggaggcgtctttcgaaaaatatcaatagggaaaagattgaggtgccacgtcagcgtaacgagtatgattgtggcctctttatgctttactatattgacaggtttattcaagatgcgccagagaggttgacaaaagagggccttggcatgatggttcaaccatgaagaggcttcagcgtttcggggagggatacgggcgctactgattgatctatttcatagtgctctagacgacgatggaccatcggaggcagagcttgaagacaaggacattcagatggactgagcctgctgttgctgctttgattgaatatgtaacctcgttcactcccaagtgaagtttggccgtggagggaatgcgccccgttggctacacacttttgtttacacgctcgttcattcggcggtggaaatgtacagttcaacgttatctaagggcctgtttggaaccggattcagattcaacaaaaatatatttacgaaaagttagctaaatggtttagggtttagatcaataaaatccagattcacaaaatggtgcctttagatttaacaaaaaaaaca

SEQ ID NO: 32074 - DNA, 1897 bp, Zea Mays
ctttacgccgcgtctcatccccacctagagtcctaatcgaaaaccctcgtttgttcgcttgaacagaagcctcccccgccgcacccgccaggcggcgcgggcgcgcggcaatggccgcgcagaacgctgggatcatcatcgattgtcgacaggcgatgtcccccgatcccccggccgtggagttggaggtcatcggctcatcttctccgtccatcacgccatgtcccgctgcagcggcgcccgccgacgccgatttcgatcatgacggatgcaccgcggaattatcttcttcaactgatcgagaattacaggaccatatcagacagtgggaagggtcctatgggcagggtgtactccgtaggatgccggatggtggcgagaagatgcattcacgtgtcctccggatgaagaaggagctcgagcggcggagggccagacagaggatggatgtcacgcccttgagacagacagtgcaagctaagcgtactggtggcagcagtggagaaatctacaacttaaagtctgatgatgagaccatggacagtacggctagcaaacactatccaaactcaagttgtactacatctacaaagacctatacccaggttaagggagctgcatatgaagaacaaagttctttaagccatggcaaatatgcttacccaaagaatggtggtcaaatttcaaaagagtcgttgaggcatcaatcaaaaacgtggaaccttgccaaaaataaggcctcacccttggagattaaaaaggatgtagttctgttggatgacgatgatgatatagagcctgctagatcagctgatgttcagatatctaataagtgggaggagtcaaatatccactatccttcaagcactgatccagaagcggttgaactgacctactctgacatgaaatgtcttgaaccagaagaatatttaaaatcacctgttataaatttttaccttcaggtacctcaagaaggcaagacctcgcagggatttacacatgtttaacacctatttttatagcaaactcgaagaagcactatccatgccgaattcagcaagttacggagatggtggagaggtgtagatatttttaagaaagcgtacataattttgccgattaatgaatcgatgcactggagcttgatcattgtttgcatgcctacaaaagaggcagattctgggccaataatacttcacttggactctcttggtcttcactccagtcaaaagctttttgacatagttgcgaggtatattcaagcagaacggtggcacctagggatggattcgtcttatgatattccattttcagggaggatatggaggcgtctttcgaaaaatatcaatagggaaaagattgaggtgccacgtcagcgtaacgagtatgattgtggcctctttatgctttactatattgacaggtttattcaagatgcgccagagaggttgacaaaagagggccttggcatgtttggacgcagatggttcaaccatgaagaggcttcagcgtttcggggagggatacgggcgctactgattgatctatttcatagtgctctagacgacgatggaccatcggaggcagagcttgaagacaaggacattcagatggactgagcctgctgttgctgctttgattgaatatgtaacctcgttcactcccaagtgaagtttggccgtggagggaatgcgccccgttggctacacacttttgtttacacgctcgttcattcggcggtggaaatgtacagttcaacgttatctaagggcctgtttggaaccggattcagattcaacaaaaatatatttacgaaaagttagctaaatggtttagggtttagatcaataaaatccagattcacaaaatggtgcctttagatttaacaaaaaaaaca

SEQ ID NO: 32075 - DNA, 722 bp, Zea Mays
cccacctagagtcctaatcgaaaaccctcgtttgttcgcttgaacagaagcctcccccgccgcacccgccaggcggcgcgggcgcgcggcaatggccgcgcagaacgctgggatcatcatcgattgtcgacaggcgatgtcccccgatcccccggccgtggagttggaggtcatcggctcatcttctccgtccatcacgccatgtcccgctgcagcggcgcccgccgacgccgatttcgatcatgacggatgcaccgcggaattatcttcttcaactgatcgagaattacaggaccatatcagacagtgggaagggtcctatgggcagggtgtactccgtaggatgccggatggtggcgagaagatgcattcacgtgtcctccggatgaagaaggagctcgagcggcggagggccagacagaggatggatgtcacgcccttgagacagacagtgcaagctaagcgtactggtggcagcagtggagaaatctacaacttaagtggaaccttgccaaaaataaggcctcacccttggagattaaaaaggatgtagttctgttggatgacgatgatgatatagagcctgctagatcagctgatgttcagatatctaataagtgggaggagtcaaatatccactatccttcaagcactgatccagaagcggttgaactgacctactctgacatgaaatgtcttgaaccagaagaatatttaaaatc

SEQ ID NO: 32076 - DNA, 837 bp, Zea Mays
gaattcagcaagttacggagatggtggagaggtgtagatatttttaagaaagcgtacataattttgccgattaatgaatcgatgcactggagcttgatcattgtttgcatgcctacaaaagaggcagattctgggccaataatacttcacttggactctcttggtcttcactccagtcaaaagctttttgacatagttgcgaggtatattcaagcagaacggtggcacctagggatggattcgtcttatgatattccattttcagggaggatatggaggcgtctttcgaaaaatatcaatagggaaaagattgaggtgccacgtcagcgtaacgagtatgattgtggcctctttatgctttactatattgacaggtttattcaagatgcgccagagaggttgacaaaagagggccttggcatgatggttcaaccatgaagaggcttcagcgtttcggggagggatacgggcgctactgattgatctatttcatagtgctctagacgacgatggaccatcggaggcagagcttgaagacaaggacattcagatggactgagcctgctgttgctgctttgattgaatatgtaacctcgttcactcccaagtgaagtttggccgtggagggaatgcgccccgttggctacacacttttgtttacacgctcgttcattcggcggtggaaatgtacagttcaacgttatctaagggcctgtttggaaccggattcagattcaacaaaaatatatttacgaaaagttagctaaatggtttagggtttagatcaataaaatccagattcacaaaatggtgcctttagatttaacaaaaaaaaca

SEQ ID NO: 32077 - DNA, 778 bp, Zea Mays
gaattcagcaagttacggagatggtggagaggtgtagatatttttaagaaagcgtacataattttgccgattaatgaatcgatgcactggagcttgatcattgtttgcatgcctacaaaagaggcagattctgggccaataatacttcacttggactctcttggtcttcactccagtcaaaagctttttgacatagttgcgaggtatattcaagcagaacggtggcacctagggatggattcgtcttatgatattccattttcagggaggatatggaggcgtctttcgaaaaatatcaatagggaaaagattgaggtttattcaagatgcgccagagaggttgacaaaagagggccttggcatgatggttcaaccatgaagaggcttcagcgtttcggggagggatacgggcgctactgattgatctatttcatagtgctctagacgacgatggaccatcggaggcagagcttgaagacaaggacattcagatggactgagcctgctgttgctgctttgattgaatatgtaacctcgttcactcccaagtgaagtttggccgtggagggaatgcgccccgttggctacacacttttgtttacacgctcgttcattcggcggtggaaatgtacagttcaacgttatctaagggcctgtttggaaccggattcagattcaacaaaaatatatttacgaaaagttagctaaatggtttagggtttagatcaataaaatccagattcacaaaatggtgcctttagatttaacaaaaaaaaca

SEQ ID NO: 32078 - DNA, 2162 bp, Zea Mays
gtgacatgttgcaaaattctcatctttcttcccgccggattgacgaaatcgatcgctccgctcccaccggccaccaccagtccaccacacctcgatccccgcaccgcccagccggccgcccgcatccaccgcacaaaaccctaggcatggccccaccctaaaccccttgctccccacctcgtatggtcgtcgtccccttctccctccgcattgcgcgaaaccccatccgcctccgccttcttccggtctccgctgctcgcttcacccgtctcgccatgtcgaccacgccgccggcggcggctaccatatccgtcgagtatgccaagtccgggcgctcaatctgcaaggggtgcagcggggtcatcgcctccggggcgctccgcctcggcgcctctgcgcgcgacccccgtggcttcggcgccaccaagtggtaccacgtctcctgcttaccctcctcgtcgtacccgctcggccccatcgggagtatcaaggggttcgactccattaaggaccatgatcgtgcggaattgcgagaactagagaagaatcataaaagagacaatactgcagtcagccctccggaggaacaacgtccaaagaaagcaaggattcagatgttttcccctgcggagggggtgccagataatgtaacagtctctgttgagtatgcgaagtctggtcgctctacctgcaagggctgcagtgagaatattgccaaagatttgagttgcatgcaggatcatgaccgtgacaagttgcacaaattggtggagaatcacaagagcgatggaaaagcggctgatgtattgaatgagtcaaatctgaagagagaaatggctcacagcatggatgactcgaatgaaggtgctgaaaaggatctggaaggaataaagattcactgcatgggggagtttgaagaaggtgctgaaaagaacctggaagaagcaaagttacctgcagggaacaaaatgattggtccatcgatatccttttcactttctgatataaaaaaagaatacaagaatgctacccttcctgctcattggaaggtttttgatacagttatcttccgtgagaaggaagatggccttcatgcttcatctaagattgctgcatttgattttgatgggtgccttgccaataccagtatgaagagggttggtgcagaccagtggtctttacagcataaatcaattccagaaaaattgcaaagactgtacgatgatggttacaagctggtcatattcaccaatgagtcaaacattgagcgctggaagaacaagcgacaacaagctgttgactccaaagttggccgccttgataactttattgaatgtgttaaagcccctattcaggttttcattgcttgtggtttagggaaaggaaaaggtattccagatgatccataccgcaaaccaaatcctggaatgtggtggttgatggctcagcatttcaattctggaatcaaaattgacatggatcaatctttctatgtcggtgatgctgctgggagagagaacgatcatagtgacgcagatatagaatttgctaaggccatcggtctcaagttccatgttcccgaggagtacttcggtttctaattacctgtgaccagctagtaagatggttacactacgtcgtttagtgtttggatattatcaatactgtggctattctggtatggtgatctacatgtctgtttaaaccgtcaaataatatcccagttattcacttaggtcctgtttgtttccttccagaattatgtaatccatatggattatataagtacttaataacctgcttatggattatcataatctaggtatctagattatataatccacctaataatctgtgttgtttgtttgtctcttaacttatttaagttggattatataatctagagggtaaacaaataaggctaacttgctgacataattgagaaaactcaactctctgtatcgtagagatgttgagtcaatcatgttgcgaggatcagccatagtggtggtaatatgatcacgcttagatagtcagatcggtggatcaattcgtgtatgactgttaatcacgagccatggcgtggccaattaatattttcgtctcgctgtagcaagtgcccatggtgtgagcaaagtaggctggataggtctccatttttt

SEQ ID NO: 32079 - DNA, 2288 bp, Zea Mays
caaaattctcatctttcttcccgccggattgacgaaatcgatcgctccgctcccaccggccaccaccagtccaccacacctcgatccccgcaccgcccagccggccgcccgcatccaccgcacaaaaccctaggcatggccccaccctaaaccccttgctccccacctcgtatggtcgtcgtccccttctccctccgcattgcgcgaaaccccatccgcctccgccttcttccggtctccgctgctcgcttcacccgtctcgccatgtcgaccacgccgccggcggcggctaccatatccgtcgagtatgccaagtccgggcgctcaatctgcaaggggtgcagcggggtcatcgcctccggggcgctccgcctcggcgcctctgcgcgcgacccccgtggcttcggcgccaccaagtggtaccacgtctcctgcttaccctcctcgtcgtacccgctcggccccatcgggagtatcaaggggttcgactccattaaggaccatgatcgtgcggaattgcgagaactagagaagaatcataaaagagacaatactgcagtcagccctccggaggaacaacgtccaaagaaagcaaggattcagatgttttcccctgcggagggggtgccagataatgtaacagtctctgttgagtatgcgaagtctggtcgctctacctgcaagggctgcagtgagaatattgccaaaggtgccctccgccttggtgcctcttttcctgatccccgtggctacgaaaatactaagtggtaccatgttgtgtgcttccctacatcatcatacccattatttccaatgtcaaatctgaaggggtttgattcaattgagatttgagttgcatgcaggatcatgaccgtgacaagttgcacaaattggtggagaatcacaagagcgatggaaaagcggctgatgtattgaatgagtcaaatctgaagagagaaatggctcacagcatggatgactcgaatgaaggtgctgaaaaggatctggaaggaataaagattcactgcatgggggagtttgaagaaggtgctgaaaagaacctggaagaagcaaagttacctgcagggaacaaaatgattggtccatcgatatccttttcactttctgatataaaaaaagaatacaagaatgctacccttcctgctcattggaaggtttttgatacagttatcttccgtgagaaggaagatggccttcatgcttcatctaagattgctgcatttgattttgatgggtgccttgccaataccagtatgaagagggttggtgcagaccagtggtctttacagcataaatcaattccagaaaaattgcaaagactgtacgatgatggttacaagctggtcatattcaccaatgagtcaaacattgagcgctggaagaacaagcgacaacaagctgttgactccaaagttggccgccttgataactttattgaatgtgttaaagcccctattcaggttttcattgcttgtggtttagggaaaggaaaaggtattccagatgatccataccgcaaaccaaatcctggaatgtggtggttgatggctcagcatttcaattctggaatcaaaattgacatggatcaatctttctatgtcggtgatgctgctgggagagagaacgatcatagtgacgcagatatagaatttgctaaggccatcggtctcaagttccatgttcccgaggagtacttcggtttctaattacctgtgaccagctagtaagatggttacactacgtcgtttagtgtttggatattatcaatactgtggctattctggtatggtgatctacatgtctgtttaaaccgtcaaataatatcccagttattcacttaggtcctgtttgtttccttccagaattatgtaatccatatggattatataagtacttaataacctgcttatggattatcataatctaggtatctagattatataatccacctaataatctgtgttgtttgtttgtctcttaacttatttaagttggattatataatctagagggtaaacaaataaggctaacttgctgacataattgagaaaactcaactctctgtatcgtagagatgttgagtcaatcatgttgcgaggatcagccatagtggtggtaatatgatcacgcttagatagtcagatcggtggatcaattcgtgtatgactgttaatcacgagccatggcgtggccaattaatattttcgtctcgctgtagcaagtgcccatggtgtgagcaaagtaggctggataggtctccatttttt

SEQ ID NO: 32080 - DNA, 1683 bp, Zea Mays
ctttcttcccgccggattgacgaaatcgatcgctccgctcccaccggccaccaccagtccaccacacctcgatccccgcaccgcccagccggccgcccgcatccaccgcacaaaaccctaggcatggccccaccctaaaccccttgctccccacctcgtatggtcgtcgtccccttctccctccgcattgcgcgaaaccccatccgcctccgccttcttccggtctccgctgctcgcttcacccgtctcgccatgtcgaccacgccgccggcggcggctaccatatccgtcgagtatgccaagtccgggcgctcaatctgcaaggggtgcagcggggtcatcgcctccggggcgctccgcctcggcgcctctgcgcgcgacccccgtggcttcggcgccaccaagtggtaccacgtctcctgcttaccctcctcgtcgtacccgctcggccccatcgggagtatcaaggggttcgactccattaaggaccatgatcgtgcggaattgcgagaactagagaagaatcataaaagagacaatactgcagtcagccctccggaggaacaacgtccaaagaaagcaaggattcagatgttttcccctgcggagggggtgccagataatgtaacagtctctgttgagtatgcgaagtctggtcgctctacctgcaagggctgcagtgagaatattgccaaaggtgccctccgccttggtgcctcttttcctgatccccgtggctacgaaaatactaagtggtaccatgttgtgtgcttccctacatcatcatacccattatttccaatgtcaaatctgaaggggtttgattcaattgaggatcatgaccgtgacaagttgcacaaattggtggagaatcacaagagcgatggaaaagcggctgatgtattgaatgagtcaaatctgaagagagaaatggctcacagcatggatgactcgaatgaaggtgctgaaaaggatctggaaggaataaagattcactgcatgggggagtttgaagaaggtgctgaaaagaacctggaagaagcaaagttacctgcagggaacaaaatgattggtccatcgatatccttttcactttctgatataaaaaaagaatacaagaatgctacccttcctgctcattggaaggtttttgatacagttatcttccgtgagaaggaagatggccttcatgcttcatctaagattgctgcatttgattttgatgggtgccttgccaataccagtatgaagagggttggtgcagaccagtggtctttacagcataaatcaattccagaaaaattgcaaagactgtacgatgatggttacaagctggtcatattcaccaatgagtcaaacattgagcgctggaagaacaagcgacaacaagctgttgactccaaagttggccgccttgataactttattgaatgtgttaaagcccctattcaggttttcattgcttgtggtttagggaaaggaaaaggtattccagatgatccataccgcaaaccaaatcctggaatgtggtggttgatggctcagcatttcaattctggaatcaaaattgacatggatcaatctttctatgtcggtgatgctgctgggagagagaacgatcatagtgacgcagatatagaatttgctaagttgtaattcagagagaatgtaacaacctggttc

SEQ ID NO: 32081 - DNA, 1158 bp, Zea Mays
tctcttaaaaactagacccctacgggaaaggcctcccacggtgcattgctttaagaagaggatctcaacacagggccgagataagggactgaaggctggaccgtccaggaacatgacattgcatgacgaggctcttttttgtgcgactacagggttggtgcagaccagtggtctttacagcataaatcaattccagaaaaattgcaaagactgtacgatgatggttacaagctggtcatattcaccaatgagtcaaacattgagcgctggaagaacaagcgacaacaagctgttgactccaaagttggccgccttgataactttattgaatgtgttaaagcccctattcaggttttcattgcttgtggtttagggaaaggaaaaggtattccagatgatccataccgcaaaccaaatcctggaatgtggtggttgatggctcagcatttcaattctggaatcaaaattgacatggatcaatctttctatgtcggtgatgctgctgggagagagaacgatcatagtgacgcagatatagaatttgctaaggccatcggtctcaagttccatgttcccgaggagtacttcggtttctaattacctgtgaccagctagtaagatggttacactacgtcgtttagtgtttggatattatcaatactgtggctattctggtatggtgatctacatgtctgtttaaaccgtcaaataatatcccagttattcacttaggtcctgtttgtttccttccagaattatgtaatccatatggattatataagtacttaataacctgcttatggattatcataatctaggtatctagattatataatccacctaataatctgtgttgtttgtttgtctcttaacttatttaagttggattatataatctagagggtaaacaaataaggctaacttgctgacataattgagaaaactcaactctctgtatcgtagagatgttgagtcaatcatgttgcgaggatcagccatagtggtggtaatatgatcacgcttagatagtcagatcggtggatcaattcgtgtatgactgttaatcacgagccatggcgtggccaattaatattttcgtctcgctgtagcaagtgcccatggtgtgagcaaagtaggctggataggtctccatttttt

SEQ ID NO: 32082 - DNA, 1877 bp, Zea Mays
atcgggttggataacatagctctggtcagtgtgattgggccggctcaatgaaattattggttgggctcacccgtctcgcggcatcgtaagattgctccgctcacccgtctcaccacaacaccgaagcagccgagaaccggaccccgcaaggccgcaacagcaagggcagcactgccgaaaccgcaggccgcagcactcgagagcgcagccaggcggcggcgctccgcctccgactccacaccaggccgctgcgtccatggacccctccccgcagtcgacgccgcccaccggagacgacccggcagcggcggcggatcccgacctaccgaggctcacggtgacgtaggtggagcagatgaaggtggaggccagggttggcgacatctaccgctccctcttcggggccgcgcccaacacgaaatccatcatgctagagctgtggcgtgatcagcatatcgagtatctgacgcctgggctgaggcatatgggaccagcctttcatgttctagatgccaatcgcccttggctatgctactggatggttcatccacttgctttgctggatgaagcacttgatgatgatcttgagaatgatatcatagacttcttagctcgatgtcaggataaagatggtggatatagtggtggacctggacagttgcctcacctagctacgacttatgctgctgtaaatacacttgtgacaatagggagcgaaagagcattgtcatcaatcaataggggcaacctgtacaattttatgctgcagatgaaagatgtatcaggtgctttcagaatgcatgatggtggcgaaattgatgtccgtgcttcctacaccgctatatcggttgccagccttgtgaatattcttgattttaaactggcaaaaggtgtaggcgactacatagcaagatgtcaaacttatgaaggtggtattgctggggagccttatgctgaagcacatggtggggctgggtggcttttcgtcaaggagtggaatgcggatttcaaggacgaactaataaattggttgatggttgctactccttttggcagggagctgccattgctttcacacaaaagttaattacgattgttgataagcaattgaagtcctcgtattcctgcaaaaggccatcaggagaggatgcctgcagcaccagttcatatgggtgcaccgcgaaaaagtcttcctctgctgtggactatgcgaagtttggatttgattttatacaacagagcaaccaaattggcccactcttccataacattgccctgcaacaatacatcctactttgttctcagagggaggcttgagggataagcctggaaagaacagagatcactatcattcatgctactgcctcagtggcctcgcagttagccagtacagtgccatgactgatactggttcgtgcccattacctcagcatgtgcttggaccgtactctaatttgctggagccaatccatccactctacaatgttgtcctagataagtaccatacagcctatgagttcttctcagaagagtgatctaatgttagaacctaagaacaattggctaaggttgtgtacgattgtgttatttgcacgaatgatggtaacttagtcgtgttataccagggtatttgtatgtttggtcaggtggattgcctggataaatctctctgttgtaatggtcgtgtcccgaattatgtttgtaatggtcgtgtcccgaattatgttactggtgttcattattagttaaaatgcaacagaagtgtaggtctagatgctgcatagtgatctgtggatgctagaaccaagtgtttgtacgtaatactgttatgatggtactaaattgattagttaaatgcacgattatggtacctgaac

SEQ ID NO: 32083 - DNA, 1835 bp, Zea Mays
caccacaacaccgaagcagccgagaaccggaccccgcaaggccgcaacagcaagggcagcactgccgaaaccgcaggccgcagcactcgagagcgcagccaggcggcggcgctccgcctccgactccacaccaggccgctgcgtccatggacccctccccgcagtcgacgccgcccaccggagacgacccggcagcggcggcggatcccgacctaccgaggctcacggtgacgtaggtggagcagatgaaggtggaggccagggttggcgacatctaccgctccctcttcggggccgcgcccaacacgaaatccatcatgctagagctgtggcgtgatcagcatatcgagtatctgacgcctgggctgaggcatatgggaccagcctttcatgttctagatgccaatcgcccttggctatgctactggatggttcatccacttgctttgctggatgaagcacttgatgatgatcttgagaatgatatcatagacttcttagctcgatgtcaggataaagatggtggatatagtggtggacctggacagttgcctcacctagctacgacttatgctgctgtaaatacacttgtgacaatagggagcgaaagagcattgtcatcaatcaataggggcaacctgtacaattttatgctgcagatgaaagatgtatcaggtgctttcagaatgcatgatggtggcgaaattgatgtccgtgcttcctacaccgctatatcgccttgtgaatattcttgattttaaactggcaaaaggtgtaggcgactacatagcaagatgtcaaacttatgaaggtggtattgctggggagccttatgctgaagcacatggtatacattctgtggattggctgctttgatcctgcttaatgaggcagagaaagttgacttgcctagtttgattggctgggtggcttttcgtcaaggagtggaatgcggatttcaaggacgaactaataaattggttgatggttgctactccttttggcagggagctgccattgctttcacacaaaagttaattacgattgttgataagcaattgaagtcctcgtattcctgcaaaaggccatcaggagaggatgcctgcagcaccagttcatatgggtgcaccgcgaaaaagtcttcctctgctgtggactatgcgaagtttggatttgattttatacaacagagcaaccaaattggcccactcttccataacattgccctgcaacaatacatcctactttgttctcaggtactagagggaggcttgagggataagcctggaaagaacagagatcactatcattcatgctactgcctcagtggcctcgcagttagccagtacagtgccatgactgatactggttcgtgcccattacctcagcatgtgcttggaccgtactctaatttgctggagccaatccatccactctacaatgttgtcctagataagtaccatacagcctatgagttcttctcagaagagtgatctaatgttagaacctaagaacaattggctaaggttgtgtacgattgtgttatttgcacgaatgatggtaacttagtcgtgttataccagggtatttgtatgtttggtcaggtggattgcctggataaatctctctgttgtaatggtcgtgtcccgaattatgtttgtaatggtcgtgtcccgaattatgttactggtgttcattattagttaaaatgcaacagaagtgtaggtctagatgctgcatagtgatctgtggatgctagaaccaagtgtttgtacgtaatactgttatgatggtactaaattgattagttaaatgcacgattatggtacctgaac

SEQ ID NO: 32084 - DNA, 1766 bp, Zea Mays
caccacaacaccgaagcagccgagaaccggaccccgcaaggccgcaacagcaagggcagcactgccgaaaccgcaggccgcagcactcgagagcgcagccaggcggcggcgctccgcctccgactccacaccaggccgctgcgtccatggacccctccccgcagtcgacgccgcccaccggagacgacccggcagcggcggcggatcccgacctaccgaggctcacggtgacgtaggtggagcagatgaaggtggaggccagggttggcgacatctaccgctccctcttcggggccgcgcccaacacgaaatccatcatgctagagctgtggcgtgatcagcatatcgagtatctgacgcctgggctgaggcatatgggaccagcctttcatgttctagatgccaatcgcccttggctatgctactggatggttcatccacttgctttgctggatgaagcacttgatgatgatcttgagaatgatatcatagacttcttagctcgatgtcaggataaagatggtggatatagtggtggacctggacagttgcctcacctagctacgacttatgctgctgtaaatacacttgtgacaatagggagcgaaagagcattgtcatcaatcaataggggcaacctgtacaattttatgctgcagatgaaagatgtatcaggtgctttcagaatgcatgatggtggcgaaattgatgtccgtgcttcctacaccgctatatcggttgccagccttgtgaatattcttgattttaaactggcaaaaggtgtaggcgactacatagcaagatgtcaaacttatgaaggtggtattgctggggagccttatgctgaagcacatggtatacattctgtggattggctgctttgatcctgcttaatgaggcagagaaagttgacttgcctagtttgattggctgggtggcttttcgtcaaggagtggaatgcggatttcaaggacgaactaataaattggttgatggttgctactccttttggcaggccatcaggagaggatgcctgcagcaccagttcatatgggtgcaccgcgaaaaagtcttcctctgctgtggactatgcgaagtttggatttgattttatacaacagagcaaccaaattggcccactcttccataacattgccctgcaacaatacatcctactttgttctcaggtactagagggaggcttgagggataagcctggaaagaacagagatcactatcattcatgctactgcctcagtggcctcgcagttagccagtacagtgccatgactgatactggttcgtgcccattacctcagcatgtgcttggaccgtactctaatttgctggagccaatccatccactctacaatgttgtcctagataagtaccatacagcctatgagttcttctcagaagagtgatctaatgttagaacctaagaacaattggctaaggttgtgtacgattgtgttatttgcacgaatgatggtaacttagtcgtgttataccagggtatttgtatgtttggtcaggtggattgcctggataaatctctctgttgtaatggtcgtgtcccgaattatgtttgtaatggtcgtgtcccgaattatgttactggtgttcattattagttaaaatgcaacagaagtgtaggtctagatgctgcatagtgatctgtggatgctagaaccaagtgtttgtacgtaatactgttatgatggtactaaattgattagttaaatgcacgattatggtacctgaac

SEQ ID NO: 32085 - DNA, 2211 bp, Zea Mays
caccacaacaccgaagcagccgagaaccggaccccgcaaggccgcaacagcaagggcagcactgccgaaaccgcaggccgcagcactcgagagcgcagccaggcggcggcgctccgcctccgactccacaccaggccgctgcgtccatggacccctccccgcagtcgacgccgcccaccggagacgacccggcagcggcggcggatcccgacctaccgaggctcacggtgacgtaggtggagcagatgaaggtggaggccagggttggcgacatctaccgctccctcttcggggccgcgcccaacacgaaatccatcatgctagagctgtggcgtgatcagcatatcgagtatctgacgcctgggctgaggcatatgggaccagcctttcatgttctagatgccaatcgcccttggctatgctactggatggttcatccacttgctttgctggatgaagcacttgatgatgatcttgagaatgatatcatagacttcttagctcgatgtcaggataaagatggtggatatagtggtggacctggacagttgcctcacctagctacgacttatgctgctgtaaatacacttgtgacaatagggagcgaaagagcattgtcatcaatcaataggggcaacctgtacaattttatgctgcagatgaaagatgtatcaggtgctttcagaatgcatgatggtggcgaaattgatgtccgtgcttcctacaccgctatatcgccttgtgaatattcttgattttaaactggcaaaaggtgtaggcgactacatagcaagatgtcaaacttatgaaggtggtattgctggggagccttatgctgaagcacatggtgggtatgtttctaaggatttctgtgaagtttgaaatttatatgttaagaacattaacaaagttgcattcataaggtatacattctgtggattggctgctttgatcctgcttaatgaggcagagaaagttgacttgcctagtttgattggctgggtggcttttcgtcaaggagtggaatgcggatttcaaggacgaactaataaattggttgatggttgctactccttttggcagggagctgccattgctttcacacaaaagttaattacgattgttgataagcaattgaagtcctcgtattcctgcaaaaggccatcaggagaggatgcctgcagcaccagttcatatgggtgcaccgcgaaaaagtcttcctctgctgtggactatgcgaagtttggatttgattttatacaacagagcaaccaaattggcccactcttccataacattgccctgcaacaatacatcctactttgttctcaggtgaggtaactttgaatacaatattattttcatatgcagagttttatcactagaatgtgaaattctgcaatgccgtcttattatagttgttaccaccctctatcccgaaattataagttgttttagcttttctaggttacataacttttgatatgcacctagatatacaatgtctacatacatagcaaaagttatgtgccgaaaaatgccgaaacaacctataaattggaacggagggagtatttattgaggaaatgagatctcagataagttaagattacaatcgcttctgtaactcaggtactagagggaggcttgagggataagcctggaaagaacagagatcactatcattcatgctactgcctcagtggcctcgcagttagccagtacagtgccatgactgatactggttcgtgcccattacctcagcatgtgcttggaccgtactctaatttgctggagccaatccatccactctacaatgttgtcctagataagtaccatacagcctatgagttcttctcagaagagtgatctaatgttagaacctaagaacaattggctaaggttgtgtacgattgtgttatttgcacgaatgatggtaacttagtcgtgttataccagggtatttgtatgtttggtcaggtggattgcctggataaatctctctgttgtaatggtcgtgtcccgaattatgtttgtaatggtcgtgtcccgaattatgttactggtgttcattattagttaaaatgcaacagaagtgtaggtctagatgctgcatagtgatctgtggatgctagaaccaagtgtttgtacgtaatactgttatgatggtactaaattgattagttaaatgcacgattatggtacctgaac

SEQ ID NO: 32086 - DNA, 1916 bp, Zea Mays
caattttcagcaccactatttctccttaactgctgttttttttttgggtttccacacttggtcgccgtcttctccccctttcgctttcgctcttcctctccagcccacaagactccgcggcgccgcagacatgcgcccgcttatccgaaccgctcgctgctggctcctccgcgcgcgtgttcgcgccatggccacgcttcctatggcgtcccccgccgccgccatcccctcctccgccacccgccccgtcgcctccccttcttcgcgttctcaccgccccctcacccgcttcttctccgtcgcgccggcgccggtcggggcgaaagggctccgagcggcggcctccgccgttgaggtgggcggcgtaaagatcgcgcgcgaggatgttgtgaaagaagatgacccaacaaacaacgtgccagacactatctttgcgaagattggcctgcagctgcacaggagggagaaccatccccttgggattctgaagaacacaatttatgattactttgacaagaacttcactggacagtttgacaagtttgatgacctttgcccccttgtttctgtcaagcagaattttgatgatgtcttggtcccttctgaccatgtaagccggagttacaatgacacatattatgttgatgatcaaacagtcttaaggtgtcataccagtgctcatcaagctgagctgctaagggatggacgtacacactttcttgtaactggagatgtttaccgtagggattccattgattcaactcactatcctgtcttccatcaggttctggcttggatgggacagcatatgcagctgcagaactcaagaaaacactggaaggattggcaagacatctatttggtgctgtagagatgcgatgggttgacacatacttcccatttaccaacccatcctttgagctcgaaatatattttcaggatgattggttagaggttttgggctgtggagttaccgagcaggaaattttgaaaagaaatggcaggagagatcatgtggcatgggcctttggattgggattggagcgtcttgcgatggtccttttcgacattccagatattcgactattctggtcgaatgataaacggttcacgtcccagttctcagaaggcaagcttggtgtcaagttcaagccattttcaaagtttcctccttgttacaaagatatgagtttctggatcaatggtgcatttacagaaaacaacttatgtgaggttgtcagaggaatagccggggatcttgttgaggaggtaaaacttattgataatttcaccaacaagaaaggcatgacaagtcattgctacagaatagcatataggtcaatggaacgttcgctcacagacgaggagattaacaatcttcagttgaatgtcagggaagctgtgaaagataaattgaaagtagagttgagatagcagcagctaattatgctgtcatagcatggactaaattttgcctgtctttatgtaaatcaattaaaaaggattttttatctatcgagaaaatgcgccatttgttcctggcattgatcacgttctcttctgtttagggaagagaaaaggtccctgttccatttgggaatcatatcttgtaattcataaggctttgtttggttgcacagggatcaaaggagattgaggaggattaaatccctctctattcaattttgactaggtagagatttaatcccctctaacctccttttaatccccttgtaaccgaacaagccctaagatgatgagctgtacacttctcactattttggaggacatgtggtttgggaattcatgtttggcctttcaattcaattttggccgttgtacattatttgtaacgaacaagtaaaagcactctgtatataaagtctaggatggttcaaatctgaaattaaccttta

SEQ ID NO: 32087 - DNA, 1949 bp, Zea Mays
caattttcagcaccactatttctccttaactgctgttttttttttgggtttccacacttggtcgccgtcttctccccctttcgctttcgctcttcctctccagcccacaagactccgcggcgccgcagacatgcgcccgcttatccgaaccgctcgctgctggctcctccgcgcgcgtgttcgcgccatggccacgcttcctatggcgtcccccgccgccgccatcccctcctccgccacccgccccgtcgcctccccttcttcgcgttctcaccgccccctcacccgcttcttctccgtcgcgccggcgccggtcggggcgaaagggctccgagcggcggcctccgccgttgaggtgggcggcgtaaagatcgcgcgcgaggatgttgtgaaagaagatgacccaacaaacaacgtgccagacactatctttgcgaagattggcctgcagctgcacaggagggagaaccatccccttgggattctgaagaacacaatttatgattactttgacaagaacttcactggacagtttgacaagtttgatgacctttgcccccttgtttctgtcaagcagaattttgatgatgtcttggtcccttctgaccatgtaagccggagttacaatgacacatattatgttgatgatcaaacagtcttaaggtgtcataccagtgctcatcaagctgagctgctaagggatggacgtacacactttcttgtaactggagatgtttaccgtagggattccattgattcaactcactatcctgtcttccatcagggttccgtgtgttctctcctgatgaatggtcaggttctggcttggatgggacagcatatgcagctgcagaactcaagaaaacactggaaggattggcaagacatctatttggtgctgtagagatgcgatgggttgacacatacttcccatttaccaacccatcctttgagctcgaaatatattttcaggatgattggttagaggttttgggctgtggagttaccgagcaggaaattttgaaaagaaatggcaggagagatcatgtggcatgggcctttggattgggattggagcgtcttgcgatggtccttttcgacattccagatattcgactattctggtcgaatgataaacggttcacgtcccagttctcagaaggcaagcttggtgtcaagttcaagccattttcaaagtttcctccttgttacaaagatatgagtttctggatcaatggtgcatttacagaaaacaacttatgtgaggttgtcagaggaatagccggggatcttgttgaggaggtaaaacttattgataatttcaccaacaagaaaggcatgacaagtcattgctacagaatagcatataggtcaatggaacgttcgctcacagacgaggagattaacaatcttcagttgaatgtcagggaagctgtgaaagataaattgaaagtagagttgagatagcagcagctaattatgctgtcatagcatggactaaattttgcctgtctttatgtaaatcaattaaaaaggattttttatctatcgagaaaatgcgccatttgttcctggcattgatcacgttctcttctgtttagggaagagaaaaggtccctgttccatttgggaatcatatcttgtaattcataaggctttgtttggttgcacagggatcaaaggagattgaggaggattaaatccctctctattcaattttgactaggtagagatttaatcccctctaacctccttttaatccccttgtaaccgaacaagccctaagatgatgagctgtacacttctcactattttggaggacatgtggtttgggaattcatgtttggcctttcaattcaattttggccgttgtacattatttgtaacgaacaagtaaaagcactctgtatataaagtctaggatggttcaaatctgaaattaaccttta

SEQ ID NO: 32088 - DNA, 1831 bp, Zea Mays
tttccacacttggtcgccgtcttctccccctttcgctttcgctcttcctctccagcccacaagactccgcggcgccgcagacatgcgcccgcttatccgaaccgctcgctgctggctcctccgcgcgcgtgttcgcgccatggccacgcttcctatggcgtcccccgccgccgccatcccctcctccgccacccgccccgtcgcctccccttcttcgcgttctcaccgccccctcacccgcttcttctccgtcgcgccggcgccggtcggggcgaaagggctccgagcggcggcctccgccgttgaggtgggcggcgtaaagatcgcgcgcgaggatgttgtgaaagaagatgacccaacaaacaacgtgccagacactatctttgcgaagattggcctgcagctgcacaggagggagaaccatccccttgggattctgaagaacacaatttatgattactttgacaagaacttcactggacagtttgacaagtttgatgacctttgcccccttgtttctgtcaagcagaattttgatgatgtcttggtcccttctgaccatgtaagccggagttacaatgacacatattatgttgatgatcaaacagtcttaaggtgtcataccagtgctcatcaagctgagctgctaagggatggacgtacacactttcttgtaactggagatgtttaccgtagggattccattgattcaactcactatcctgtcttccatcagatggaagggttccgtgtgttctctcctgatgaatggtcaggttctggcttggatgggacagcatatgcagctgcagaactcaagaaaacactggaaggattggcaagacatctatttggatgattggttagaggttttgggctgtggagttaccgagcaggaaattttgaaaagaaatggcaggagagatcatgtggcatgggcctttggattgggattggagcgtcttgcgatggtccttttcgacattccagatattcgactattctggtcgaatgataaacggttcacgtcccagttctcagaaggcaagcttggtgtcaagttcaagccattttcaaagtttcctccttgttacaaagatatgagtttctggatcaatggtgcatttacagaaaacaacttatgtgaggttgtcagaggaatagccggggatcttgttgaggaggtaaaacttattgataatttcaccaacaagaaaggcatgacaagtcattgctacagaatagcatataggtcaatggaacgttcgctcacagacgaggagattaacaatcttcagttgaatgtcagggaagctgtgaaagataaattgaaagtagagttgagatagcagcagctaattatgctgtcatagcatggactaaattttgcctgtctttatgtaaatcaattaaaaaggattttttatctatcgagaaaatgcgccatttgttcctggcattgatcacgttctcttctgtttagggaagagaaaaggtccctgttccatttgggaatcatatcttgtaattcataaggctttgtttggttgcacagggatcaaaggagattgaggaggattaaatccctctctattcaattttgactaggtagagatttaatcccctctaacctccttttaatccccttgtaaccgaacaagccctaagatgatgagctgtacacttctcactattttggaggacatgtggtttgggaattcatgtttggcctttcaattcaattttggccgttgtacattatttgtaacgaacaagtaaaagcactctgtatataaagtctaggatggttcaaatctgaaattaaccttta

SEQ ID NO: 32089 - DNA, 1938 bp, Zea Mays
tttccacacttggtcgccgtcttctccccctttcgctttcgctcttcctctccagcccacaagactccgcggcgccgcagacatgcgcccgcttatccgaaccgctcgctgctggctcctccgcgcgcgtgttcgcgccatggccacgcttcctatggcgtcccccgccgccgccatcccctcctccgccacccgccccgtcgcctccccttcttcgcgttctcaccgccccctcacccgcttcttctccgtcgcgccggcgccggtcggggcgaaagggctccgagcggcggcctccgccgttgaggtgggcggcgtaaagatcgcgcgcgaggatgttgtgaaagaagatgacccaacaaacaacgtgccagacactatctttgcgaagattggcctgcagctgcacaggagggagaaccatccccttgggattctgaagaacacaatttatgattactttgacaagaacttcactggacagtttgacaagtttgatgacctttgcccccttgtttctgtcaagcagaattttgatgatgtcttggtcccttctgaccatgtaagccggagttacaatgacacatattatgttgatgatcaaacagtcttaaggtgtcataccagtgctcatcaagctgagctgctaagggatggacgtacacactttcttgtaactggagatgtttaccgtagggattccattgattcaactcactatcctgtcttccatcaggtacttttgttttgccgtactcacttaaattttcttaatgaggtttgttttggtaatctttaacacatgtagatggaagggttccgtgtgttctctcctgatgaatggtcaggttctggcttggatgggacagcatatgcagctgcagaactcaagaaaacactggaaggattggcaagacatctatttggtgctgtagagatgcgatgggttgacacatacttcccatttaccaacccatcctttgagctcgaaatatattttcaggaaattttgaaaagaaatggcaggagagatcatgtggcatgggcctttggattgggattggagcgtcttgcgatggtccttttcgacattccagatattcgactattctggtcgaatgataaacggttcacgtcccagttctcagaaggcaagcttggtgtcaagttcaagccattttcaaagtttcctccttgttacaaagatatgagtttctggatcaatggtgcatttacagaaaacaacttatgtgaggttgtcagaggaatagccggggatcttgttgaggaggtaaaacttattgataatttcaccaacaagaaaggcatgacaagtcattgctacagaatagcatataggtcaatggaacgttcgctcacagacgaggagattaacaatcttcagttgaatgtcagggaagctgtgaaagataaattgaaagtagagttgagatagcagcagctaattatgctgtcatagcatggactaaattttgcctgtctttatgtaaatcaattaaaaaggattttttatctatcgagaaaatgcgccatttgttcctggcattgatcacgttctcttctgtttagggaagagaaaaggtccctgttccatttgggaatcatatcttgtaattcataaggctttgtttggttgcacagggatcaaaggagattgaggaggattaaatccctctctattcaattttgactaggtagagatttaatcccctctaacctccttttaatccccttgtaaccgaacaagccctaagatgatgagctgtacacttctcactattttggaggacatgtggtttgggaattcatgtttggcctttcaattcaattttggccgttgtacattatttgtaacgaacaagtaaaagcactctgtatataaagtctaggatggttcaaatctgaaattaaccttta

SEQ ID NO: 32090 - DNA, 1929 bp, Zea Mays
tttccacacttggtcgccgtcttctccccctttcgctttcgctcttcctctccagcccacaagactccgcggcgccgcagacatgcgcccgcttatccgaaccgctcgctgctggctcctccgcgcgcgtgttcgcgccatggccacgcttcctatggcgtcccccgccgccgccatcccctcctccgccacccgccccgtcgcctccccttcttcgcgttctcaccgccccctcacccgcttcttctccgtcgcgccggcgccggtcggggcgaaagggctccgagcggcggcctccgccgttgaggtgggcggcgtaaagatcgcgcgcgaggatgttgtgaaagaagatgacccaacaaacaacgtgccagacactatctttgcgaagattggcctgcagctgcacaggagggagaaccatccccttgggattctgaagaacacaatttatgattactttgacaagaacttcactggacagtttgacaagtttgatgacctttgcccccttgtttctgtcaagcagaattttgatgatgtcttggtcccttctgaccatgtaagccggagttacaatgacacatattatgttgatgatcaaacagtcttaaggtgtcataccagtgctcatcaagctgagctgctaagggatggacgtacacactttcttgtaactggagatgtttaccgtagggattccattgattcaactcactatcctgtcttccatcagggttccgtgtgttctctcctgatgaatggtcaggttctggcttggatgggacagcatatgcagctgcagaactcaagaaaacactggaaggattggcaagacatctatttgataaactatagaaaaatgtcatctgcaggtgctgtagagatgcgatgggttgacacatacttcccatttaccaacccatcctttgagctcgaaatatattttcaggatgattggttagaggttttgggctgtggagttaccgagcaggaaattttgaaaagaaatggcaggagagatcatgtggcatgggcctttggattgggattggagcgtcttgcgatggtccttttcgacattccagatattcgactattctggtcgaatgataaacggttcacgtcccagttctcagaaggcaagcttggtgtcaagttcaagccattttcaaagtttcctccttgttacaaagatatgagtttctggatcaatggtgcatttacagaaaacaacttatgtgaggttgtcagaggaatagccggggatcttgttgaggaggtaaaacttattgataatttcaccaacaagaaaggcatgacaagtcattgctacagaatagcatataggtcaatggaacgttcgctcacagacgaggagattaacaatcttcagttgaatgtcagggaagctgtgaaagataaattgaaagtagagttgagatagcagcagctaattatgctgtcatagcatggactaaattttgcctgtctttatgtaaatcaattaaaaaggattttttatctatcgagaaaatgcgccatttgttcctggcattgatcacgttctcttctgtttagggaagagaaaaggtccctgttccatttgggaatcatatcttgtaattcataaggctttgtttggttgcacagggatcaaaggagattgaggaggattaaatccctctctattcaattttgactaggtagagatttaatcccctctaacctccttttaatccccttgtaaccgaacaagccctaagatgatgagctgtacacttctcactattttggaggacatgtggtttgggaattcatgtttggcctttcaattcaattttggccgttgtacattatttgtaacgaacaagtaaaagcactctgtatataaagtctaggatggttcaaatctgaaattaaccttta

SEQ ID NO: 32091 - DNA, 1778 bp, Zea Mays
ctcgggcccgccgagctgtgacgatgtaaaggcgggatcttgatgttgtgaaagaagatgacccaacaaacaacgtgccagacactatctttgcgaagattggcctgcagctgcacaggagggagaaccatccccttgggattctgaagaacacaatttatgattactttgacaagaacttcactggacagtttgacaagtttgatgacctttgcccccttgtttctgtcaagcagaattttgatgatgtcttggtcccttctgaccatgtaagccggagttacaatgacacatattatgttgatgatcaaacagtcttaaggtgtcataccagtgctcatcaagctgagctgctaagggatggacgtacacactttcttgtaactggagatgtttaccgtagggattccattgattcaactcactatcctgtcttccatcaggtacttttgttttgccgtactcacttaaattttcttaatgaggtttgttttggtaatctttaacacatgtagatggaagggttccgtgtgttctctcctgatgaatggtcaggttctggcttggatgggacagcatatgcagctgcagaactcaagaaaacactggaaggattggcaagacatctatttggtaaatcatttgtagcttgttccttatcatttgaggggatgacgaaattgatccttgtttcagataaactatagaaaaatgtcatctgcaggtgctgtagagatgcgatgggttgacacatacttcccatttaccaacccatcctttgagctcgaaatatattttcaggatgattggttagaggttttgggctgtggagttaccgagcaggaaattttgaaaagaaatggcaggagagatcatgtggcatgggcctttggattgggattggagcgtcttgcgatggtccttttcgacattccagatattcgactattctggtcgaatgataaacggttcacgtcccagttctcagaaggcaagcttggtgtcaagttcaagccattttcaaagtttcctccttgttacaaagatatgagtttctggatcaatggtgcatttacagaaaacaacttatgtgaggttgtcagaggaatagccggggatcttgttgaggaggtaaaacttattgataatttcaccaacaagaaaggcatgacaagtcattgctacagaatagcatataggtcaatggaacgttcgctcacagacgaggagattaacaatcttcagttgaatgtcagggaagctgtgaaagataaattgaaagtagagttgagatagcagcagctaattatgctgtcatagcatggactaaattttgcctgtctttatgtaaatcaattaaaaaggattttttatctatcgagaaaatgcgccatttgttcctggcattgatcacgttctcttctgtttagggaagagaaaaggtccctgttccatttgggaatcatatcttgtaattcataaggctttgtttggttgcacagggatcaaaggagattgaggaggattaaatccctctctattcaattttgactaggtagagatttaatcccctctaacctccttttaatccccttgtaaccgaacaagccctaagatgatgagctgtacacttctcactattttggaggacatgtggtttgggaattcatgtttggcctttcaattcaattttggccgttgtacattatttgtaacgaacaagtaaaagcactctgtatataaagtctaggatggttcaaatctgaaattaaccttta

SEQ ID NO: 32092 - DNA, 7314 bp, Zea Mays
agtgagtatcctaaccatgtctataagctctctaaggcgctttatgggctcaagcaagccccaagagcatggtatgaatgccttagagatttccttattgctaatggcttcaaagtcggaaaggccgatcctacactctttactaaaactcttgaaaatgacttgtttgtatgccaaatttatgttgatgatattatatttgggtctactaacgagtccacatgtgaagagtttagtaggatcatgacacaaaaattcgagatgtctatgatgggggagttgaagtattttctaggattccaagtcaaacaactccaagagggcaccttcatcagccaaacgaagtacactcaagacattctaaccaagtttgggatgaaggatgccaaacccatcaagacacccatgggaactaatgggcatctcgacctcgacacaggaggtaagtccgtggatcaaaaggtataccggtcgatgataggttctttactctatttatgtgcatctcgaccggatattatgctttccgtatgcatgtgtgcaagattccaagccgaccctaaggaaactcaccttacggccgtaaaacgaatcttgagatatttggcttatactcctaagtttgggctttggtatcctaggggatccacatttgatttgattggttattcggatgccgattgggcggggtgcaaaatcaataggaagagcacatcggggacttgccagttcttgggaagatctttggtgtcttgggcttcaaagaagcaaaattcggtcgctctttccaccgccgaagccaagtatattgccgcaggccactgttgcgcgcaattgctttggatgaggcaaaccttgcgggactacggttacaaattaaccaaagtccctttgctatgtgacaatgagagtgcaatcaagatggcggataatcccgtcgagcatagccgcactaaacacatagccattcagtatcattttcttagggatcaccaacaaaagggagatatcgagatttcatacattaatactaaagattaattagccgatatctttaccaagcctcttgatgaacaatcttttaacaaacttaggcatgagctcaatattcttgattcgcgcaatttcttttgctagattgcacacatagctcatttatatacctttgatcatatctgttttatatgctatgactaatgtgttttcaagtgcatttcaaaccaagtcataggagtattgaaagggaattggagtcttcggcgaagacaaaggcttccactccgtaactcatccttcgtcatcgctccaagagactctccattcttggaggagaaaaagcatgagcatcaaagaaaaggactacgtctttgggagagagagtaagagcccaaagcacaaagaccggacttcgtctttggtataatcctaactcatttatttatgaccaaaggggaagatagcacttcaagggctctaatgattccgtttttggcgattcatgccaaagggggagagagtaagagcccaaagcaaaaggaccgcaccaccaccaatttcaaaaacttcgtgttttcaaagaattttatcaattggtatcctattgtgttctaaagggggagaaagtagtatttcaaaatggtatatcaaaccctcttgaacactaagaggaggatctcatttaggggaagttttgtttagtcaaaggagaagcatttgaaacagggggagaaaatttcaaatcttgaaaatgctttgcaaaatcttattcgtttacctttgactatttgcaaaagaactttgaaaaagatttacaaaagaatttgcaaaaacaaaacatgtggtgcaagcgtggtccaaaatgttataagttagaaacaatccatgcatatcttgtaagtagttatattggctcaatttcaagcaacctttgcacttatattatgcaaactagctcaattatacacttctatatttgctttggtttgtgttggcatcaatcaccaaaaagggggagattgaaagggaattaggcttacacctagttcctaaataattttggtggttgaattgcccaacacaaatctttggactaactagtttgctctagtgtataagttatacaggtgccaaaggttcacacttagccaataaaaagaccaaaaattgggttcaacaaaaaaagcaaagggccaaccgaaggcacctctggtctggcgcaccggactgtccggtgtgccaccggacagtgtccggtgcaccaccggacatgtccggtgtaccagaggactccaactcaaactcgccaccttcgggaatttccagaggcactcgcgctataattcaccggactgtccggtgtacaccggacagtgtccggtgcgccaaggagaagcggcctcaggaactcgccagcttcgggaatctccaacggctagtccgctataattcaccggactgtccggtgcaactctggagcaacggctatccggcgccaacggctacctgcgatgcatttattgcacgggcagcgcgcgcagaagtcagagtcgcccatactggcacaccagacaaggaacagtagatgtccggtgtgcaccggacacctaggcgggcccacaagtcagaagctccaacggtcagaatccaacggcagtgatgacgtggcaggggcaccggacatgtccggtgtgcaccggactgtccggtgcgccatcgaacagacaacctcccaacggccacttttggtggttggggatataaatatcccaaccaccccaccattcattgcatccaagttttccacttcccaactactacaagagctctagcattcaactctagacacaccaaagagatcaaatcctctccaaattccacacaacaccatagtgactagagagagtgatttgtttgtgttctttcgagctcttgcgcttggattgcttcttttctttctcacttgttcttgtgatcaaaactccattgtaatcaaggcaagaggcaccaattgtgtggtggcccttgcgggggaagttttgttctcggctttgatttgagaagagaagctcactcggtccgagggaccgtttgagagagggaagggttgaaagagacccggcctttgtggcctcctcaacggggagtaggtttgcaagaaccgaacctcggtaaaacaaatccgtgtgtcacactcttcatttgcttgcgatttgttttgcgccctctctcgcggactcgtttatatttctaacgctaacccgtcttgtagttgtgtttatatttgtaaatttcagtttcgccctattcaccccccctctaggcgactatcaaaaagacatgcattactttgttgtccttctagacaacaattgtcctggatagaaaacaaatatataaaagtggagagatttgagttatgaaatttcacatattaatggaaggaccattacctccaagagtacaaagtaggaacacaaaaaacattctagcattagtcatcacacatggaccaattgtatgtcgtaccagacctgtgtttcattgcgcaatgagagccttattttctcaagtcctccaactacgtgctaggcattctagatggttctctaaacaggttcactaattttaaagtccatagcatagaatcaagaaaaaatataactatccacattctagaatcctgaaagtactatttagtaatcaagtagatgtactttcagagataggagtggtgtgcttactggattaagtagtttgagaactaattatagagatgagtggcttgcataccagattgagcagtccgagaagaaaaattgtttattgtttctatagacagttgtatcttctttcttggcgtttctcttatggatggttgttgaggtcctacaacaaagcatatataggttcaatcagtttatacatgaaggaaaaaggaaaattgatctgttattattatagagtgcacgtgtaagagataactcagcattttgaagacgtcaaactataaaaggcaggcacatctattagcctgttggtactcacaaaaaagttaatcgtgacattcatagaataaataaagtctaaataaatgtgccttactaaccatggaatacataagaacatagaatagaattgcaagtgatcgaacatgaggattctaaccttccattcccgagtggaataacagcagcatgctgacgtgacattgactgatggtccaacacgaagtcataagcaagaacccgcctcccgaatagatgcctcatgttttctagattgatcctatcaaagacctatccatctttcaccacatcaagatagtagacccctaggcgtggctcaatcgcccagtctagaggttgccacgtcgactgccctccaccgacctgtgtcccaacatgcttgggagcatcaccatcttgcccagccacccttgagctggtgcctttgcggactttggagattctaacccagcaaaaaaatagaattttgtggcagcgtcaatagagccagtgctttagttgttcctgcagctgcaggtgccttgttggtgcctgtcttggacttcactgagaagggcttcaaggcttgtgccttctcgaagcggtcaaggcccccacgatacatctccctacacctctaatccaccagctctttgattctagtctttaccactccaaatctagtcgcttatgcacttgtgtactttaatactgcagacaagcaaaggatattgtgcctactgttgatcaaataaaataaatcagaaacagcaacagaaaggatttgcaaccaaaattaggtgatgtttgtataacgggatatgaggggctagcagagggatggaaagctcacccgctgcttggttcacagggaaggagggggaaagggaaattcggacctcttgtcccactgattctatcccgtcaggaggggtgggtcgtgctaagataagagctctgcacactgctgtagattactgccctcctacacgctcgccttccacagtccacaccgagggccacgcacgagcgactgcacggtgggggctattgcgtcgagaaagcagaggcaaggttgatagctgggagaactccctggtgatgcgtgtgacatagacgactgaggggagggacgcgcgctccgcagttagggcccctaccaccacaacctccgcgcgacgagtgcatcgatctggggttcagcttcgagccagcccccgcggagtccatctacgtgacatgtggctgtctcaatcgccagctcccagatggcctccttcttcgcgggtctctccattgccgaccatgatctaatctctcgtccggtagcctcggttcaggcgaagctgtctaacggagagatggaggagtggtgtttgtggatcatccacgagtggggcgggggacgctggagggggcggtagctgtctcgggcgagcggggcacaacgacaatcttggtgggaggcgcgggtgaggtgtggacgacgcacgaagtgtgttgcggttgcggagggagaggcagaaccagggagaggcagaaccgaagaggcaggctactcttaggttcttaataagtagtagagattgtagcagctctgaaaatacaaaggaaggaagcacattcagaactaattcaaaatgcaatggacaatatggatactaagcaagtagattattgcaccggagagcatatttgtgttaactttgagtgtatcatgtagtattcctcatggaatgaacaatcagtaacagtgtgtggctatctcacatggcaaagcacatctcctaagtatttaaaacaaaatgtgcactcttgccaaacattagcagcataggataggttctaggtaagcaagtgcatgagatacttttgggatcgctccacataaagggtggcatggcaaaattctcattattatataggaattaagcaaatccacaataatgcaaatgtatgctaaaatggctcatattgtgatcctaggacaaaaacaaaacaacgtgtccgtctttaaatgggcataatctttcccactattcagccttgaccattactatgctaaaagttcgcaaaatcttcatattgaggttgtactgaaaaaacatcatcgcgccaagatttaactcctattaacttttgccgataatattggctatatcgatatgctatcgcacaatatctccaaaagttccttaaaaattaattaagccaatgactctgtcgagtcaacaaaataaacagggagcgactgagaagagaaaagcctctccatggcgtgtgttggcgttgcgaagggcggcgacaggtgcgtgtggacggttaaacaaatgtggggagggaatgggtgagcgggacggaggcggacgcacaaacaaccctgctttaaggcgtgaatggaggtgagtagagatagaagtggatagatatagactgaaaatagatgtgctttacacgtgacggtagaaagtgtgtgatgcacaacgatgaaaactggtgctttaaagaagtagagattaggtggtaaacatgttaggcctacatggaatcaaatggtgaaaggcaaaggtagcagaaataagtgaagactaaaaaaggaaaacaaccccgctttgattgtttggggaggagtgcatggactatgatcaaattctcactctaacaaatcaatcatcaaggaaatgaaataaaatcctaagaaagaaattaatttaatcataagtcataccaccatacaggacaaacaatattgaactgataggattatcttatacatatacacccaaccgaattacattttttaaataaataaacaatatatatagtcttttaagcattttgggtatagtcgtatagttgctggatttcaaagtgcaatacttggcatagtggactgctcaaatatggcttaattaatctaagacaatagcaagcagcaaagctgcaagaagaacatgagtgatgtggggaagttgatttatctttattgaaaatagaacaaataagtttcagtagtattctaaactgatctgtgtgtacattcatcatgttatagtaggatgctaagctcatcggtgaagctttgcctaatctagtcattgtggattcaatagaaaacatataggtggggaggaattgaggaaatgacctttagaacagaggcgtggaggttgagctcttggaggatagcttaccagagggcggcgatggtggccatgtcgtcatcatcgtcagcagtccttggccatttcgtatctgattgatcccaccacgggaggaaaggaagaatcaaattagatctacaactgcg

SEQ ID NO: 32093 - DNA, 1252 bp, Zea Mays
ctggaggcgggaatcgaagctgttgtccgtgatctgctgccagatctcgcgcagctcctccttgttgattttgtcaacctgcacctgacggcggcggctcaatgtgtcaaacagctcgagcgcgaactctttcgattccgtcatccctgcacgtgtacatgcagctccccaatgtttcaacgacgaagggaaatggaggagaaagccgaggggaggcagcgcggcgtggtggtaccaatgcattccgcgaagtcggagcgggagaggaaaccctcggaagcgaggcggtcgaagttggcctgcacctccatccaggcgttgttggccttgttgctgctgatgaagcggaggccgcggagcgccttgtgcgcgccggagcgcgtgcggtcgagctgcgcgcgctgccgccgcgcggcgcgggcagcgagggccgactcgatgcctgacgacggctgctgctgctgcccctgcccttccgcgcggctttgggtgcggccgaagcgcttggtgaggtcctgcgagaactggcgcgcgatggacatggcctccgccttgagctcctgcgagaactgcaggagccggtgcgacgaggtccgcctgatcgacggcgacaaggaccgcgacgacgacgacgcgccgccggcatggtccccgcgcgcgcccagcggcagcgcggtggcgccccccgccgcggccggctcgacgctccgcagaatgatggtgtcgtcctcctgcaggtcgagcgtgacctcgaccagctcctccccgtcgtcggagctgcgttcggagccccgcggcgaggagcccgtgctgagtgaccgcggcgtcgtccccgccgagccgctccatcgctggtggcccggggcggcggcgcccctcatcgccgacccaatcagaagccgctttccagcgcggctcccggaacagtccaatgctcgaagaggagacgcgctcgacgactggatggatcgattttgtgggtggccttggaatctctggggaaaggcgcccgcgacgcgtccgagcgggagctcgagccgatgaaagaggaagcgcaacgagacagcaatatatgaggatgagaaggcgagtacggtgggccgggccacgcaaatgcacaactctatttaattatccacattgtcatctactaatatgtaagcagactctacatgcatatgtgcaatcaattttccaccagtatgtaccattttattagtaaccctgtatttaatctaccgttgaattgaat

SEQ ID NO: 32094 - DNA, 3152 bp, Zea Mays
gaacgtgccatgtttgtggaagcccgcccttggcggtgccatgattgcaaaattctccggtcccaggagagggtggttgtgctagctccagtgttgtagacctggacgtcagggactccagcctcaccttcttgtgcccgtcctcgagcctccacgagatactggggaagagattagagccggccctaggtgcgcatgctgctgcctagattcatcgctcggccgctccacgctcgtatcagccgccagcgccctgatcctccctctccctgactccctcctcacgttctccgcacggctagatctgcacctgttcattcctctccagtccctagcgagagattcagtctcgcttggcaaccggcgccgccgaagccgacaagggaggcacgtgcgcccagcgaacaccaagctcaagcggccgtctcctcgtgctctacgcgtcacaaactgggaacgccatggacgccgcagagcgtgtgggccgcgaggcagaacgtggcggctgcccggccgtcgacgtgctctccatggacagcttcgatcccagtcgcttgccgagcgagcggttcgtggtatttgtcgtgtccaccacggggcagggcgaccccccagattccatgaaggggttttggagatatatgcttcggaaggatttggatagacaatggcttgaggggatccatcatgcagtgtttggactcggggattcaggctaccagaagtacaattttgctgcaaagaagcttgatagaaggcttttacatcttggtgcagaaccagttctagagataggtcttggagatgaccaacacccttcaggatatgaaggggctttagatccttggttgctatctatgtggaagtctctgaatgaaattaatccgtcactcttacctagagtgtctgatatcaatgatcctaatttgagttttttgggggatccaaaagttcatgtcatttattactcttccaatgaagttacacaagatcctatacttttggattccaataaaataataagtagcgcaagatcaatgtcccctgccctacggttccatgctgatggagagccaccttacatgcttcaaatggtaaaaaaacagtgtttgactaaggagggtactgatagagatgttcgccactttgaattggaagatccatcttcggccatggccatcaactataaaattggtgatgctcttgaaattctaccaagtcaaaatccatcagctgttgatgccttcattgaacgctgtaacttggatccagattgttacataacgattcgagtgagaagtggggataaagttttcaagggttcagttgagcagatggaccgcatcaaattaagaacctttgttgctttgacaatggatgtcgtgtcagcttcccctcggcgatatttctttgaggtcatgagcttttttgcaacaagtgaacgtgaaaaggagaggcttcagtattttgcttcaccagaaggaagagatgatctttaccagtacaatcagaaggagagtaggactgttctagaggtgttggaggattttccttcagtgcaaatgccttttgaatggctggtgcaactaacgcctccactgaagaaaagagccttttctatctcatcatccccactggcacacccaaaccaaatccatttgaccgttagcgtcgtagcatgggttactccattcaagagaacccggcgtggactctgctctacatggttggccgggctcaatccaaataaaggcaatcttatcccgtgttggatacaccaagggtccctgcctcctccacgtccattggttcctctcgtgttgattggaccaggaacagggtgtgcaccattccgtgcatttgtggaggaaagggctgcacaggctgcagctgaaccaacagccccggttctgttcttcttcggctgtagaaaccaagaaaacgattttctatacaaggatttctggctaactcatgcgcaggatgagggggtgttgtcctcgaaaaggggcggtggtttcttcgtcgctttttcccgggatcagccgcaaaaggtctacgtgcaacataagataatggaacagagttcaagagtgtggaacttattactgtccgatgcagtgatctacattgcaggctcttcgacgaaaatgcctgccgatgttacagctgcgctagaggaggttatttgtaaagaaggtggtgtcaagcaagcggatgcttcgaaatggctcagggatctagaaagggctggtagacttaacatcgagacatggtcatagttgtgatgggcaagaatagagatggcaatgggtacccgcgacccaatacccgatgggtatttactccattagggtatgtatgtgggctaaatattctacccgtgggtctgttattgggcaaaaatcttcacccaatgggtaaacgggtattagaacgttccgccttcacccatacccgttaacccgtgggtataaaatacccaatataaacttagtccaagcatgaactttgactttagtcatccatcttttttactctttaacaaccttttaggccataatgtcatagaaggcttaacgacaatttaatgaacatgtaatgggacatgtaatgtgctatgtagtactatcctagtgttactactttatccaattatctttggtgtgttgaatggatggttaaatgattctagaaattttgtaatggtatttagatgttgacatttgtatcatataacattttgatagatgtttagcttttatgggtacgggtgacctgatgggtgacccatacccacatgggtatgggtatgggggtaaatccatacccgccagtgtatatgggtgacccgatggggttatttttgtgttgtgggtatgggtatggggtagtaatacccggtgggtatttacccattgccatctctaggcaagaaagtacatattatccatgtttgctgaatatggaaccagtgagaatttcatttcactgtaaatcaaaggcattggaaatgtggaaacatgtagatgttaaagcatccaatacggagaaatagttggaggatgatctaaagtttcctcatttagccctctgtacgaaacaccatttcatttgattaagtgagaacagtaattacatcagcttttgtt

SEQ ID NO: 32095 - DNA, 3141 bp, Zea Mays
gaagcccgcccttggcggtgccatgattgcaaaattctccggtcccaggagagggtggttgtgctagctccagtgttgtagacctggacgtcagggactccagcctcaccttcttgtgcccgtcctcgagcctccacgagatactggggaagagattagagccggccctaggtgcgcatgctgctgcctagattcatcgctcggccgctccacgctcgtatcagccgccagcgccctgatcctccctctccctgactccctcctcacgttctccgcacggctagatctgcacctgttcattcctctccagtccctagcgagagattcagtctcgcttggcaaccggcgccgccgaagccgacaagggaggcacgtgcgcccagcgaacaccaagctcaaggtgggtgatcgtactggcgaaccgctgcagcggcggcaggagcttgcgtggcctgggcggaatgagccgattgaggcgtctattggctgtgcttgttggccgattctaggttacctgcagtccgcgaattctgagctcttactccatggcgccctcgtctgcggaggctgactcggcggtgtcctccagcggccgtctcctcgtgctctacgcgtcacaaactgggaacgccatggacgccgcagagcgtgtgggccgcgaggcagaacgtggcggctgcccggccgtcgacgtgctctccatggacagcttcgatcccagtcgcttgccgagcgagcggttcgtggtatttgtcgtgtccaccacggggcagggcgaccccccagattccatgaaggggttttggagatatatgcttcggaaggatttggatagacaatggcttgaggggatccatcatgcagtgtttggactcggggattcaggctaccagaagtacaattttgctgcaaagaagcttgatagaaggcttttacatcttggtgcagaaccagttctagagataggtcttggagatgaccaacacccttcaggattccaataaaataataagtagcgcaagatcaatgtcccctgccctacggttccatgctgatggagagccaccttacatgcttcaaatggtaaaaaaacagtgtttgactaaggagggtactgatagagatgttcgccactttgaattggaagatccatcttcggccatggccatcaactataaaattggtgatgctcttgaaattctaccaagtcaaaatccatcagctgttgatgccttcattgaacgctgtaacttggatccagattgttacataacgattcgagtgagaagtggggataaagttttcaagggttcagttgagcagatggaccgcatcaaattaagaacctttgttgctttgacaatggatgtcgtgtcagcttcccctcggcgatatttctttgaggtcatgagcttttttgcaacaagtgaacgtgaaaaggagaggcttcagtattttgcttcaccagaaggaagagatgatctttaccagtacaatcagaaggagagtaggactgttctagaggtgttggaggattttccttcagtgcaaatgccttttgaatggctggtgcaactaacgcctccactgaagaaaagagccttttctatctcatcatccccactggcacacccaaaccaaatccatttgaccgttagcgtcgtagcatgggttactccattcaagagaacccggcgtggactctgctctacatggttggccgggctcaatccaaataaaggcaatcttatcccgtgttggatacaccaagggtccctgcctcctccacgtccattggttcctctcgtgttgattggaccaggaacagggtgtgcaccattccgtgcatttgtggaggaaagggctgcacaggctgcagctgaaccaacagccccggttctgttcttcttcggctgtagaaaccaagaaaacgattttctatacaaggatttctggctaactcatgcgcaggatgagggggtgttgtcctcgaaaaggggcggtggtttcttcgtcgctttttcccgggatcagccgcaaaaggtctacgtgcaacataagataatggaacagagttcaagagtgtggaacttattactgtccgatgcagtgatctacattgcaggctcttcgacgaaaatgcctgccgatgttacagctgcgctagaggaggttatttgtaaagaaggtggtgtcaagcaagcggatgcttcgaaatggctcagggatctagaaagggctggtagacttaacatcgagacatggtcatagttgtgatgggcaagaatagagatggcaatgggtacccgcgacccaatacccgatgggtatttactccattagggtatgtatgtgggctaaatattctacccgtgggtctgttattgggcaaaaatcttcacccaatgggtaaacgggtattagaacgttccgccttcacccatacccgttaacccgtgggtataaaatacccaatataaacttagtccaagcatgaactttgactttagtcatccatcttttttactctttaacaaccttttaggccataatgtcatagaaggcttaacgacaatttaatgaacatgtaatgggacatgtaatgtgctatgtagtactatcctagtgttactactttatccaattatctttggtgtgttgaatggatggttaaatgattctagaaattttgtaatggtatttagatgttgacatttgtatcatataacattttgatagatgtttagcttttatgggtacgggtgacctgatgggtgacccatacccacatgggtatgggtatgggggtaaatccatacccgccagtgtatatgggtgacccgatggggttatttttgtgttgtgggtatgggtatggggtagtaatacccggtgggtatttacccattgccatctctaggcaagaaagtacatattatccatgtttgctgaatatggaaccagtgagaatttcatttcactgtaaatcaaaggcattggaaatgtggaaacatgtagatgttaaagcatccaatacggagaaatagttggaggatgatctaaagtttcctcatttagccctctgtacgaaacaccatttcatttgattaagtgagaacagtaattacatcagcttttgtt

SEQ ID NO: 32096 - DNA, 3409 bp, Zea Mays
gtgctccctcaaccctggcttcttttggttcttcgtttcatcgcgtcgcctccgccgttggtacccttctcatagctcctgtacctcgttcccacgcaggagagggtggttgtgctagctccagtgttgtagacctggacgtcagggactccagcctcaccttcttgtgcccgtcctcgagcctccacgagatactggggaagagattagagccggccctaggtgcgcatgctgctgcctagattcatcgctcggccgctccacgctcgtatcagccgccagcgccctgatcctccctctccctgactccctcctcacgttctccgcacggctagatctgcacctgttcattcctctccagtccctagcgagagattcagtctcgcttggcaaccggcgccgccgaagccgacaagggaggcacgtgcgcccagcgaacaccaagctcaaggtgggtgatcgtactggcgaaccgctgcagcggcggcaggagcttgcgtggcctgggcggaatgagccgattgaggcgtctattggctgtgcttgttggccgattctaggttacctgcagtccgcgaattctgagctcttactccatggcgccctcgtctgcggaggctgactcggcggtgtcctccagcggccgtctcctcgtgctctacgcgtcacaaactgggaacgccatggacgccgcagagcgtgtgggccgcgaggcagaacgtggcggctgcccggccgtcgacgtgctctccatggacagcttcgatcccagtcgcttgccgagcgagcggttcgtggtatttgtcgtgtccaccacggggcagggcgaccccccagattccatgaaggtctggacattttgatctactagataatttccaaggggttttggagatatatgcttcggaaggatttggatagacaatggcttgaggggatccatcatgcagtgtttggactcggggattcaggctaccagaagtacaattttgctgcaaagaagcttgatagaaggcttttacatcttggtgcagaaccagttctagagataggtcttggagatgaccaacacccttcaggatatgaaggggctttagatccttggttgctatctatgtggaagtctctgaatgaaattaatccgtcactcttacctagagtgtctgatatcaatgatcctaatttgagttttttgggggatccaaaagttcatgtcatttattactcttccaatgaagttacacaagatcctatacttttggattccaataaaataataagtagcgcaagatcaatgtcccctgccctacggttccatgctgatggagagccaccttacatgcttcaaatggtaaaaaaacagtgtttgactaaggagggtactgatagagatgttcgccactttgaattggaagatccatcttcggccatggccatcaactataaaattggtgatgctcttgaaattctaccaagtcaaaatccatcagctgttgatgccttcattgaacgctgtaacttggatccagattgttacataacgattcgagtgagaagtggggataaagttttcaagggttcagttgagcagatggaccgcatcaaattaagaacctttgttgctttgacaatggatgtcgtgtcagcttcccctcggcgatatttctttgaggtcatgagcttttttgcaacaagtgaacgtgaaaaggagaggcttcagtattttgcttcaccagaaggaagagatgatctttaccagtacaatcagaaggagagtaggactgttctagaggtgttggaggattttccttcagtgcaaatgccttttgaatggctggtgcaactaacgcctccactgaagaaaagagccttttctatctcatcatccccactggcacacccaaaccaaatccatttgaccgttagcgtcgtagcatgggttactccattcaagagaacccggcgtggactctgctctacatggttggccgggctcaatccaaataaaggcaatcttatcccgtgttggatacaccaagggtccctgcctcctccacgtccattggttcctctcgtgttgattggaccaggaacagggtgtgcaccattccgtgcatttgtggaggaaagggctgcacaggctgcagctgaaccaacagccccggttctgttcttcttcggctgtagaaaccaagaaaacgattttctatacaaggatttctggctaactcatgcgcaggatgagggggtgttgtcctcgaaaaggggcggtggtttcttcgtcgctttttcccgggatcagccgcaaaaggtctacgtgcaacataagataatggaacagagttcaagagtgtggaacttattactgtccgatgcagtgatctacattgcaggctcttcgacgaaaatgcctgccgatgttacagctgcgctagaggaggttatttgtaaagaaggtggtgtcaagcaagcggatgcttcgaaatggctcagggatctagaaagggctggtagacttaacatcgagacatggtcatagttgtgatgggcaagaatagagatggcaatgggtacccgcgacccaatacccgatgggtatttactccattagggtatgtatgtgggctaaatattctacccgtgggtctgttattgggcaaaaatcttcacccaatgggtaaacgggtattagaacgttccgccttcacccatacccgttaacccgtgggtataaaatacccaatataaacttagtccaagcatgaactttgactttagtcatccatcttttttactctttaacaaccttttaggccataatgtcatagaaggcttaacgacaatttaatgaacatgtaatgggacatgtaatgtgctatgtagtactatcctagtgttactactttatccaattatctttggtgtgttgaatggatggttaaatgattctagaaattttgtaatggtatttagatgttgacatttgtatcatataacattttgatagatgtttagcttttatgggtacgggtgacctgatgggtgacccatacccacatgggtatgggtatgggggtaaatccatacccgccagtgtatatgggtgacccgatggggttatttttgtgttgtgggtatgggtatggggtagtaatacccggtgggtatttacccattgccatctctaggcaagaaagtacatattatccatgtttgctgaatatggaaccagtgagaatttcatttcactgtaaatcaaaggcattggaaatgtggaaacatgtagatgttaaagcatccaatacggagaaatagttggaggatgatctaaagtttcctcatttagccctctgtacgaaacaccatttcatttgattaagtgagaacagtaattacatcagcttttgtt

SEQ ID NO: 32097 - DNA, 2424 bp, Zea Mays
attttgatctactagataatttccaaggggttttggagatatatgcttcggaaggatttggatagacaatggcttgaggggatccatcatgcagtgtttggactcggggattcaggctaccagaagtacaattttgctgcaaagaagcttgatagaaggcttttacatcttggtgcagaaccagttctagagataggtcttggagatgaccaacacccttcaggatatgaaggggctttagatccttggttgctatctatgtggaagtctctgaatgaaattaatccgtcactcttacctagagtgtctgatatcaatgatcctaatttgagttttttgggggatccaaaagttcatgtcatttattactcttccaatgaagttacacaagatcctatacttttggattccaataaaataataagtagcgcaagatcaatgtcccctgccctacggttccatgctgatggagagccaccttacatgcttcaaatggtaaaaaaacagtgtttgactaaggagggtactgatagagatgttcgccactttgaattggaagatccatcttcggccatggccatcaactataaaattggtgatgctcttgaaattctaccaagtcaaaatccatcagctgttgatgccttcattgaacgctgtaacttggatccagattgttacataacggtcatgagcttttttgcaacaagtgaacgtgaaaaggagaggcttcagtattttgcttcaccagaaggaagagatgatctttaccagtacaatcagaaggagagtaggactgttctagaggtgttggaggattttccttcagtgcaaatgccttttgaatggctggtgcaactaacgcctccactgaagaaaagagccttttctatctcatcatccccactggcacacccaaaccaaatccatttgaccgttagcgtcgtagcatgggttactccattcaagagaacccggcgtggactctgctctacatggttggccgggctcaatccaaataaaggcaatcttatcccgtgttggatacaccaagggtccctgcctcctccacgtccattggttcctctcgtgttgattggaccaggaacagggtgtgcaccattccgtgcatttgtggaggaaagggctgcacaggctgcagctgaaccaacagccccggttctgttcttcttcggctgtagaaaccaagaaaacgattttctatacaaggatttctggctaactcatgcgcaggatgagggggtgttgtcctcgaaaaggggcggtggtttcttcgtcgctttttcccgggatcagccgcaaaaggtctacgtgcaacataagataatggaacagagttcaagagtgtggaacttattactgtccgatgcagtgatctacattgcaggctcttcgacgaaaatgcctgccgatgttacagctgcgctagaggaggttatttgtaaagaaggtggtgtcaagcaagcggatgcttcgaaatggctcagggatctagaaagggctggtagacttaacatcgagacatggtcatagttgtgatgggcaagaatagagatggcaatgggtacccgcgacccaatacccgatgggtatttactccattagggtatgtatgtgggctaaatattctacccgtgggtctgttattgggcaaaaatcttcacccaatgggtaaacgggtattagaacgttccgccttcacccatacccgttaacccgtgggtataaaatacccaatataaacttagtccaagcatgaactttgactttagtcatccatcttttttactctttaacaaccttttaggccataatgtcatagaaggcttaacgacaatttaatgaacatgtaatgggacatgtaatgtgctatgtagtactatcctagtgttactactttatccaattatctttggtgtgttgaatggatggttaaatgattctagaaattttgtaatggtatttagatgttgacatttgtatcatataacattttgatagatgtttagcttttatgggtacgggtgacctgatgggtgacccatacccacatgggtatgggtatgggggtaaatccatacccgccagtgtatatgggtgacccgatggggttatttttgtgttgtgggtatgggtatggggtagtaatacccggtgggtatttacccattgccatctctaggcaagaaagtacatattatccatgtttgctgaatatggaaccagtgagaatttcatttcactgtaaatcaaaggcattggaaatgtggaaacatgtagatgttaaagcatccaatacggagaaatagttggaggatgatctaaagtttcctcatttagccctctgtacgaaacaccatttcatttgattaagtgagaacagtaattacatcagcttttgtt

SEQ ID NO: 32098 - DNA, 2368 bp, Zea Mays
ttgatctactagataatttccaaggggttttggagatatatgcttcggaaggatttggatagacaatggcttgaggggatccatcatgcagtgtttggactcggggattcaggctaccagaagtacaattttgctgcaaagaagcttgatagaaggcttttacatcttggtgcagaaccagttctagagataggtcttggagatgaccaacacccttcaggattccaataaaataataagtagcgcaagatcaatgtcccctgccctacggttccatgctgatggagagccaccttacatgcttcaaatggtaaaaaaacagtgtttgactaaggagggtactgatagagatgttcgccactttgaattggaagatccatcttcggccatggccatcaactataaaattggtgatgctcttgaaattctaccaagtcaaaatccatcagctgttgatgccttcattgaacgctgtaacttggatccagattgttacataacgattcgagtgagaagtggggataaagttttcaagggttcagttgagcagatggaccgcatcaaattaagaacctttgttgctttgacaatggatgtcgtgtcagcttcccctcggcgatatttctttgaggtcatgagcttttttgcaacaagtgaacgtgaaaaggagaggcttcagtattttgcttcaccagaaggaagagatgatctttaccagtacaatcagaaggagagtaggactgttctagaggtgttggaggattttccttcagtgcaaatgccttttgaatggctggtgcaactaacgcctccactgaagaaaagagccttttctatctcatcatccccactggcacacccaaaccaaatccatttgaccgttagcgtcgtagcatgggttactccattcaagagaacccggcgtggactctgctctacatggttggccgggctcaatccaaataaaggcaatcttatcccgtgttggatacaccaagggtccctgcctcctccacgtccattggttcctctcgtgttgattggaccaggaacagggtgtgcaccattccgtgcatttgtggaggaaagggctgcacaggctgcagctgaaccaacagccccggttctgttcttcttcggctgtagaaaccaagaaaacgattttctatacaaggatttctggctaactcatgcgcaggatgagggggtgttgtcctcgaaaaggggcggtggtttcttcgtcgctttttcccgggatcagccgcaaaaggtctacgtgcaacataagataatggaacagagttcaagagtgtggaacttattactgtccgatgcagtgatctacattgcaggctcttcgacgaaaatgcctgccgatgttacagctgcgctagaggaggttatttgtaaagaaggtggtgtcaagcaagcggatgcttcgaaatggctcagggatctagaaagggctggtagacttaacatcgagacatggtcatagttgtgatgggcaagaatagagatggcaatgggtacccgcgacccaatacccgatgggtatttactccattagggtatgtatgtgggctaaatattctacccgtgggtctgttattgggcaaaaatcttcacccaatgggtaaacgggtattagaacgttccgccttcacccatacccgttaacccgtgggtataaaatacccaatataaacttagtccaagcatgaactttgactttagtcatccatcttttttactctttaacaaccttttaggccataatgtcatagaaggcttaacgacaatttaatgaacatgtaatgggacatgtaatgtgctatgtagtactatcctagtgttactactttatccaattatctttggtgtgttgaatggatggttaaatgattctagaaattttgtaatggtatttagatgttgacatttgtatcatataacattttgatagatgtttagcttttatgggtacgggtgacctgatgggtgacccatacccacatgggtatgggtatgggggtaaatccatacccgccagtgtatatgggtgacccgatggggttatttttgtgttgtgggtatgggtatggggtagtaatacccggtgggtatttacccattgccatctctaggcaagaaagtacatattatccatgtttgctgaatatggaaccagtgagaatttcatttcactgtaaatcaaaggcattggaaatgtggaaacatgtagatgttaaagcatccaatacggagaaatagttggaggatgatctaaagtttcctcatttagccctctgtacgaaacaccatttcatttgattaagtgagaacagtaattacatcagcttttgtt

SEQ ID NO: 32099 - DNA, 2160 bp, Zea Mays
aaacgagatattcagagttcaatgatataacaaggggtgctttaaaaaccgctccagtggatgtatcaaaggaaaagcacaaagtagcaaattcgagaaatggtaaaaaaacagtgtttgactaaggagggtactgatagagatgttcgccactttgaattggaagatccatcttcggccatggccatcaactataaaattggtgatgctcttgaaattctaccaagtcaaaatccatcagctgttgatgccttcattgaacgctgtaacttggatccagattgttacataacgattcgagtgagaagtggggataaagttttcaagggttcagttgagcagatggaccgcatcaaattaagaacctttgttgctttgacaatggatgtcgtgtcagcttcccctcggcgatatttctttgaggtcatgagcttttttgcaacaagtgaacgtgaaaaggagaggcttcagtattttgcttcaccagaaggaagagatgatctttaccagtacaatcagaaggagagtaggactgttctagaggtgttggaggattttccttcagtgcaaatgccttttgaatggctggtgcaactaacgcctccactgaagaaaagagccttttctatctcatcatccccactggcacacccaaaccaaatccatttgaccgttagcgtcgtagcatgggttactccattcaagagaacccggcgtggactctgctctacatggttggccgggctcaatccaaataaaggcaatcttatcccgtgttggatacaccaagggtccctgcctcctccacgtccattggttcctctcgtgttgattggaccaggaacagggtgtgcaccattccgtgcatttgtggaggaaagggctgcacaggctgcagctgaaccaacagccccggttctgttcttcttcggctgtagaaaccaagaaaacgattttctatacaaggatttctggctaactcatgcgcaggatgagggggtgttgtcctcgaaaaggggcggtggtttcttcgtcgctttttcccgggatcagccgcaaaaggtctacgtgcaacataagataatggaacagagttcaagagtgtggaacttattactgtccgatgcagtgatctacattgcaggctcttcgacgaaaatgcctgccgatgttacagctgcgctagaggaggttatttgtaaagaaggtggtgtcaagcaagcggatgcttcgaaatggctcagggatctagaaagggctggtagacttaacatcgagacatggtcatagttgtgatgggcaagaatagagatggcaatgggtacccgcgacccaatacccgatgggtatttactccattagggtatgtatgtgggctaaatattctacccgtgggtctgttattgggcaaaaatcttcacccaatgggtaaacgggtattagaacgttccgccttcacccatacccgttaacccgtgggtataaaatacccaatataaacttagtccaagcatgaactttgactttagtcatccatcttttttactctttaacaaccttttaggccataatgtcatagaaggcttaacgacaatttaatgaacatgtaatgggacatgtaatgtgctatgtagtactatcctagtgttactactttatccaattatctttggtgtgttgaatggatggttaaatgattctagaaattttgtaatggtatttagatgttgacatttgtatcatataacattttgatagatgtttagcttttatgggtacgggtgacctgatgggtgacccatacccacatgggtatgggtatgggggtaaatccatacccgccagtgtatatgggtgacccgatggggttatttttgtgttgtgggtatgggtatggggtagtaatacccggtgggtatttacccattgccatctctaggcaagaaagtacatattatccatgtttgctgaatatggaaccagtgagaatttcatttcactgtaaatcaaaggcattggaaatgtggaaacatgtagatgttaaagcatccaatacggagaaatagttggaggatgatctaaagtttcctcatttagccctctgtacgaaacaccatttcatttgattaagtgagaacagtaattacatcagcttttgtt

SEQ ID NO: 32100 - DNA, 2082 bp, Zea Mays
aatgtggtgatctgcttgtcgctggtaaaaaaacagtgtttgactaaggagggtactgatagagatgttcgccactttgaattggaagatccatcttcggccatggccatcaactataaaattggtgatgctcttgaaattctaccaagtcaaaatccatcagctgttgatgccttcattgaacgctgtaacttggatccagattgttacataacgattcgagtgagaagtggggataaagttttcaagggttcagttgagcagatggaccgcatcaaattaagaacctttgttgctttgacaatggatgtcgtgtcagcttcccctcggcgatatttctttgaggtcatgagcttttttgcaacaagtgaacgtgaaaaggagaggcttcagtattttgcttcaccagaaggaagagatgatctttaccagtacaatcagaaggagagtaggactgttctagaggtgttggaggattttccttcagtgcaaatgccttttgaatggctggtgcaactaacgcctccactgaagaaaagagccttttctatctcatcatccccactggcacacccaaaccaaatccatttgaccgttagcgtcgtagcatgggttactccattcaagagaacccggcgtggactctgctctacatggttggccgggctcaatccaaataaaggcaatcttatcccgtgttggatacaccaagggtccctgcctcctccacgtccattggttcctctcgtgttgattggaccaggaacagggtgtgcaccattccgtgcatttgtggaggaaagggctgcacaggctgcagctgaaccaacagccccggttctgttcttcttcggctgtagaaaccaagaaaacgattttctatacaaggatttctggctaactcatgcgcaggatgagggggtgttgtcctcgaaaaggggcggtggtttcttcgtcgctttttcccgggatcagccgcaaaaggtctacgtgcaacataagataatggaacagagttcaagagtgtggaacttattactgtccgatgcagtgatctacattgcaggctcttcgacgaaaatgcctgccgatgttacagctgcgctagaggaggttatttgtaaagaaggtggtgtcaagcaagcggatgcttcgaaatggctcagggatctagaaagggctggtagacttaacatcgagacatggtcatagttgtgatgggcaagaatagagatggcaatgggtacccgcgacccaatacccgatgggtatttactccattagggtatgtatgtgggctaaatattctacccgtgggtctgttattgggcaaaaatcttcacccaatgggtaaacgggtattagaacgttccgccttcacccatacccgttaacccgtgggtataaaatacccaatataaacttagtccaagcatgaactttgactttagtcatccatcttttttactctttaacaaccttttaggccataatgtcatagaaggcttaacgacaatttaatgaacatgtaatgggacatgtaatgtgctatgtagtactatcctagtgttactactttatccaattatctttggtgtgttgaatggatggttaaatgattctagaaattttgtaatggtatttagatgttgacatttgtatcatataacattttgatagatgtttagcttttatgggtacgggtgacctgatgggtgacccatacccacatgggtatgggtatgggggtaaatccatacccgccagtgtatatgggtgacccgatggggttatttttgtgttgtgggtatgggtatggggtagtaatacccggtgggtatttacccattgccatctctaggcaagaaagtacatattatccatgtttgctgaatatggaaccagtgagaatttcatttcactgtaaatcaaaggcattggaaatgtggaaacatgtagatgttaaagcatccaatacggagaaatagttggaggatgatctaaagtttcctcatttagccctctgtacgaaacaccatttcatttgattaagtgagaacagtaattacatcagcttttgtt

SEQ ID NO: 32101 - DNA, 1678 bp, Zea Mays
actgaatcttttcataacaacattgtttccatagatggcttgccatgcagaataacttttggtgttggaggattttccttcagtgcaaatgccttttgaatggctggtgcaactaacgcctccactgaagaaaagagccttttctatctcatcatccccactggcacacccaaaccaaatccatttgaccgttagcgtcgtagcatgggttactccattcaagagaacccggcgtggactctgctctacatggttggccgggctcaatccaaataaaggcaatcttatcccgtgttggatacaccaagggtccctgcctcctccacgtccattggttcctctcgtgttgattggaccaggaacagggtgtgcaccattccgtgcatttgtggaggaaagggctgcacaggctgcagctgaaccaacagccccggttctgttcttcttcggctgtagaaaccaagaaaacgattttctatacaaggatttctggctaactcatgcgcaggatgagggggtgttgtcctcgaaaaggggcggtggtttcttcgtcgctttttcccgggatcagccgcaaaaggtctacgtgcaacataagataatggaacagagttcaagagtgtggaacttattactgtccgatgcagtgatctacattgcaggctcttcgacgaaaatgcctgccgatgttacagctgcgctagaggaggttatttgtaaagaaggtggtgtcaagcaagcggatgcttcgaaatggctcagggatctagaaagggctggtagacttaacatcgagacatggtcatagttgtgatgggcaagaatagagatggcaatgggtacccgcgacccaatacccgatgggtatttactccattagggtatgtatgtgggctaaatattctacccgtgggtctgttattgggcaaaaatcttcacccaatgggtaaacgggtattagaacgttccgccttcacccatacccgttaacccgtgggtataaaatacccaatataaacttagtccaagcatgaactttgactttagtcatccatcttttttactctttaacaaccttttaggccataatgtcatagaaggcttaacgacaatttaatgaacatgtaatgggacatgtaatgtgctatgtagtactatcctagtgttactactttatccaattatctttggtgtgttgaatggatggttaaatgattctagaaattttgtaatggtatttagatgttgacatttgtatcatataacattttgatagatgtttagcttttatgggtacgggtgacctgatgggtgacccatacccacatgggtatgggtatgggggtaaatccatacccgccagtgtatatgggtgacccgatggggttatttttgtgttgtgggtatgggtatggggtagtaatacccggtgggtatttacccattgccatctctaggcaagaaagtacatattatccatgtttgctgaatatggaaccagtgagaatttcatttcactgtaaatcaaaggcattggaaatgtggaaacatgtagatgttaaagcatccaatacggagaaatagttggaggatgatctaaagtttcctcatttagccctctgtacgaaacaccatttcatttgattaagtgagaacagtaattacatcagcttttgtt

SEQ ID NO: 32102 - DNA, 1174 bp, Zea Mays
atggaaaatggtaaaaagaagaagaccatgtcggcagatgataaatcttgcaaaagccatgagcacagcaagctagagtttgcaactttgttcacctatggctgggtaatcctccatgtcttgaatattcagtggagggccgaggtcgagacaggatcacaggagatcggcgacgagtcgaggagatgcaggcctcgaggcagaagggttgagaagagccgaagtcagcataccgaggcatgccaccacaccgacagctgagtgtgcctgaggtggcagactggcaggggggcgccatgatccgattcgcgtctggacaggaaggaggacaccggtcgccgttcagacagaccctccgccccatgcgccggcgccgctgaaacattgcatctgcctcctcataggtttttttttggacgaagcctctcgcagtttttttctaggtataggattgactgtaaaaaatagcttctcgccgaaacacctccctctgcacccacccagcactagcccgaccacctccctctccccgacccaccgacgtcttgacccgacggcttttcgcactccctaatcgatggcttgtcgcgctccgcatcctgacccgcgcgccatatgttccagcggcattcctggggatggatcgatgtaggcacaggtaaagaggtgtaagacttcatgaaacgtcactatagatgtgattcgccaagattgtggaggttcaatgtctgttggagctgcttcacgcccacaaactcatattcgacctcgaccaaaatcaaccttatggcaacaatgatccctcctggatgtctgatttcagcactatggagtcctagggtgggtacttcacttgtgtactgaaccaggaaagtgcagatgttgttggctccgttaacataatggaagttgataatgaagtgacagagttaccactagtgaatgaaatgaactcgcatctgattaagaggagtttatccaagaatttcaatgaagaggaggacacaatgttggtttcgagctatcttaatgttagcaaggatcctatttccaaaagagataaaaaaaaggtgtattttggaaaagagtatggaaatactataacaagaacgggacattcgagtccaatcgtaattggtcatcattgaaacatcgttggcttgcaattcacatg

SEQ ID NO: 32103 - DNA, 1083 bp, Zea Mays
aaacctatggctgggtaatcctccatgtcttgaatattcagtggagggccgaggtcgagacaggatcacaggagatcggcgacgagtcgaggagatgcaggcctcgaggcagaagggttgagaagagccgaagtcagcataccgaggcatgccaccacaccgacagctgagtgtgcctgaggtggcagactggcaggggggcgccatgatccgattcgcgtctggacaggaaggaggacaccggtcgccgttcagacagaccctccgccccatgcgccggcgccgctgaaacattgcatctgcctcctcataggtttttttttggacgaagcctctcgcagtttttttctaggtataggattgactgtaaaaaatagcttctcgccgaaacacctccctctgcacccacccagcactagcccgaccacctccctctccccgacccaccgacgtcttgacccgacggcttttcgcactccctaatcgatggcttgtcgcgctccgcatcctgacccgcgcgccatatgttccagcggcattcctggggatggatcgatgtaggcacaggtaaagaggtgtaagacttcatgaaacgtcactatagatgtgattcgccaagattgtggaggttcaatgtctgttggagctgcttcacgcccacaaactcatattcgacctcgaccaaaatcaaccttatggcaacaatgatccctcctggatgtctgatttcagcactatggagtcctagggtgggtacttcacttgtgtactgaaccaggaaagtgcagatgttgttggctccgttaacataatggaagttgataatgaagtgacagagttaccactagtgaatgaaatgaactcgcatctgattaagaggagtttatccaagaatttcaatgaagaggaggacacaatgttggtttcgagctatcttaatgttagcaaggatcctatttccaaaagagataaaaaaaaggtgtattttggaaaagagtatggaaatactataacaagaacgggacattcgagtccaatcgtaattggtcatcattgaaacatcgttggcttgcaattcacatg

SEQ ID NO: 32104 - DNA, 655 bp, Zea Mays
atccgattcgcgtctggacaggaaggaggacaccggtcgccgttcagacagaccctccgccccatgcgccggcgccgctgaaacattgcatctgcctcctcatagcggcattcctggggatggatcgatgtaggcacaggtaaagaggtgtaagacttcatgaaacgtcactatagatgtgattcgccaagattgtggaggttcaatgtctgttggagctgcttcacgcccacaaactcatattcgacctcgaccaaaatcaaccttatggcaacaatgatccctcctggatgtctgatttcagcactatggagtcctagggtgggtacttcacttgtgtactgaaccaggaaagtgcagatgttgttggctccgttaacataatggaagttgataatgaagtgacagagttaccactagtgaatgaaatgaactcgcatctgattaagaggagtttatccaagaatttcaatgaagaggaggacacaatgttggtttcgagctatcttaatgttagcaaggatcctatttccaaaagagataaaaaaaaggtgtattttggaaaagagtatggaaatactataacaagaacgggacattcgagtccaatcgtaattggtcatcattgaaacatcgttggcttgcaattcacatg

SEQ ID NO: 32105 - DNA, 276 bp, Zea Mays
gtgttagatgattatctttgctgcacctacattatccataagataatggtaagaatttgaagaaaccaaagccttggaagcacacccaagcaataacgccggcacaactcagacagatgcgtgatgaattttgggacactgctcctcactatggtggacagaaagagatttgggacgcacttagagccgctgcagactctgacctagcgcttgcgcaaaccatagtggatagtgctggcatcatcgtatcgaatctgacagacgaatctctagaat

SEQ ID NO: 32106 - DNA, 3905 bp, Zea Mays
cgctccaacagcaagccaaacacgacgaaacgctcccggccccagctgcttgttatgccgggtgcccgtagcgccgccgtgccgcagacgcgcggacccctgggcccattgccctcgtggccccgtgccgtgctctggcttcctttctgaacggatcccctcccccaccaaaaaaaaaaaaaaactccgacgccttgggccgttggacgcaactcgcgagccccccgaaagcaccgcccgctcccacacccggcacgaggcggaggcacccacacccactccggtcacccaacttgactcgccctccccctacctccgtcgctcttcccgtgaaaccctccaggatccaacgaaaaaggcgaaatctccgaaccacaccgccataatcacacacgccaaccggcggcccagggccggctttcccccctggttccctcctcaaatggcctagcggaggcgggtgtctcttttctttcccctcgcgtcgcgcctcagtgagggcaaggtagagtggcactgggaaagacgcgcgccgtgccgcctcgcaatgcccgctcccgaccgtgccacggcggggggcggtgccgggggccacttccgcggccacgcgcacctcaccaactgcatccacctgcgccaccaccacgcgcacgcgcacgcgggagcgggaggcgcgtcgtcgtcgggccggaggcggagcccggcgtccgcgtcgctgatgcgcgaccttctcgcgctgcagcgctcgcgatcgctccgggacccgtccacgcgccgctccgtcgagtcgtccagggtggcggccgaccccgacgatggcaccgacgacgacgacgacgacgacgccgatctccccgccaagtcccgccgcagcgccggggcgctcaagacgctcctggaccagctagccgagaacccccatccgaagcccggccgccgcccgccccgccggttcaaacgtcgggcaggccgccgcgccgccgctgccagcaagcctccagaccgcgcggccgcgctctccgtcaactccagctcccaggaggccgtctgcggcaacaaatacctgttccatggcggcggcggcggcgacgacgacggcgatggcgtggtggagctgcagcagcatttgccgcaggactcgcgcaacgtctgtggcattccatggaactggtcgcgtctgcaccaccggggcaagtctatcctcgacatggccggccgcagcctttcgtgcggcctctccgactccaagtcggcggcggggcgaaagtccgaagcgcccgccgcctcaggtgtccgtccccttttccccgttaagtccgagaggctggcttcgtcgaccagttcggactcggacgcgctgcccctgcttgttgaggaggctgccacctccggtgctcgcaaacgcattggcgtcatttcttctggaagctactccggagagcttgggattttctctaaccagacaagcgagatggactccgacctgctgtctgagtctcagtcggggcacaagtcactggcctcgcgctcgcagcatggccgtgggcgtcatcgtagcctgacacagaagttcgcaccaaagacgttcaaagacgttgttggccagagcttggtggtgcaggcgctgtccaacgccatcctgaggaggaagattgggttggtgtatgtattctatggtccgcacggcacgggcaagacttcgtgcgcccgtgtctttgccaaggcgctcaattgcctctcctctgagcaccccaggccctgtgactcatgcacgtcgtgcattgctcacaatctcggcaagagcaggagcctgatggagattgggccggttggcaacatcgacatggagggcattgtggacgtcctcgataatgtgatgctttcacctgcaccatcacactacagggtgtttatatttgatgactgtgatactctgccagctgacacttggagtgctatctcaaaagttgtggaccgggcaccccgtcgagttgtgtttatccttgtcagtccaaaccttgaacttcctcacatcatcctgtcgagatgccagaagttctttttcccaaagctgagggagtccgacattgtcaatacattgcagtggatttgcaccagcgagagtctagatgttgataaagatgcaatgaagctaattgcatctcgttccgatggatctttgagggatgccgagatgactcttgatcaactcagtttgcttggacaaaggatttccttgtctcttgtccaagaattggttggtctggtgtctgatgataaactggtcgatttgcttgatttggctctatctgccgacatggtgaacacagtgaagacactacgagacatcacagaaaccggcgttgagcctttagcactgatgtctcagcttgccacaataattactgatattcttgctggttcgtatgcatttactcgagaaaggcccaggagaaagttcttcaaacgtcctaccttgtcaaaggaagatatggaaaaactacgtcaggccttgaaaacactatctgaagctgaaaagcagttgagggtttctagtgacaagacaacctggcttacagctgctctgcttcagcttgctcctgataagcagtacctgctgcctagttcatcaactagtacaagtttgaaccatggtgtgctggttggtccctttcctgataggggtgtagggagggccccagcagttgagaataaaggtaacctggcaggcacgtcttatggggaaaagagaactgttgaacacacagaaaatggtcatgtgttgtcaaccagttctgtcagagcaaatgagggaactaaactcagaaaagcggaaaatgaaatggtctggcaagctgtgcttgagagtatccaatcagatacattgagaaaaatgatggctaaagaggccaggctaaactctatcagccttggaacagaaccaacagtgcaactaataattagctcacatatcagtcatactccatcaatgtttccttaccctgagaatgactcgacactgaggaggtcctttactaaacatagtccactctcttctggagaaggtgaaataattgaagttggaccttctcgcatgcattggcatgctcaaacaaataatgatgttcttgacgtaaatgaaagaagaaaggagaacacatgggaggaagaaacttcgtcatcaccaaaccaagagagcgtgactaatccaaaaggaagaaatgggaacagacagaatcgacagaacagcatagtaagaggaaaggtatctcttgctcatgttattgggagggctgaagcttgttctcagcgaggaggctggtctagacgaaaagctatatcgattgctgaaaagctagagcaagagaatttgaggatggagcctaaatcgagtctactttgttggagaacctcaaggactcgtcggaagctctcttcaattaaggtcaggaatcgaagatcacgcaccatatcaaggctcatattgtgtggaagatgcatttcgaccaaatctccaagatagaagaatttgaatcgtagaatttgcaacctgttaacttagcattcataatttattctgtctgtaccttgtaggctgtagccgtgtcagtttgtagatccttctctctctctctctctctctctctcaattctgtatatttcttgacatgtaaaaaacgacgatagaagtgacatagtaaattcttctttcaaaatgctctgtaatttttttataggaagactagaataaaaactttgtattcggaagtctctgataattgataaatgtccttagtctccatagacactgaacattattttcgcatgattgggctctaatttattacactttccactacagtgccagttatatgatgaataattggaaaaggggggaaaataac

SEQ ID NO: 32107 - DNA, 3903 bp, Zea Mays
cccggccccagctgcttgttatgccgggtgcccgtagcgccgccgtgccgcagacgcgcggacccctgggcccattgccctcgtggccccgtgccgtgctctggcttcctttctgaacggatcccctcccccaccaaaaaaaaaaaaaaactccgacgccttgggccgttggacgcaactcgcgagccccccgaaagcaccgcccgctcccacacccggcacgaggcggaggcacccacacccactccggtcacccaacttgactcgccctccccctacctccgtcgctcttcccgtgaaaccctccaggatccaacgaaaaaggcgaaatctccgaaccacaccgccataatcacacacgccaaccggcggcccagggccggctttcccccctggttccctcctcaaatggcctagcggaggcgggtgtctcttttctttcccctcgcgtcgcgcctcagtgagggcaaggtagagtggcactgggaaagacgcgcgccgtgccgcctcgcaatgcccgctcccgaccgtgccacggcggggggcggtgccgggggccacttccgcggccacgcgcacctcaccaactgcatccacctgcgccaccaccacgcgcacgcgcacgcgggagcgggaggcgcgtcgtcgtcgggccggaggcggagcccggcgtccgcgtcgctgatgcgcgaccttctcgcgctgcagcgctcgcgatcgctccgggacccgtccacgcgccgctccgtcgagtcgtccagggtggcggccgaccccgacgatggcaccgacgacgacgacgacgacgacgccgatctccccgccaagtcccgccgcagcgccggggcgctcaagacgctcctggaccagctagccgagaacccccatccgaagcccggccgccgcccgccccgccggttcaaacgtcgggcaggccgccgcgccgccgctgccagcaagcctccagaccgcgcggccgcgctctccgtcaactccagctcccaggaggccgtctgcggcaacaaatacctgttccatggcggcggcggcggcgacgacgacggcgatggcgtggtggagctgcagcagcatttgccgcaggactcgcgcaacgtctgtggcattccatggaactggtcgcgtctgcaccaccggggcaagtctatcctcgacatggccggccgcagcctttcgtgcggcctctccgactccaagtcggcggcggggcgaaagtccgaagcgcccgccgcctcaggtgtccgtccccttttccccgttaagtccgagaggctggcttcgtcgaccagttcggactcggacgcgctgcccctgcttgttgaggaggctgccacctccggtgctcgcaaacgcattggcgtcatttcttctggaagctactccggagagcttgggattttctctaaccagacaagcgagatggactccgacctgctgtctgagtctcagtcggggcacaagtcactggcctcgcgctcgcagcatggccgtgggcgtcatcgtagcctgacacagaagttcgcaccaaagacgttcaaagacgttgttggccagagcttggtggtgcaggcgctgtccaacgccatcctgaggaggaagattgggttggtgtatgtattctatggtccgcacggcacgggcaagacttcgtgcgcccgtgtctttgccaaggcgctcaattgcctctcctctgagcaccccaggccctgtgactcatgcacgtcgtgcattgctcacaatctcggcaagagcaggagcctgatggagattgggccggttggcaacatcgacatggagggcattgtggacgtcctcgataatgtgatgctttcacctgcaccatcacactacagggtgtttatatttgatgactgtgatactctgccagctgacacttggagtgctatctcaaaagttgtggaccgggcaccccgtcgagttgtgtttatccttgtcagtccaaaccttgaacttcctcacatcatcctgtcgagatgccagaagttctttttcccaaagctgagggagtccgacattgtcaatacattgcagtggatttgcaccagcgagagtctagatgttgataaagatgcaatgaagctaattgcatctcgttccgatggatctttgagggatgccgagatgactcttgatcaactcagtttgcttggacaaaggatttccttgtctcttgtccaagaattggttggtctggtgtctgatgataaactggtcgatttgcttgatttggctctatctgccgacatggtgaacacagtgaagacactacgagacatcacagaaaccggcgttgagcctttagcactgatgtctcagcttgccacaataattactgatattcttgctggttcgtatgcatttactcgagaaaggcccaggagaaagttcttcaaacgtcctaccttgtcaaaggaagatatggaaaaactacgtcaggccttgaaaacactatctgaagctgaaaagcagttgagggtttctagtgacaagacaacctggcttacagctgctctgcttcagcttgctcctgataagcagtacctgctgcctagttcatcaactagtacaagtttgaaccatggtgtgctggttggtccctttcctgataggggtgtagggagggccccagcagttgagaataaaggtaacctggcaggcacgtcttatggggaaaagagaactgttgaacacacagaaaatggtcatgtgttgtcaaccagttctgtcagagcaaatgagggaactaaactcagaaaagcggaaaatgaaatggtctggcaagctgtgcttgagagtatccaatcagatacattgagaaaaatgatggctaaagaggccaggctaaactctatcagccttggaacagaaccaacagtgcaactaataattagctcacatatcagtcatactccatcaatgtttccttaccctgagaatgactcgacactgaggaggtcctttactaaacatagtccactctcttctggagatggatgcaatctgatccccacatattaacagaaggtgaaataattgaagttggaccttctcgcatgcattggcatgctcaaacaaataatgatgttcttgacgtaaatgaaagaagaaaggagaacacatgggaggaagaaacttcgtcatcaccaaaccaagagagcgtgactaatccaaaaggaagaaatgggaacagacagaatcgacagaacagcatagtaagaggaaaggtatctcttgctcatgttattgggagggctgaagcttgttctcagcgaggaggctggtctagacgaaaagctatatcgattgctgaaaagctagagcaagagaatttgaggatggagcctaaatcgagtctactttgttggagaacctcaaggactcgtcggaagctctcttcaattaaggtcaggaatcgaagatcacgcaccatatcaaggctcatattgtgtggaagatgcatttcgaccaaatctccaagatagaagaatttgaatcgtagaatttgcaacctgttaacttagcattcataatttattctgtctgtaccttgtaggctgtagccgtgtcagtttgtagatccttctctctctctctctctctctctctcaattctgtatatttcttgacatgtaaaaaacgacgatagaagtgacatagtaaattcttctttcaaaatgctctgtaatttttttataggaagactagaataaaaactttgtattcggaagtctctgataattgataaatgtccttagtctccatagacactgaacattattttcgcatgattgggctctaatttattacactttccactacagtgccagttatatgatgaataattggaaaaggggggaaaataac

SEQ ID NO: 32108 - DNA, 4240 bp, Zea Mays
gccccagctgcttgttatgccgggtgcccgtagcgccgccgtgccgcagacgcgcggacccctgggcccattgccctcgtggccccgtgccgtgctctggcttcctttctgaacggatcccctcccccaccaaaaaaaaaaaaaaactccgacgccttgggccgttggacgcaactcgcgagccccccgaaagcaccgcccgctcccacacccggcacgaggcggaggcacccacacccactccggtcacccaacttgactcgccctccccctacctccgtcgctcttcccgtgaaaccctccaggatccaacgaaaaaggcgaaatctccgaaccacaccgccataatcacacacgccaaccggcggcccagggccggctttcccccctggttccctcctcaaatggcctagcggaggcgggtgtctcttttctttcccctcgcgtcgcgcctcagtgagggcaaggtagagtggcactgggaaagacgcgcgccgtgccgcctcgcaatgcccgctcccgaccgtgccacggcggggggcggtgccgggggccacttccgcggccacgcgcacctcaccaactgcatccacctgcgccaccaccacgcgcacgcgcacgcgggagcgggaggcgcgtcgtcgtcgggccggaggcggagcccggcgtccgcgtcgctgatgcgcgaccttctcgcgctgcagcgctcgcgatcgctccgggacccgtccacgcgccgctccgtcgagtcgtccagggtggcggccgaccccgacgatggcaccgacgacgacgacgacgacgacgccgatctccccgccaagtcccgccgcagcgccggggcgctcaagacgctcctggaccagctagccgagaacccccatccgaagcccggccgccgcccgccccgccggttcaaacgtcgggcaggccgccgcgccgccgctgccagcaagcctccagaccgcgcggccgcgctctccgtcaactccagctcccaggaggccgtctgcggcaacaaatacctgttccatggcggcggcggcggcgacgacgacggcgatggcgtggtggagctgcagcagcatttgccgcaggactcgcgcaacgtctgtggcattccatggaactggtcgcgtctgcaccaccggggcaagtctatcctcgacatggccggccgcagcctttcgtgcggcctctccgactccaagtcggcggcggggcgaaagtccgaagcgcccgccgcctcaggtgtccgtccccttttccccgttaagtccgagaggctggcttcgtcgaccagttcggactcggacgcgctgcccctgcttgttgaggaggctgccacctccggtgctcgcaaacgcattggcgtcatttcttctggaagctactccggagagcttgggattttctctaaccagacaagcgagatggactccgacctgctgtctgagtctcagtcggggcacaagtcactggcctcgcgctcgcagcatggccgtgggcgtcatcgtagcctgacacagaagttcgcaccaaagacgttcaaagacgttgttggccagagcttggtggtgcaggcgctgtccaacgccatcctgaggaggaagattgggttggtgtatgtattctatggtccgcacggcacgggcaagacttcgtgcgcccgtgtctttgccaaggcgctcaattgcctctcctctgagcaccccaggccctgtgactcatgcacgtcgtgcattgctcacaatctcggcaagagcaggagcctgatggagattgggccggttggcaacatcgacatggagggcattgtggacgtcctcgataatgtgatgctttcacctgcaccatcacactacagggtgtttatatttgatgactgtgatactctgccagctgacacttggagtgctatctcaaaagttgtggaccgggcaccccgtcgagttgtgtttatccttgtcagtccaaaccttgaacttcctcacatcatcctgtcgagatgccagaagttctttttcccaaagctgagggagtccgacattgtcaatacattgcagtggatttgcaccagcgagagtctagatgttgataaagatgcaatgaagctaattgcatctcgttccgatggatctttgagggatgccgagatgactcttgatcaactcagtttgcttggacaaaggatttccttgtctcttgtccaagaattggttggtctggtgtctgatgataaactggtcgatttgcttgatttggctctatctgccgacatggtgaacacagtgaagacactacgagacatcacagaaaccggcgttgagcctttagcactgatgtctcagcttgccacaataattactgatattcttgctggttcgtatgcatttactcgagaaaggcccaggagaaagttcttcaaacgtcctaccttgtcaaaggaagatatggaaaaactacgtcaggccttgaaaacactatctgaagctgaaaagcagttgagggtttctagtgacaagacaacctggcttacagctgctctgcttcagcttgctcctgataagcagtacctgctgcctagttcatcaactagtacaagtttgaaccatggtgtgctggttggtccctttcctgataggggtgtagggagggccccagcagttgagaataaaggtaacctggcaggcacgtcttatggggaaaagagaactgttgaacacacagaaaatggtcatgtgttgtcaaccagttctgtcagagcaaatgagggaactaaactcagaaaagcggaaaatgaaatggtctggcaagctgtgcttgagagtatccaatcagatacattgagaaaaatgatggctaaagaggccaggctaaactctatcagccttggaacagaaccaacagtgcaactaataattagctcacatatcagtcatactccatcaatgtttccttaccctgagaatgactcgacactgaggaggtcctttactaaacatagtccactctcttctggaggtgagattctaatttcgaggtttaaaaaggatagtgttgtgaagggagctaactctagtaagactagatggatgcaatctgatccccacatattaacagaaggtgaaataattgaagttggaccttctcgcatgcattggcatgctcaaacaaataatgatgttcttgacgtaaatgaaagaagaaaggagaacacatgggaggaagaaacttcgtcatcaccaaaccaagagagcgtgactaatccaaaaggaagaaatgggaacagacagaatcgacagaacagcatagtaagaggaaaggtatctcttgctcatgttattgggagggctgaagcttgttctcagcgaggaggctggtctagacgaaaagctatatcgattgctgaaaagctagagcaagagaatttgtaagtgttgttatcctgcaatcagttcagtcaaactatttatataagaactcatgcttgcatgttttcacattagaaataagataaatatcgtatgaaaaaaaagttctgtaacatccagcggtctcataataattttcctgaaatcacaaggaccattaaacatttaggggtcgatactccataccattgtacaaaatatgttgactcatttatcaattgaggttatgcgtttgtattgcatgtttctcaccgggaaagtatttgagtgcaggaggatggagcctaaatcgagtctactttgttggagaacctcaaggactcgtcggaagctctcttcaattaaggtcaggaatcgaagatcacgcaccatatcaaggctcatattgtgtggaagatgcatttcgaccaaatctccaagatagaagaatttgaatcgtagaatttgcaacctgttaacttagcattcataatttattctgtctgtaccttgtaggctgtagccgtgtcagtttgtagatccttctctctctctctctctctctctctcaattctgtatatttcttgacatgtaaaaaacgacgatagaagtgacatagtaaattcttctttcaaaatgctctgtaatttttttataggaagactagaataaaaactttgtattcggaagtctctgataattgataaatgtccttagtctccatagacactgaacattattttcgcatgattgggctctaatttattacactttccactacagtgccagttatatgatgaataattggaaaaggggggaaaataac

SEQ ID NO: 32109 - DNA, 1327 bp, Zea Mays
ccacgccttgctcagcctcagccctcaggcctcagccagcgtgcgcgcccacaacccctcacgtcgtccccgccaatcacaccgcacgaaccgaggacgacgggacaccaccgtcaccgcgacgtagtagtagtactacatgcatagcatagcctcgtggagtcgtggtagtagtagtttagttttgctcgcttccacaccgcaccgccgttcccttttttatatcccgcggatgcgcctgcctctgcctcggggtcgggggggcagctggtgacatcggattcggatcaggccgagaagatcgaactgctccgatccggcgcttaatttctctctctctctctcgggctagctgcccgggcaaatggacgccgagtggagcggcgacgagagcaaggctggcgctgcgggcggagtttcgtcggctgattgcccaagttcgccaccgccggtgtcgccggcgccaccgtccacgtcgccagctgctaccggtgccgggaggaggcggtcggcgaacaagcgggtggtcaccgtgccgctggcggacgtcagtggcccacggcccaagggcgtcggcgagggcaacacgccgacggacgcgtgggcgtggcgcaagtacggccagaagcccatcaagggctcgccttttccgagggcttactacaggtgcagcagctccaaggggtgcccggccaggaagcaggtggagcggagcagggcggagccggacaaggtgatcgtcacgtactcgttcgagcacagccactcggaggccatggcggcggcgagggcgcagaaccgccaggccccgaagccaaagccggcccagccacagccagtcccgccggagtccccgtcatccggcagccacgacgtcgctgccgctgccacggtcgtctgcgcgcctgctgcggccgagaccgaggccggcgcggcggccgtcgaggtgcacgacgagttcaggtggctctacgacggcgtgtccgtcacctcctcggcgtccccaccggacgtcgaggcggcggacgagatgctgtacggggcgatgttcttcggcgccccgcccgcgcccctccccgacgagttcggcgacgtcggcgggctgttcgacggagaagggggcgaggaggacgccatgttcgcgggtctcggcgagctgcccgagtgcgccatggtgttccggcggcacgccggcgacgggatttcggtggcaggccgggtgaagtgaagtgaatcctgaattgaaggtcctgacatgtgggccggggcaggccggactccaataaaaaccagataaactcatgtgggctgaaagagattccatatc

SEQ ID NO: 32110 - DNA, 942 bp, Zea Mays
gaaagatgaactttttggtagacgtccagcaatgctgcatgcgcacttggcagtggcaccgaggaccgaaccgttggcggcgttgcggctcttcattttgaaacggacatggctggcatcaagcacctccaattctttccggcgttctagcctcccagttccaggttgtagctgcccaaaccaaagccatcccacagggcctccgctctacctgtagcccgaaaaatggaaggggacgcggttctttcgagcatggattccctgtggttctactccagcgtcttcctccggcagccctccaagcacaaggggagcgagtgcgcagaagagccgcagcaagattgggcaggaaccaacaagacgaccagcggccgcccttgttgccaggctcccaaatgcgccaaggaggcagcggggcgaagagcggaggggggaacggtgcgaattgcgcctgcaacgggccgcggggagtgggatgagcgcatggttgcttggcagaaggagcagaggcggcgggcgctggttgccgcggcagcccggtgctcgccggcgacgatgccgccgcctggtggagaaggcgtggccatgaaggcgcatctcaggtcgtgggcccacgcggtcgcttgctccgtcagatgagggctctccattcaggaacctatggaaagtagattttttttgctccatctctgaacgacggcatctcttcatggttgtgcttgcggattattgtggtttatgcagttcgtctttcaggtacgatcactcgaggctcgcataaaggcaagcgattcatttgatacccagtataagtatgtgtccgtgttatacagattatgattgtaagagtagcaatgtgtcgctttctgtgtacacttgttttgcatctggaatctgataaaactctatgctgctgtttgtttcgttagaattgaattccat

SEQ ID NO: 32111 - DNA, 473 bp, Zea Mays
gtttattcaataaatgggccaagcccataaaagatccaacacatacaacgccaagaacagcgtaataatcttcggcgattccccccgctgagctgcgggactccgccgccaccgctttcaccctcgagctcgttcttccccacgccctccgacgccagccccggtctcttcttccggccccagccaaccctgtgatggtgacggtgtccgcgagcagcggtggggaaaggagaggagccatcggatgcgacggcagcgcgtatttgatctggctccggcgagagagagagggaggagaggaagaggaggagaaggcggtgaggatccagtggggttcgccctgctctgtctctgttttcctgcccgttttcttggcgccaggtgtttccgtgtttgtttgatttttctcggccactcctctcccgcgatttttctctgccgtttgctaatatccaccaccttgctgccgataa

SEQ ID NO: 32112 - DNA, 1427 bp, Zea Mays
ctactatccatggcggagtacaagtccaaatacaacgaggcgagtacaatttcactatgtagttctttaaaaaaagtctaagaaagaaggtaaattacactcagtcatagatggtggattagatgaacaatattttacattaagatgttagcactataataatttttagattagataggttgccttctttaattattatcctaaatctgtttgtagtttccatctgttcattgaaaaagtaatggaattatttgacatgcaagaataggcctcttgaggtatcgtactagtttcttcccacattggcttcaatcattgaaaagaccgttgagattaatggcaaaatcccaatgggcaccgactaatttccgcttatattctacgaactcgcgtctattctcctattctctctttactggtaccaaggtgaaaagggtaaatagatgccagccatccttctcaccaggcgttttttctacctagatacaatataaaaattactataccataaggttaactggaaaaggaagcagaaatagagcaacgactagattattggtattggctagctcgttgggcgacagcatggccgccaccgtgtacccgctcgcctccgccagctccacgaaggcgtcgacggccttggccacgcggatcttggggccggccaccatcaccaacttagcttcacggccttgtcgaggaacgacactgttgcctcgacggcggcggtaagacccatcaggttgctcggccttggcaacaagtatgccatttgtgatgaacgtcggatgcaccagtcccggtaggttgcagctgacgctgatgtacacgggcttgctctccctgatggtctcgtgcgcgtcctccagtttgttaacgacgacctggtgtcaggtgtcgggctggaagcaccgaagctcctgccagaagtccgacaaatgctcagcacagacatcacgacgtaaaattgggattgtgcatttttatatttaacacccaaattgaatctggacagttcatggatattctagttttgtagaagataagtatgatatgctatgtggttcaagattttagggttcaaaatgcgttttcgagctgttcataccactattttgttggtaaaataaagccttgaaatggatggctgctcacgtctatttttactattctctcaaatccaatatccacttgtgtgaatgaccaagcgacgatgctatcacagtctggcagatggtgtggcgtgagtacgatttcattatagtgttatgaaaactgatcagtcaatgatgatagatcatacaagactttttttaaaattcagcatgttctttgataggggatgaatttgcataaagtgttatgaaatgtaggcggagcgagcagtgggatgcactgtactataatacttggacggatttttg

SEQ ID NO: 32113 - DNA, 1267 bp, Zea Mays
gatcgcgcgtgtaagccaggtgaatcacttgcactgcatttggcggcctgcggtatcggcatcgccggccccttgatatgtgatcagtccttggtttgcccgtcctgctgcctcctacggcacggcaggcagccacacggatcaccgaaccgaacacaggaaaaatgcatgtgtcatgtgtagcttgctccctatatatgctttgctcaaacgatcctccgttcagcggcatcatctattgccttcccgctcgattgggttagactaccgtcagccaccgtctagtagttctcaatccgacatgccgcttctcgttctgcgcgtgccgctcgcctcgaccaacaatactagtacatgcagtggcgctgcacctcctgtagctgtagcaccagcggcagagcattccgacggcctactgttcgacggccttgctctgggccacggtgacgacgtcgacgataaggccgaggcggacggcgacgacgcagcgaccgtgaagctggagtggctgaggtcgcagatcatcggcgcggaagcagagttcgcgtcgccgttcgggacccgacgcatcacgtacgcggaccacacggcgtccggccgctgcctgcggttcgtcgaggagttcgtgcttcggaacgtcctgcctttctacggcgcgttcggcgttcgggactcccttctgcacaacctgacaattgcatccgaagatgtccaccagaagaaccagatccgcggccccaaccatgcttctcctcctggtctgcgcgacggcggtctcggcggcctctgccgccgccggggcgggcaggggcagggtcggatcgggccgcgcggggccgtcgccgtgccaggatctggcgacgcgggacgactgcgcggcgagagctgggtgcaggtggtgccgtagcgaggcgctcgacgacatgtgcttcgggcctaccgaggcgaggcgcctcccacggcaggtcttctcctgcgatccaccctccgacgcggcgcacgccagcttcaacaagtgacgcccgcagccgcgctcgccttgttcccggactgctccgtctgacctttactttcgccaggcaccaattgttgctccttttgtcattgctggatctgagatttatttatcagagaatagcttggtccgttttgctacgtgattctttcgtgggtttatataatataatgtaaaatctgctcaaaattcaatcagagcattgcaaatattgtatttaaaaaaaaatctaagtcgttttcgttacagata

SEQ ID NO: 32114 - DNA, 712 bp, Zea Mays
gatcgcgcgtgtaagccaggtgaatcacttgcactgcatttggcggcctgcggtatcggcatcgccggccccttgatatgtgatcagtccttggtttgcccgtcctgctgcctcctacggcacggcaggcagccacacggatcaccgaaccgaacacaggaaaaatgcatgtgtcatgtgtagcttgctccctatatatgctttgctcaaacgatcctccgttcagcggcatcatctattgccttcccgctcgattgggttagactaccgtcagccaccgtctagtagttctcaatccgacatgccgcttctcgttctgcgcgtgccgctcgcctcgaccaacaatactagtacatgcagtggcgctgcacctcctgtagctgtagcaccagcggcagagcattccgacggcctactgttcgacggccttgctctgggccacggtgacgacgtcgacgataaggccgaggcggacggcgacgacgcagcgaccgtgaagctggagtggctgaggtcgcagatcatcggcgcggaagcagagttcgcgtcgccgttcgggacccgacgcatcacgtacgcggaccacacggcgtccggccgctgcctgcggttcgtcgaggagttcgtgcttcggaacgtcctgcctttctacgcagaagagcaagctccaaagataaacaactatcaatggtcaagactacgcagtgcgtta

SEQ ID NO: 32115 - DNA, 3015 bp, Zea Mays
cgtgaacgcaagccaactcatgaaaacagcgtgaataaacgaagcagagaaagaacctacccttctagtgaaatggacagtaacctcttcaggataaaggaagtgacctcctctgtaaataagcaaggcatagaagtcaatggttcaactaataatcctacaaatggtggctatgaaatggtgaaaacttccacagggaccaaagatgatatctttggggatctccctctcctcgaattagaaagctccaagattatgtttcggactggtgttcatgaacttccaactgttatagaagaatcatttataacaaatcaaaccgaagcagattctataccagaagcagtacccttgcggctgattgatgcatctgacatcactgctcatacaccatctcctcttgaagacttggtgaaaagtgaagacaatgagccagcatgcatctcccacagtgatgtggaagggagttacccttccactgttgggattgatggcgtgccaaatcataagaacatcaatatggtgaaaccaggtcttggtgatatgcagttaaaacttgctgaagtgtgtgctttgggttctcattctgttctgaggtcaaaatatggctctggtaaccctctgcagggttgttttgatgtgaacaaaaactgctctcaggaaataaaaaaacatggttctaattctactagcagtccacctaccatgagaaccagaactgaagaaactaaatacaaagatgcaccagttaagtgcaagagtactgatatcactgatacagtggctgcactacctgcgcctgccaaccattcatatcaagctagtgtgttgccctctgcagtatcacgtacagttttcagcacaagtgttgattcaaatgacgtgtcttcattcagaagtctgcctgccaaggaatgcatcccaattaccagatctgggaacttcagaactaatatgtgcaatggaagtaagaaacatgtggatccatgtgcggcactatctacagataaccagggtacctcgcactcaaaacttgacccaattttcagtcctgctaacattggaatggcttttatgaagctaccgggccttcaaagaatggagatcttaaactacaatgcaaagataggtgaaaacaggtttagtaatgcagagtccatgaacacagtaagatatcagaaacaacagttgttgagtggcatgacctatgtaatgcaaggtcagaaacagattggtctaggcagctctcaagttaagagaccagctctggatgattatgggggccaaggtgatcatcatctgcagcaacccacggttcgtttgatgggtaagaccgtctcagtttgctcgcatagcaaggatcataacgtatcgaccatggataaagtgagtcctaacaatgttgccattgaagcaagccgcctatccacaatttcatgtcagttacccccaaagagatcgttcccttgtcagaattctgtgacacaaagagtgcatctaaacaattcttcagattttttggcaaggattccgaacaatagtgtgccagggcaaaatactactttacatgaactccatgaccaaaggccacaaccaacaaatagttctgcaacagtgaaaggttgcacttggaattttggtaatcagtttgtttgccaagctgaactcgataaggcagctatggtcagcgccaactctcaaaccaggcatctagagcttcatcaaccacctcatttgataagcattcctcagaatcaacagtctcatttgtggactcctgcagcacacactaggaaagatcagtgttttgtgggtccagcggtgaaccaatcttccccagttccaaaatcattgctaaatgcaagcatgaaggaaaaatatcagaattccactttgttgtcttacaatgatcctagttctatgcctattcgccaaccctaccagatacctggcgcaaagtcatcttctgcatctgtcatatccttttttgagtatggtgcggataattcgttgtccagaagctcttctcctggtctgagtctttctcttacaactggtttggctaatgagtctgtttcgacaagcagagcagcttgtgcgggcagtcttacaaatgcagatggtaggaaggctgctagctttgtcgaaccaataagatcagcttatgcagataatgtttcacagccacctgcaaagccaataagcaacagaacagtttatgcagcagataatgtttcacaacaacctgcaaagagacaacttgttacaggtagaaaggattttatgtctatgggcccaaacattgtgaaccattcacctggttggtcacttagtgatgcagttggtcctcaggtgcttgattttagtaaaagaatgggaagagatgctgctcaaatgtcaaaaaatgaaagcgacaatccaagggccagttccggttcagttccgcctattgaaacatggtctaggcctggggtggttgcaggggctaatactaataccatgttgaatccaggtcaaaacctgaatgatcattccaaactgctatactccaccaaattttcagttgacagcggtatcaattcagttatattatagtgaaaagcaagaaaaaataataataaggtgtccttgttgaagatagctctggagtttttcagtgttcaaacagtcaggcacaggaaacttgtttccgccgtggccgtacatgaagctgctgttctgctgctggctggtgctgcccatcttcaacggcgcggcctacatctacgaggcgcacgtccggcgctacttcaagatcggcagctacgtgagccccagctacagcgagcgccaccgccgggtgctgcagatgacgagccttgacgcgcgcagtgcagacatggtacgcgtgcgtgtttgtttgatcattacgtctggccttgccaacacttcaagaaaagaatcaaaagatggcatggggccatgagagagagagcatggtttgaatgaagctgcaaatctggtggtgtacttgtg

SEQ ID NO: 32116 - DNA, 3747 bp, Zea Mays
cgcaagccaactcatgaaaacagcgtgaataaacgaagcagagaaagaacctacccttctagtgaaatggacagtaacctcttcaggataaaggaagtgacctcctctgtaaataagcaaggcatagaagtcaatggttcaactaataatcctacaaatggtggctatgaaatggtgaaaacttccacagggaccaaagatgatatctttggggatctccctctcctcgaattagaaagctccaagattatgtttcggactggtgttcatgaacttccaactgttatagaagaatcatttataacaaatcaaaccgaagcagattctataccagaagcagtacccttgcggctgattgatgcatctgacatcactgctcatacaccatctcctcttgaagacttggtgaaaagtgaagacaatgagccagcatgcatctcccacagtgatgtggaagggagttacccttccactgttgggattgatggcgtgccaaatcataagaacatcaatatggtgaaaccaggtcttggtgatatgcagttaaaacttgctgaagtgtgtgctttgggttctcattctgttctgaggtcaaaatatggctctggtaaccctctgcagggttgttttgatgtgaacaaaaactgctctcaggaaataaaaaaacatggttctaattctactagcagtccacctaccatgagaaccagaactgaagaaactaaatacaaagatgcaccagttaagtgcaagagtactgatatcactgatacagtggctgcactacctgcgcctgccaaccattcatatcaagctagtgtgttgccctctgcagtatcacgtacagttttcagcacaagtgttgattcaaatgacgtgtcttcattcagaagtctgcctgccaaggaatgcatcccaattaccagatctgggaacttcagaactaatatgtgcaatggaagtaagaaacatgtggatccatgtgcggcactatctacagataaccagggtacctcgcactcaaaacttgacccaattttcagtcctgctaacattggaatggcttttatgaagctaccgggccttcaaagaatggagatcttaaactacaatgcaaagataggtgaaaacaggtttagtaatgcagagtccatgaacacagtaagatatcagaaacaacagttgttgagtggcatgacctatgtaatgcaaggtcagaaacagattggtctaggcagctctcaagttaagagaccagctctggatgattatgggggccaaggtgatcatcatctgcagcaacccacggttcgtttgatgggtaagaccgtctcagtttgctcgcatagcaaggatcataacgtatcgaccatggataaagtgagtcctaacaatgttgccattgaagcaagccgcctatccacaatttcatgtcagttacccccaaagagatcgttcccttgtcagaattctgtgacacaaagagtgcatctaaacaattcttcagattttttggcaaggattccgaacaatagtgtgccagggcaaaatactactttacatgaactccatgaccaaaggccacaaccaacaaatagttctgcaacagtgaaaggttgcacttggaattttggtaatcagtttgtttgccaagctgaactcgataaggcagctatggtcagcgccaactctcaaaccaggcatctagagcttcatcaaccacctcatttgataagcattcctcagaatcaacagtctcatttgtggactcctgcagcacacactaggaaagatcagtgttttgtgggtccagcggtgaaccaatcttccccagttccaaaatcattgctaaatgcaagcatgaaggaaaaatatcagaattccactttgttgtcttacaatgatcctagttctatgcctattcgccaaccctaccagatacctggcgcaaagtcatcttctgcatctgtcatatccttttttgagtatggtgcggataattcgttgtccagaagctcttctcctggtctgagtctttctcttacaactggtttggctaatgagtctgtttcgacaagcagagcagcttgtgcgggcagtcttacaaatgcagatggtaggaaggctgctagctttgtcgaaccaataagatcagcttatgcagataatgtttcacagccacctgcaaagccaataagcaacagaacagtttatgcagcagataatgtttcacaacaacctgcaaagagacaacttgttacaggtagaaaggattttatgtctatgggcccaaacattgtgaaccattcacctggttggtcacttagtgatgcagttggtcctcaggtgcttgattttagtaaaagaatgggaagagatgctgctcaaatgtcaaaaaatgaaagcgacaatccaagggccagttccggttcagttccgcctattgaaacatggtctaggcctggggtggttgcaggggctaatactaataccatgttgaatccaggtcaaaacctgaatgatcattccaaactgctatactccaccaaattttcagttgacagcggtatcaattcagttatattatagtgaaaagcaagaaaaaataataataaggtgtccttgttgaagatagctctggagtttttcagtgttcaaacagtcaggcacaggaaacttcttcactgttgggagccccctgatcctacgacacaggaaaaaggttactggtgatgcacgcagttgcttcagacctttccaaattccaactgctatgttcttactttccttgaaccaagagtaaagaagactttgcaaggtatcagcacggatgcctttcttccccttctgatcccaataatattaaaataaccatcacagaagtataaatccatctacgcatcctttgtcatctacactgtcgcaaaacgggaaggagatcaagaacgtcaggccaagcttctcgcaaggaggagatcaagaaacccggcctagggcaatccggtcgcaagtcgcgacgacggaatcatgggtgttcttggcacccttgctagaaatctggacgcccttgttggctacgcgtccatgcgcgccatagagagcccttcttccctggacgatcagcagtggctcacctactgggtcctgtattccctgatcgccctcttcgagctctcatgctggaaagtcctgcagtggtttccgccgtggccgtacatgaagctgctgttctgctgctggctggtgctgcccatcttcaacggcgcggcctacatctacgaggcgcacgtccggcgctacttcaagatcggcagctacgtgagccccagctacagcgagcgccaccgccgggtgctgcagatgacgagccttgacgcgcgcaggtccgtcgagcgcttcatcgacacgcacgggcccgacgcgctcgacaggatcatccgagctgctgaacaggaagccaagagggcatagcagcttagcgtgcgctgtgacttaagggattcagtccatagggcttcagaattcagatggggtgaaggcgaagcaatgcgaatggataaccgaagcagcctgatgcctggctcgtgtgattactttgtgcagtgcagacatggtacgcgtgcgtgtttgtttgatcattacgtctggccttgccaacacttcaagaaaagaatcaaaagatggcatggggccatgagagagagagcatggtttgaatgaagctgcaaatctggtggtgtacttgtg

SEQ ID NO: 32117 - DNA, 3554 bp, Zea Mays
cgcaagccaactcatgaaaacagcgtgaataaacgaagcagagaaagaacctacccttctagtgaaatggacagtaacctcttcaggataaaggaagtgacctcctctgtaaataagcaaggcatagaagtcaatggttcaactaataatcctacaaatggtggctatgaaatggtgaaaacttccacagggaccaaagatgatatctttggggatctccctctcctcgaattagaaagctccaagattatgtttcggactggtgttcatgaacttccaactgttatagaagaatcatttataacaaatcaaaccgaagcagattctataccagaagcagtacccttgcggctgattgatgcatctgacatcactgctcatacaccatctcctcttgaagacttggtgaaaagtgaagacaatgagccagcatgcatctcccacagtgatgtggaagggagttacccttccactgttgggattgatggcgtgccaaatcataagaacatcaatatggtgaaaccaggtcttggtgatatgcagttaaaacttgctgaagtgtgtgctttgggttctcattctgttctgaggtcaaaatatggctctggtaaccctctgcagggttgttttgatgtgaacaaaaactgctctcaggaaataaaaaaacatggttctaattctactagcagtccacctaccatgagaaccagaactgaagaaactaaatacaaagatgcaccagttaagtgcaagagtactgatatcactgatacagtggctgcactacctgcgcctgccaaccattcatatcaagctagtgtgttgccctctgcagtatcacgtacagttttcagcacaagtgttgattcaaatgacgtgtcttcattcagaagtctgcctgccaaggaatgcatcccaattaccagatctgggaacttcagaactaatatgtgcaatggaagtaagaaacatgtggatccatgtgcggcactatctacagataaccagggtacctcgcactcaaaacttgacccaattttcagtcctgctaacattggaatggcttttatgaagctaccgggccttcaaagaatggagatcttaaactacaatgcaaagataggtgaaaacaggtttagtaatgcagagtccatgaacacagtaagatatcagaaacaacagttgttgagtggcatgacctatgtaatgcaaggtcagaaacagattggtctaggcagctctcaagttaagagaccagctctggatgattatgggggccaaggtgatcatcatctgcagcaacccacggttcgtttgatgggtaagaccgtctcagtttgctcgcatagcaaggatcataacgtatcgaccatggataaagtgagtcctaacaatgttgccattgaagcaagccgcctatccacaatttcatgtcagttacccccaaagagatcgttcccttgtcagaattctgtgacacaaagagtgcatctaaacaattcttcagattttttggcaaggattccgaacaatagtgtgccagggcaaaatactactttacatgaactccatgaccaaaggccacaaccaacaaatagttctgcaacagtgaaaggttgcacttggaattttggtaatcagtttgtttgccaagctgaactcgataaggcagctatggtcagcgccaactctcaaaccaggcatctagagcttcatcaaccacctcatttgataagcattcctcagaatcaacagtctcatttgtggactcctgcagcacacactaggaaagatcagtgttttgtgggtccagcggtgaaccaatcttccccagttccaaaatcattgctaaatgcaagcatgaaggaaaaatatcagaattccactttgttgtcttacaatgatcctagttctatgcctattcgccaaccctaccagatacctggcgcaaagtcatcttctgcatctgtcatatccttttttgagtatggtgcggataattcgttgtccagaagctcttctcctggtctgagtctttctcttacaactggtttggctaatgagtctgtttcgacaagcagagcagcttgtgcgggcagtcttacaaatgcagatggtaggaaggctgctagctttgtcgaaccaataagatcagcttatgcagataatgtttcacagccacctgcaaagccaataagcaacagaacagtttatgcagcagataatgtttcacaacaacctgcaaagagacaacttgttacaggtagaaaggattttatgtctatgggcccaaacattgtgaaccattcacctggttggtcacttagtgatgcagttggtcctcaggtgcttgattttagtaaaagaatgggaagagatgctgctcaaatgtcaaaaaatgaaagcgacaatccaagggccagttccggttcagttccgcctattgaaacatggtctaggcctggggtggttgcaggggctaatactaataccatgttgaatccaggtcaaaacctgaatgatcattccaaactgctatactccaccaaattttcagttgacagcggtatcaattcagttatattatagtgaaaagcaagaaaaaataataataaggtgtccttgttgaagatagctctggagtttttcagtgttcaaacagtcaggcacaggaaacttcttcactgttgggagccccctgatcctacgacacaggaaaaaggttactggtgatgcacgcagttgcttcagacctttccaaattccaactgctatgttcttactttccttgaaccaagagtaaagaagactttgcaaggtatcagcacggatgcctttcttccccttctgatcccaataatattaaaataaccatcacagaagtataaatccatctacgcatcctttgtcatctacactgtcgcaaaacgggaaggagatcaagaacgtcaggccaagcttctcgcaaggaggagatcaagaaacccggcctagggcaatccggtcgcaagtcgcgacgacggaatcatgggtgttcttggcacccttgctagaaatctggacgcccttgttgggccagggatcatgctactctatcctctctacgcgtccatgcgcgccatagagagcccttcttccctggacgatcagcagtggctcacctactgggtcctgtattccctgatcgccctcttcgagctctcatgctggaaagtcctgcagtggtttccgccgtggccgtacatgaagctgctgttctgctgctggctggtgctgcccatcttcaacggcgcggcctacatctacgaggcgcacgtccggcgctacttcaagatcggcagctacgtgagccccagctacagcgagcgccaccgccgggtgctgcagatgacgagccttgacgcgcgcagtgcagacatggtacgcgtgcgtgtttgtttgatcattacgtctggccttgccaacacttcaagaaaagaatcaaaagatggcatggggccatgagagagagagcatggtttgaatgaagctgcaaatctggtggtgtacttgtg

SEQ ID NO: 32118 - DNA, 2219 bp, Zea Mays
ttcagactgcgcctctctgctctcctcctatccatggccgcacctctgattgtctctatataaatagacaagctcccgagccgccgatttacgcatcggccggcatgacgcggcgtattcagagggagaagatgagagcaacgtgggctttgccgagcctcctcctcttcctcgccttctcttcttccttttgcaaagcctcagcctccgcctccacaaagcaagacaaggtctacatagtgtacctgggcaagcacggcggcgcgaaggcggaggaagcggtccttgaggaccatcgcacgctgctgctctccgtcaagggcagtgaggaagaggcacgggcgtcgctgctgtacagctacaagcacaccctcaacggcttcgcggccatcctctcccaggaagaggccacgaaactgtcagagaggagcgaggtggtgtccgcgttccagagcgaggggaggtgggcgccgcacaccacgaggtcttggcggtttctgggcttcgaggaggggctcgaccgtcgcccccccgacgacggtggggatcagtggctgctgccgtcgtccctcgacaaggccagcgaggacatcatcgtcggcatcctcgactccgggatttggccggagtcgaggagcttcagcgaccaagggctcggcccggtgccggcgcgctggaaagggacgtgccaaggcggggattccttcccctcctcgtcctgcaacagggtcaaaccgtgacaccgtaccagctccccggcgacaagccctatcctttggtttatgcggcagacgcagttgttcctgggactcccgctaatgtttccaaccaatgcctgcccaactccctggccagcgacaaggtgcgaggcaagatcgtcgtgtgcttgcggggcgctgggctgcgggtggggaagggcctggaggtgaagcgcgcgggcggcgcggccattctgctcggcaacccagcggcctccggctccgaagtccccgtcgacgcgcacgtcctcccgggcaccgcggtcgccgcagccgacgccgacaccatcctccgctacatcaactccagctccagcccgaccgccgtgctggacccctccaggaccgtggtggacgtccggccgtcgccggtgatggcgcagttctcgtcgcgtggccccaacgtcctggagcccagcattctcaagccggacatcacggcgccggggctgaacatcctggcggcgtggagcggggcgtcgtcgccgacgaaactcgacggcgaccaccgcgtggtgcagtacaacatcatgtcggggacgtccatgtcgtgcccgcacgcctccgccgccgccgcgctcgtcaaggccgcgcaccccgactggagctccgccgcgatccgatcggccatcatgaccacggccacgaccagcgacgcggaaggcggcccactgatgaacggggacgggtcggtcgcggggcccatggactacggctcgggccacatccggcccaggcacgcgcttgaccctggcctcgtgtacgacacgtcgtaccatgactacctgctcttcgcgtgcgccgccagcagcgccgggtccgggtcccagctggaccgctcggtgccgtgcccgccgcgcccgccgccgccgcaccagctgaaccacccgtcggtggccgtgcgcgggctcaacggctcggtgaccgtgcgccggaccgtcaccaacgtcggcccgggcgcggcgcggtatgccgtcgccgtcgtcgagcccgcgggcgtgtccgtgacggtctcgccgagacggctccgcttcgcgcgggccggcgagaagagggcgttcaggataaagttggaggcggccagcagggggaggagcggcgcacgcgtggcgagagggcaggtcgtggccggctcgtacgcgtggagcgacggcggcgcccatgtcgttaggagccccattgttgttatcttcgactgatcatcgttcggtaagctagtggctagcctcgcgcggacagacaactctggaggaggataggtgtttagccataccttgttcgaagcaggggatgcaaggcaatgaaaaccttcggctatgtgtggaagaataatcatcacatcaagcagaaaaataaaatccagttgtcttatgtgacgttataaaccactaattgatgactagtcacttgcgcgcgccagcgcgcgcacgtaagcaacgtaatattaatagaaataatatt

SEQ ID NO: 32119 - DNA, 2566 bp, Zea Mays
cttcactcggtctacatagtgtacctgggcaagcacggcggcgcgaaggcggaggaagcggtccttgaggaccatcgcacgctgctgctctccgtcaagggcagtgaggaagaggcacgggcgtcgctgctgtacagctacaagcacaccctcaacggcttcgcggccatcctctcccaggaagaggccacgaaactgtcagagaggagcgaggtggtgtccgcgttccagagcgaggggaggtgggcgccgcacaccacgaggtcttggcggtttctgggcttcgaggaggggctcgaccgtcgcccccccgacgacggtggggatcagtggctgctgccgtcgtccctcgacaaggccagcgaggacatcatcgtcggcatcctcgactccgggatttggccggagtcgaggagcttcagcgaccaagggctcggcccggtgccggcgcgctggaaagggacgtgccaaggcggggattccttcccctcctcgtcctgcaacaggaagatcataggcgcgcgatactacctcaaggcctacgaggcgcactacaacggcggcctcaacgcgacgtacgcctaccgctcgccgcgggaccacgacgggcacggcacgcacacggcgtccacggccgcgggccgcgccgtggccggcgcgtccgcgctgggcgggttcgcgcgcgggtcggcctcgggcggggcgcccctggcccgcctggccgtctacaaggcgtgctggcccatcccgggccccgaccccaacgtcgagaacacgtgcttcgaggccgacatgctggccgccatggacgacgcggtcggcgacggcgtcgacgtcctcagcgtctccatcggctcctcgggcgccccgccgcggttcgcggacgacggcatcgcgctgggggcgctgcacgccgccgcgcgcggcgtggtcgtctcgtgcagcggcggcaactccgggcccaggcccgccaccgtgtccaacctcgcgccctggatgctcacggttgccgccagcagcatcgaccgcgccttccacgcgccggtcaggctgggcaacggtgtgacggtcatgggtcaaaccgtgacaccgtaccagctccccggcgacaagccctatcctttggtttatgcggcagacgcagttgttcctgggactcccgctaatgtttccaaccaatgcctgcccaactccctggccagcgacaaggtgcgaggcaagatcgtcgtgtgcttgcggggcgctgggctgcgggtggggaagggcctggaggtgaagcgcgcgggcggcgcggccattctgctcggcaacccagcggcctccggctccgaagtccccgtcgacgcgcacgtcctcccgggcaccgcggtcgccgcagccgacgccgacaccatcctccgctacatcaactccagctccagcccgaccgccgtgctggacccctccaggaccgtggtggacgtccggccgtcgccggtgatggcgcagttctcgtcgcgtggccccaacgtcctggagcccagcattctcaagccggacatcacggcgccggggctgaacatcctggcggcgtggagcggggcgtcgtcgccgacgaaactcgacggcgaccaccgcgtggtgcagtacaacatcatgtcggggacgtccatgtcgtgcccgcacgcctccgccgccgccgcgctcgtcaaggccgcgcaccccgactggagctccgccgcgatccgatcggccatcatgaccacggccacgaccagcgacgcggaaggcggcccactgatgaacggggacgggtcggtcgcggggcccatggactacggctcgggccacatccggcccaggcacgcgcttgaccctggcctcgtgtacgacacgtcgtaccatgactacctgctcttcgcgtgcgccgccagcagcgccgggtccgggtcccagctggaccgctcggtgccgtgcccgccgcgcccgccgccgccgcaccagctgaaccacccgtcggtggccgtgcgcgggctcaacggctcggtgaccgtgcgccggaccgtcaccaacgtcggcccgggcgcggcgcggtatgccgtcgccgtcgtcgagcccgcgggcgtgtccgtgacggtctcgccgagacggctccgcttcgcgcgggccggcgagaagagggcgttcaggataaagttggaggcggccagcagggggaggagcggcgcacgcgtggcgagagggcaggtcgtggccggctcgtacgcgtggagcgacggcggcgcccatgtcgttaggagccccattgttgttatcttcgactgatcatcgttcggtaagctagtggctagcctcgcgcggacagacaactctggaggaggataggtgtttagccataccttgttcgaagcaggggatgcaaggcaatgaaaaccttcggctatgtgtggaagaataatcatcacatcaagcagaaaaataaaatccagttgtcttatgtgacgttataaaccactaattgatgactagtcacttgcgcgcgccagcgcgcgcacgtaagcaacgtaatattaatagaaataatatt

SEQ ID NO: 32120 - DNA, 3288 bp, Zea Mays
ctcatcctcctccccgtcgcgtccagccaagaacagcgcccttccaccgcccgagtacgcggtgtagcgctcctacatccactagcccggaaagccgtcgggttgttagatcggattgatccaatatgggaacacggggacaatatatctccgattcaggtgcaagtactgcaagaaacagtggaagggggtggtgctacacgtttcaagcaacacaatgcatcgcttgggaggaatgtgcatggttgtcgtaatgtttcgctagacattgcctttactttcggcgtgagattgacaaggtcgcaggccgcatttgcaggattatttcacaaagttcaaggatgattggccaacatatgaacctaccatcatgtgcgactcatggacaggaccaacccaaaagtgagcgattaatttcatgttattttgcaatggtgttatgttcttccacaaatcaattgatgcaactggtaaatttcaagatgcgaactatttacacaaggtaatttcattaatcgttttatgtctgtatttgtatcttcgatgttgtttgtgaactataaaacaatgccatgtaatgtatttgaactgttaaatattgttattggacttttgttcaaattatgggacttcaatgtgatttatttgcaaaaaaacatatacctgagtttctgcatcagtgccgccagtttatctggtcaggagccgattaatcggtcttatcggttgactaatcggttttaaattgtttagaattcaaactaggttgactttaatttctattggttttcgtcgatttatcgtggtttacagattatcgatggacaccggtttgtgtgtcctcaatccggtttggtgaactctgatcctctaaagattttacagatttccgtagcagtacttgttgcttgaatccacattttcttcaaaggtacgtttagactgtgtcatttaaaaaattgttttgtcctgtttaacaatataaattgcaacatttataaagataaccttataacagaggaagagcaatggaaatcacatgggtcacgtctatctacaatctactagactactactgtacgcctgtatggctgtatcgtacaccctaggtgcgtgtgcgtacttgttgcagtaatacacaagtcaccactatatcactctctacaagcccactactgctcctgccactcctactatacagtatacactgcccagttgcgctagtgtagcgtaggaatactgtaggcgatgatcgacggtccactgtgcccagccctcgacaagtctcagtcgcttcatgcacgtcgcggtgccagtctcgttgctcctgctcccttatcctgcaaagctgaaagctgcaaggcctgcagatcacttccagtcttcaaaagtacagttcgcgaaagttgaaacgagcgagcgacgaaccgaaccaaccaaccggcggtggccacgtagccccccctgacacaaagacaaagctacctagaagctagcccgtggagcggctagactactagactatcatgtctcggtactgcgtcaacgagcagtcgagcacccggcctcatcctgcctcggcaggcagttggcacggcagcaccccagcaggcagcagcccctccaatttaaagcaagcaacgacgggcaaagagcagctcggcgggggctgctgcagcgccgcgcgtttgcgagtccgggacgacgacatggggaggggccgcagcgagataaagcggatcgagaacccgacgcagcggcagtccaccttctacaagcgcagggacgggctcttcaagaaggcaagggagctcgccgtcctgtgcgacgtcgacctgctgctgctcctcttctccggctccgggaagctgtaccactacctctcgcccaccgtgcccactgtcaaggacctggtcgagaggtacgaggccgcgacgcacagcaaggtctgggccgacgttcgccaggagcggcgcgcggagctggagaaggcggagcggatgtgcgagctcatggagaaggagctgcggttcatgacggtggacgacggggagcagtacacggtgccgtcgctggagctgctggagcacagcctggaggcggccgtgcacagggtgcgctccgagaaggaccgcaagatcggcggcgagatcgactgcctccagaacattatcagaggacgccacgaggagcgctacgggttgtgcgacaagcttgctcattctcaggcctggaacaacggcggggaaggtggagggtcgaccccaccaagcggcggcggcggcctggaactcaaactgggtttcaactgacgctggctggcttggaagctcgaggatggatcgaagactatgagctccttcattgtgccctgtcaggctacctacccctgcaccctgttggttatggtttaaaatggttattgaccaaagttgtcctgcatcaaacaaggctcagcttgatgttaatgtgctgagggatctaatgtattattagcgttatccagctcttgtttacgtgctccatctcaatccatgcacgttaggatggattgtctaatctagttcaaatttcgtatcaatctattccatcccatacaaattaatccatgtggattgggtggtattgagtcggtttaattctatagcaagtcaaaatccatcccaatccatcccaatacacaccaatacacatggaattgaaataaccgaaccaggcctaagatggatatctgaaccctaaaccctaaacacatgtattcatattaaaattaaggtgcatacatgaccttagcacatatattcaaactgtgttgtagtggataggatggaacggctccaggaataacgcaggcaagtaaatttcgccgtttgtgaatccagaacgattcggtaatgacacgctgaaaaccagattaaaccctgaacccaaatagaactaaaagcatgtgcgcctggcgctaggagctcagcaagaacgtagcaatatagagatcgataatcacgtctcaaagatcattactgaaaagatctcatcactgctccaaggattacgcaacgagaggcaagaaagaagggcgaatgacagcgacaaacgagaaagcaaaatcaaatgaaggaaacctaacatagcgtagacgaattgggtacgaaggaatccgccgccgccggcttagcttcacgtctcacaatggaaggcaccagccaccaggaccagccgtccaggtagcccctggccttttaccggcgggctgtgctgcgagcggagaggaaaccctaaggatctgtg

SEQ ID NO: 32121 - DNA, 3306 bp, Zea Mays
ctcctccccgtcgcgtccagccaagaacagcgcccttccaccgcccgagtacgcggtgtagcgctcctacatccactagcccggaaagccgtcgggttgttagatcggattgatccaatatgggaacacggggacaatatatctccgattcaggtgcaagtactgcaagaaacagtggaagggggtggtgctacacgtttcaagcaacacaatgcatcgcttgggaggaatgtgcatggttgtcgtaatgtttcgctagacattgcctttactttcggcgtgagattgacaaggtcgcaggccgcatttgcaggattatttcacaaagttcaaggatgattggccaacatatgaacctaccatcatgtgcgactcatggacaggaccaacccaaaagtgagcgattaatttcatgttattttgcaatggtgttatgttcttccacaaatcaattgatgcaactggtaaatttcaagatgcgaactatttacacaaggtaatttcattaatcgttttatgtctgtatttgtatcttcgatgttgtttgtgaactataaaacaatgccatgtaatgtatttgaactgttaaatattgttattggacttttgttcaaattatgggacttcaatgtgatttatttgcaaaaaaacatatacctgagtttctgcatcagtgccgccagtttatctggtcaggagccgattaatcggtcttatcggttgactaatcggttttaaattgtttagaattcaaactaggttgactttaatttctattggttttcgtcgatttatcgtggtttacagattatcgatggacaccggtttgtgtgtcctcaatccggtttggtgaactctgatcctctaaagattttacagatttccgtagcagtacttgttgcttgaatccacattttcttcaaaggtacgtttagactgtgtcatttaaaaaattgttttgtcctgtttaacaatataaattgcaacatttataaagataaccttataacagaggaagagcaatggaaatcacatgggtcacgtctatctacaatctactagactactactgtacgcctgtatggctgtatcgtacaccctaggtgcgtgtgcgtacttgttgcagtaatacacaagtcaccactatatcactctctacaagcccactactgctcctgccactcctactatacagtatacactgcccagttgcgctagtgtagcgtaggaatactgtaggcgatgatcgacggtccactgtgcccagccctcgacaagtctcagtcgcttcatgcacgtcgcggtgccagtctcgttgctcctgctcccttatcctgcaaagctgaaagctgcaaggcctgcagatcacttccagtcttcaaaagtacagttcgcgaaagttgaaacgagcgagcgacgaaccgaaccaaccaaccggcggtggccacgtagccccccctgacacaaagacaaagctacctagaagctagcccgtggagcggctagactactagactatcatgtctcggtactgcgtcaacgagcagtcgagcacccggcctcatcctgcctcggcaggcagttggcacggcagcaccccagcaggcagcagcccctccaatttaaagcaagcaacgacgggcaaagagcagctcggcgggggctgctgcagcgccgcgcgtttgcgagtccgggacgacgacatggggaggggccgcagcgagataaagcggatcgagaacccgacgcagcggcagtccaccttctacaagcgcagggacgggctcttcaagaaggcaagggagctcgccgtcctgtgcgacgtcgacctgctgctgctcctcttctccggctccgggaagctgtaccactacctctcgcccaccgtgcccactgtcaaggacctggtcgagaggtacgaggccgcgacgcacagcaaggtctgggccgacgttcgccaggagcggcgcgcggagctggagaaggcggagcggatgtgcgagctcatggagaaggagctgcggttcatgacggtggacgacggggagcagtacacggtgccgtcgctggagctgctggagcacagcctggaggcggccgtgcacagggtgcgctccgagaaggaccgcaagatcggcggcgagatcgactgcctccagaacattatcagaggacgccacgaggagcgctacgggttgtgcgacaagaacttcttgcaaatttggccgcagcttgctcattctcaggcctggaacaacggcggggaaggtggagggtcgaccccaccaagcggcggcggcggcctggaactcaaactgggtttcaactgacgctggctggcttggaagctcgaggatggatcgaagactatgagctccttcattgtgccctgtcaggctacctacccctgcaccctgttggttatggtttaaaatggttattgaccaaagttgtcctgcatcaaacaaggctcagcttgatgttaatgtgctgagggatctaatgtattattagcgttatccagctcttgtttacgtgctccatctcaatccatgcacgttaggatggattgtctaatctagttcaaatttcgtatcaatctattccatcccatacaaattaatccatgtggattgggtggtattgagtcggtttaattctatagcaagtcaaaatccatcccaatccatcccaatacacaccaatacacatggaattgaaataaccgaaccaggcctaagatggatatctgaaccctaaaccctaaacacatgtattcatattaaaattaaggtgcatacatgaccttagcacatatattcaaactgtgttgtagtggataggatggaacggctccaggaataacgcaggcaagtaaatttcgccgtttgtgaatccagaacgattcggtaatgacacgctgaaaaccagattaaaccctgaacccaaatagaactaaaagcatgtgcgcctggcgctaggagctcagcaagaacgtagcaatatagagatcgataatcacgtctcaaagatcattactgaaaagatctcatcactgctccaaggattacgcaacgagaggcaagaaagaagggcgaatgacagcgacaaacgagaaagcaaaatcaaatgaaggaaacctaacatagcgtagacgaattgggtacgaaggaatccgccgccgccggcttagcttcacgtctcacaatggaaggcaccagccaccaggaccagccgtccaggtagcccctggccttttaccggcgggctgtgctgcgagcggagaggaaaccctaaggatctgtg

SEQ ID NO: 32122 - DNA, 385 bp, Zea Mays
ggcaaatgctgttatctgattcaacagatgtagaccactttatactttttgcctttcaagtaacactacgacgagcaaaagcctggtgctgctaggtaaaaactggattgattggctgtacaagtatacctcgaaccaatgatgtacaaaacctttccttgcagtactaccccacacctcaattctgtttcctatttatgctacttttgctaccacgctagtttaatcctatcaaaccatgctaaacctgttacagctactcctacctctcccaactctgcaccacgcaccgttggcaactccgttgccacaaattcacacgcacacaacttggtaagaagtcagtccatttatagctgagactcagcagatgcccaactccaat

SEQ ID NO: 32123 - DNA, 2800 bp, Zea Mays
ggccaacactggcatgggaaattctttgtggtacacaaaaacctgcggtgaagtaagaagaaaagggcgagttaaaacattttatgcaattccagaatttgtcataaaaaaggagaagaatcggcattggacatgtataaaaaaaatagaggtatctattgacagtttgacaaagcacatgctgatcagaacctactcactctacacaatgaccaatcacctacaacaagatattcatttgcacctgtctccatcataatatcatttccttcttttatactccatccagtcttttctatttgtcgcgttttagtacaaaaatgaactagcggacgacaaatattcgagaacggagatagtctaaagcagaaacttaggggatgtttggtttgaagaatcattcagtccaagatgaggtgatacatcatgaattcattcctcaaatttgattggatgaccacattcttcatgttagtactaactatgaggaatgaggtggtgatggatcaattcattccatttcataaaccaaacaaaaaagtggagagtgagaagatgatggactaacttattttctcaaaccaaacacctcattagagaactatgaaagccactccagtctttctttatatggcatatacacatggcatagcaaatcaagactaaatcatgagcatcctgaactatactatatccatcaataataaacatcagcttccttgcaacaaatgtaatgttcacgcgcgtaccctatgattttgcataaaggtaagtaaagtactggccaatctaactacaagtcagatgttcgacaactttgtggaagcttagccatggaatgcatacctcatttgtttcagagccagtagcaatgtaaccgtcagatatggaaaggccaacgaagttctggaagatgtttaccaaataagtaaatcagccactcaatgaaaacatgtgcctttcagcgcagaaagcaacagctgaagggtaaccactgtatacacgtgagactaattatggaaaagacccagtgttgatggctcccacatgatggaaaatgaaggaataaccaaggcaactattacccgtgcattttttcttagaagctacatcgaacccaggacctttggctccgtggaaagacttctcaccactgcccaggcctgttcttcgtgagagttaattatgaactcaactaaaaaaagagtggacctagttgaacccagaagctttggctcagtggaaaggcttctcacaattgtcctaaacctatcttttgtgagagttaattatgaacttttttccagtggaaaggtttctcacaactgtctcaaacatgtcctttgtgagagtaaattatgaactcaactacaaaaacccagccatgtagtttgtgggagttaattatgaactaaactgataaaagggtttatgaacacaacttctgtgagagataattatgaactcaactaaaaaaagccccagccctgtcgtttgtgggagttaattatgaactaaactgataaaagggtttatgaactcacctaaaaaaagccctagccgtgtccttcgtgagagttaattatgaactcaactaataaaagggcagcctcagtgccagaggctgccacataaaatgaaggacagactcagtgtcggaggctcccacataaaacgagacaagccttcccccgcaaatgctttgaatttgcgatgtggttgctcagtgagacaactctcaccactgcaccaagcctacccttcaactatgaacaactgagacactaaaatatttcatgaaatcaattgactgaacgaactacaaaccatgatgtaaatatgctataggaaaagcaggtaactaaatcgcaggaaacacaccaagtgaaccaatttatggttgtcaagcaactaaatatctaaaaaataagtggtgcagtgggatttaaaacacttcctttgcacactgatgttgatgagaaaaaaaggaaaagaacatctggatcaccaatgttgatgacttgttcataacctcacaaatcaatcagatacagttgtaaaaggcgctatagttgtataaaggatagcaccgataattgtcacagtaggataatccatacatatatcgcctgattggatgcctgtatctggacgcgcaggctcggatggccctggctgacctgatacggtatttttctgcgtatgagtggatgcaaccaaataactataaaatggtttattttgcatccgctcatgcagcctgcgtctcccttgtacaggcaaccaaacaggagctcagacagagtcaacgcatacggtggttcaagatgagacggtgcgggtaaccaaacatacggatacagtattggagtagagtgtgtttggttctccagccagacttcatttccttgctcagacataaatcaagatagaactagcgtttgtttccttggtgagttcgctttggggcttgtgctggcaagatttttgcttgctggtggaggagagcaagattggctcgcccatgctggcaaagctcaccttgctggacgagacaaggtgagcaaagcaagtgaagtaaccaaccgtaccctagtgtttcattgcaacagtataacttccaaaattaaactagcatattcttttcatcagacattctactagttacacttacaaaagataaaaccagacattaatcacttgtagacgaatattatgaaaagagaacaagtacatgtggaagttttatccaacctttgtatttgtatgccccttaaatgtttgaactggactgtcaatt

SEQ ID NO: 32124 - DNA, 1144 bp, Zea Mays
cgtaacctaagtgccgcttcacgttcttccaggctattccttgactgattaaggaattcactctgcagcacctcactgtcaaacaaaaagaaacaaaaaagaaaacaggtgggaagttcaatgtggcacaacctcattgaataacacaaagttaacatgcagatacatatctttacttatttatttatttttttgaaataattacatcaagggtaagtatgtgactaactagtaattaaggtagacagaatcaaatgaagaaaaacaatgttaacctcaactaagatcgagcaatggtctattgtctaaacagaaatctctagccaaagataaagatccactgagaacgaataaaacgaaaaggtgtgctggcactttcatcagttgcaatacagccacatttttctattgaagaaatgaatatttgaaatagacatgaaagacgaatagtatcaaaaccaaaatagtataggataaatggtatgtctaactttcacaaataggcagaactgtcctgcaagtgcgtggtaggatgtgttagttgttactccctttgtcccaaaatataaggtgtaaccattttttattcttgtttcataatataaggtgtgttatctcttgatgcatgtacatatactagtgttgatagagagaattaaacacatttcttggtacttgaactagagatggttacgccttatatactgggacggagagagtacaacttttagattgtttgctgcacttttccacataaaattaaggctagaacaagaatgtcaaatctagaatatgtggtgcattgttaacaaattccgatgtttcaaattgcttattttaattctagtgtttgttactgcctcatgaatattggttttcctatctgcaagattcagccaattttccaggctagcttgatcttcaaacaactgcatgctcgtgtctgtcaatccacgttctgtcttatggagtgtacgaccacagcacatatactaacaaacaaatcagttcccagctttgaggagaagcattactaatatatgcataaaggacttcatgctacctaatgtgaaacaagaaaccgctcacgcaacctttctcctggggtaacacactcaaaaatagtgcacggcacacgacgcac

SEQ ID NO: 32125 - DNA, 86 bp, Zea Mays
gacaacaaaccaaacctgaccgcggagatgaaacgacgacactgtcttgactcgacgcccacaggccacacccactggcagtggca

SEQ ID NO: 32126 - DNA, 5266 bp, Zea Mays
acgatcgagctgggaccggtagctcgcccacaagcactactgctccggcggcggccatcgccttgtcatcaggctccagctagcttgcaacagagggggcgagctaggaggaggagatgagtgccccagcgggcagcggcggcggcggggagcgggcgatgaacatccgcggcatattccggttcgcggaccgggtggacgtcctgctgatggccctgggcacgctgggcgccattggcgacggctgctccaccaacctgctgctcatcttcgccagcgacgtgatgaacgcgctcgggtacgggggtgcccaggccggcggcggcgccaagagcgcgcagttcatgcacgaggtggagaagtcgtgcctgaacttcgtctacctggggctcgtggtgctggcggtggcgttcatggaagggtactgctggagccggacgagcgagcggcaggtgctgcggatccggtacctgtacctgcaggccatcctgcggcaggaagcgggcttcttcgactcgcaggaggccaccacgtcggagatcataaacagcatctccaaggacgcctcccacatccaggaggtcctcagcgagaaggtccctctgttcctgatgcactctacggtcttcgtctccggcctggccttcgccacctacttctgctggaggctggccctggtttcgttccctctcgtcctgctgctcataatcccgggactcatctacggcaagtacctcctctacctgtcccgccggtcgcgccacgagtacgccaaggcgaactccctggtcgaccaggctctgggctccatcaagaccgtctactccttcacggccgagaagaggatcatccagaggtacacggcgatcctcgacaagacgatcaagctggggatcaagcagggcatcgccaagggtctcgctgtggggttcaccggcctttctttcgccatttgggccttccttgcgtggtatggtgggaggctggtggtgttccatcatgtgaccggtggaaggatatatgctgctgggatttccttcgtcttgggtggcctatcccttggaatggcactgcctgagctgaaacatttcgctgaggcgtctgttgctgccacaagaatccttgatcggataaaccgtgtcccccagattgatgctgaggacccaaaaggccttgtgctggaccaaatccggggagagctcgaatttgagtctgtccgtttcgagtacccatcaagaccaaacatgcccgtcctcaaaaacttcagcctccagattcccgctgggcagactattgctttggttgggtccagtggcagcggcaagtcaacagcgatagctttagtgcagcgcttctacgatgccagcgaagggactgtaaaagttgatggttttgacatcaaagaactccagctcaaatggatcaggagcaagatggggctagtcagccaagaccatgcgttgtttggcacttcaataaaagagaacatcttgtttggcaaaccagatgcaaccatggacgaggtctatgcggcagctatgacagcaaacgctcacaacttcataagggggcttccagaggaatatgagacaaagattggtgagcgtggagcactgttatcaggtggccagaagcagcgtattgccattgcgagggcggtaattaagaacactgctatactcttgctcgatgaagccacaagtgcacttgattcagaatcagagaagttggtacagcatgcacttgatcaagcatctatgggacgaacaacactggtaaattgccactgcttccgctcttcatactttatgacccttatatcagaacttgttgaattaattatcactgcatcttttttcaagaaaaaaacatttggcattgaatctctgattattcattaacaatggacaggtagtagctcataagctctcaaccgtgaagaacgctgatcagatcgcggtagttgatgggggtacaatagctgaaattggtacacatgatgaactgatcagcaagggtggcccatactcgagacttgtgaaattgcagaagatggtaagctacatcgatcaagaaaatgatcagtttagggcttcctcagtggccaggaccagtaccagccgacacagcatgtccagagcaagtccaatgccactaacaccagctgccttaaaggaaaatgattctgatgttcatccacctgcaccatctttctccaggcttcttgcaatgaacaaactaactcaagcggtgcattgtgctctcggctaagcaatgaggcttctcttgtcaaaacccttgttgcagacagaatatccttactgcttcaaacagcttctggaattataattgcagtgacaatgggcctgatggtagcttggaaacttgctcttgtcatgatagctgtacagccatctacaatgatgtgttattatgcaaaaaaaatggttctctcaaatgtgtcaagggacttggcaaaggctcagcatcaaagcacccagattgccatagaagctgtttacaaccacaggatggtaacctcctttggatgttcatcaaaggttcttcagctattcgagcatgcgcaagaggaacccttgaaaaaagcaaggaagaaatcatgggtagcagggatcaccacagggttgtcaccttgcctctcgttcttgtcatgggcactggacttctggtatggtgggaagctagcacagtctggggagatatcggcgggtgatgttttcaaaaccttcttcgtgctggtgagcacaggaaagcttattgctgatgctggtagcatgacttctgacctggcaaagggatcaaatgcagttgcttcagtatttgaggtgctagataggaaatccatctctccaaaaaattcacaggtagagaaggaggatcagaagaagaaaatagaaggtaggatagaattcaagaaggtagattttgcatatccaacaagaccagagtgccttatcctacaggattttagcttggacgtgaaagcaggaacaagtgttggcctggttggcagaagcggttgtggtaaatcaactatcataggtttgatccagaggttctatgatgttgataggggggctgtaagaattgatggtatggatgtgagggagatgaatattctctggtttcgaggatttacagctcttgttagtcaggagcctgcaatgttttcaggcagtgtcagggacaacattgcttttggtaaaccagaagctgatgaagatgagattgtggaagctgcgaaagctgcaaacgcacatgagttcatctcaactttgaaggatggatacgatactgattgtggagagcatggtatacagctctcaggggggcagaagcaaagaatcgcaattgcaagggcaataatccggaatcccacaatactactacttgatgaagcaacaagtgcgcttgatgcacagtcagagcaagtggtgcaggaagctcttgatcgaataatgtcagggaggaccacaattgtggtggcacatcggctaaacacaatcaagaatgtagactcgattgcttttctgggagagggtaaagtggtggagcgtggctcttacccgcagctcatgaacaagaagggggcattctataaccttgcaactcttcagaagtaactggttgtatgacatgtaaactattatacctaatgaaactccggcagtaattgatatgatagctaggttactatagcacagaagcagcactcctaagctagttttcaagcaactctttcaataatcagttaatatatatctgacacaatcctcgtccttcaagtttctggtgggctaacacaggcaaaaaatatatatataaaaagaaatgacaatatggcctagctaaaagaagcatgataagtaaaaacaagcattatgatgcatgaatcatcatgtcttgtcctctgataacatatgtgagcttcaacagaatgaaaaagaatgttcatgaaaggacttaccctgaagtgaccatagcctggaaaaatcatgaacatgatcaaggagatactggaaaaatgtgacctgccatgatcatgctgttattcgtgagtaaatactcagtaaagagcatggacatgatcaaggagatgatgtttggctgttacctgccataaggcatatttgtctatctgacggatatcataaaaagaaaaaaaatgctcaattgtataacccatatgaattgacctaactatttcctcaacgctagactatctccattcctatacaaaagagtgatccactatacgaacctgagagtgactacgcataagactattagctgtctctgttaatttatcgccactatgccctcccttcctacaaggaacgttacgataggacatgggagttattctaaattctccgtggcatgggaccaaactgccttctcaagtctcaacagcatctacaccgagaccatgaaaagcattctcccatagtatttgaaaataaaggaattcacccttccccctaaggccatgttcgtttgatcccaaaaccatagggattgaggtggattgaaagggattgaagaggattttgacttgtaggggatttgatcccctcaatccctatggatcagcacaaaacgaacagagcctaacagttgtcctccacatactttggctatccagtggtcagagacacgcgttaccagccctagtaatgccagggacaatgcctacctgccgttgccagcccgttgccctttttagttctgaattttctttttacatgaaacatgcctgaatctgaatcccatctgctagaagaagaaaatcgcagaacccactgacatgcacatgcatataatcttctgctcatccatcagtagcaacccgcaagggaacgggatggatgccagggtttcggccgggtcaacgatcgcagattcgcagttccccgcaaagctcacgggcgccaggcctgcgaatgcgaacaccgatacggaggggaaagcggcgcaggaagagggatcggaggactacttacgaattccgattcgcgcgcgaagtcgacaaggagaaccttggagaatcgaggcctcctccgttctcccatgagccgtttgtctagcatatctcttatctcctcccagatgaaatttcaaacttatccctataaactttcatctacagtttcatatctcttatttttcacgttccaccgggatggagggaaggaagtagaatatctccatcagctcaaacaatcttacgggtggagggaaggaa

SEQ ID NO: 32127 - DNA, 6683 bp, Zea Mays
acgatcgagctgggaccggtagctcgcccacaagcactactgctccggcggcggccatcgccttgtcatcaggctccagctagcttgcaacagagggggcgagctaggaggaggagatgagtgccccagcgggcagcggcggcggcggggagcgggcgatgaacatccgcggcatattccggttcgcggaccgggtggacgtcctgctgatggccctgggcacgctgggcgccattggcgacggctgctccaccaacctgctgctcatcttcgccagcgacgtgatgaacgcgctcgggtacgggggtgcccaggccggcggcggcgccaagagcgcgcagttcatgcacgaggtggagaagtcgtgcctgaacttcgtctacctggggctcgtggtgctggcggtggcgttcatggaagggtactgctggagccggacgagcgagcggcaggtgctgcggatccggtacctgtacctgcaggccatcctgcggcaggaagcgggcttcttcgactcgcaggaggccaccacgtcggagatcataaacagcatctccaaggacgcctcccacatccaggaggtcctcagcgagaaggtaggtacacaaccaaacaaacccctccatcctcccattcatcaacaaaagacccccaatcttcagtcagaacaaccccaaaaacaaaacaaaacaaaacaaaatgacgagacacccttcagaggcttcagtcatgtgaatgtgaatgtgactagccaaaccatccggtccatctgcagatgacttgacccagcctccagcaacaatttcgttttttagacggagcagtagagtacctgttatagaccgtcagcgaatttcctctttttttttggaactaacctgcgtgggcacgaccgcacgaggctagaagccagcgacctacagcagtagagcatcgctgaatcaggtggcaaatcaaaggatttgacctggcagtctaggctgccgtcttattttatccgtcaaacattttctttttttacagagaaaatgtctctctgtgctgtcatccttcagacttcagaggattgcaagtgtgtgtgtgtgccatcttattaccctgatggctcgtcatacgatcaaaccagtcttccacgtatcgttctccatttcccactggggccggactttatttgaacaatcccgtactcactttaatcaatgtgtattgaggtagattagagtataacttaaactaatttataccctagtctatttcaatacgtatagattgaggtaaataccaaacaatgtctgggagggatttaaaaacacccaacctgaaaataacataaatccgcaaaaacaatgacaaactacttgagggcttattcatttcaccgttaatccacgtggattggatgtattgagtcggtttaaattcgtagcaagttaaaatttattccaatccatttcaatatattctaatccacgtggaattgaaataaccgaacaagaatgatctatctagatgtacacccacactctttcctggcttgaaaaattaaacagactacaataactcaataagattacccagcatccagaaaaacgaatgtgtaaaaacaaaagagcgagacagagctgaggcttgggtcgtttggattcgcatgtatctacctcaatccctatgtgttagtggtttggtgtatattttaaactaaattctacacaccaaaccacttcatcctgcttagattaagttgaatactatatgcagccaaacaagacctgaatgtaatccagtgttggatcatcgttcgaggagaaataacagcatgattgattggcatgaaatctggaacaggtccctctgttcctgatgcactctacggtcttcgtctccggcctggccttcgccacctacttctgctggaggctggccctggtttcgttccctctcgtcctgctgctcataatcccgggactcatctacggcaagtacctcctctacctgtcccgccggtcgcgccacgagtacgccaaggcgaactccctggtcgaccaggctctgggctccatcaagaccgtctactccttcacggccgagaagaggatcatccagaggtacacggcgatcctcgacaagacgatcaagctggggatcaagcagggcatcgccaagggtctcgctgtggggttcaccggcctttctttcgccatttgggccttccttgcgtggtatggtgggaggctggtggtgttccatcatgtgaccggtggaaggatatatgctgctgggatttccttcgtcttgggtggcctatcccttggaatggcactgcctgagctgaaacatttcgctgaggcgtctgttgctgccacaagaatccttgatcggataaaccgtgtcccccagattgatgctgaggacccaaaaggccttgtgctggaccaaatccggggagagctcgaatttgagtctgtccgtttcgagtacccatcaagaccaaacatgcccgtcctcaaaaacttcagcctccagattcccgctgggcagactattgctttggttgggtccagtggcagcggcaagtcaacagcgatagctttagtgcagcgcttctacgatgccagcgaagggactgtaaaagttgatggttttgacatcaaagaactccagctcaaatggatcaggagcaagatggggctagtcagccaagaccatgcgttgtttggcacttcaataaaagagaacatcttgtttggcaaaccagatgcaaccatggacgaggtctatgcggcagctatgacagcaaacgctcacaacttcataagggggcttccagaggaatatgagacaaagattggtgagcgtggagcactgttatcaggtggccagaagcagcgtattgccattgcgagggcggtaattaagaacactgctatactcttgctcgatgaagccacaagtgcacttgattcagaatcagagaagttggtacagcatgcacttgatcaagcatctatgggacgaacaacactggtagtagctcataagctctcaaccgtgaagaacgctgatcagatcgcggtagttgatgggggtacaatagctgaaattggtacacatgatgaactgatcagcaagggtggcccatactcgagacttgtgaaattgcagaagatggtaagctacatcgatcaagaaaatgatcagtttagggcttcctcagtggccaggaccagtaccagccgacacagcatgtccagagcaagtccaatgccactaacaccagctgccttaaaggaaaatgattctgatgttcatccacctgcaccatctttctccaggcttcttgcaatgaacgcacctgagtggaggcaggcagtcgtaggcagtttatccgcattggtatatggttccttgcagcctatctatgccataaccatcggaggaatgattgctgcattctttgttcaggaccaaaatgagatgaatgcaattatcagacgctatgccttgatcttctgctcactgtccttggtatccattgttgttaatctattgcagcactacaattttgcatacatgggggagcatcttgttaggcgcatccgggtccaagtacttgagaagatattaacttttgaggcagcatggtttgatgaagaaactaactcaagcggtgcattgtgctctcggctaagcaatgaggcttctcttgtcaaaacccttgttgcagacagaatatccttactgcttcaaacagcttctggaattataattgcagtgacaatgggcctgatggtagcttggaaacttgctcttgtcatgatagctgtacagccatctacaatgatgtgttattatgcaaaaaaaatggttctctcaaatgtgtcaagggacttggcaaaggctcagcatcaaagcacccagattgccatagaagctgtttacaaccacaggatggtaacctcctttggatgttcatcaaaggttcttcagctattcgagcatgcgcaagaggaacccttgaaaaaagcaaggaagaaatcatgggtagcagggatcaccacagggttgtcaccttgcctctcgttcttgtcatgggcactggacttctggtatggtgggaagctagcacagtctggggagatatcggcgggtgatgttttcaaaaccttcttcgtgctggtgagcacaggaaagcttattgctgatgctggtagcatgacttctgacctggcaaagggatcaaatgcagttgcttcagtatttgaggtgctagataggaaatccatctctccaaaaaattcacaggtagagaaggaggatcagaagaagaaaatagaaggtaggatagaattcaagaaggtagattttgcatatccaacaagaccagagtgccttatcctacaggattttagcttggacgtgaaagcaggaacaagtgttggcctggttggcagaagcggttgtggtaaatcaactatcataggtttgatccagaggttctatgatgttgataggggggctgtaagaattgatggtatggatgtgagggagatgaatattctctggtttcgaggatttacagctcttgttagtcaggagcctgcaatgttttcaggcagtgtcagggacaacattgcttttggtaaaccagaagctgatgaagatgagattgtggaagctgcgaaagctgcaaacgcacatgagttcatctcaactttgaaggatggatacgatactgattgtggagagcatggtatacagctctcaggggggcagaagcaaagaatcgcaattgcaagggcaataatccggaatcccacaatactactacttgatgaagcaacaagtgcgcttgatgcacagtcagagcaagtggtgcaggaagctcttgatcgaataatgtcagggaggaccacaattgtggtggcacatcggctaaacacaatcaagaatgtagactcgattgcttttctgggagagggtaaagtggtggagcgtggctcttacccgcagctcatgaacaagaagggggcattctataaccttgcaactcttcagaagtaactggttgtatgacatgtaaactattatacctaatgaaactccggcagtaattgatatgatagctaggttactatagcacagaagcagcactcctaagctagttttcaagcaactctttcaataatcagttaatatatatctgacacaatcctcgtccttcaagtttctggtgggctaacacaggcaaaaaatatatatataaaaagaaatgacaatatggcctagctaaaagaagcatgataagtaaaaacaagcattatgatgcatgaatcatcatgtcttgtcctctgataacatatgtgagcttcaacagaatgaaaaagaatgttcatgaaaggacttaccctgaagtgaccatagcctggaaaaatcatgaacatgatcaaggagatactggaaaaatgtgacctgccatgatcatgctgttattcgtgagtaaatactcagtaaagagcatggacatgatcaaggagatgatgtttggctgttacctgccataaggcatatttgtctatctgacggatatcataaaaagaaaaaaaatgctcaattgtataacccatatgaattgacctaactatttcctcaacgctagactatctccattcctatacaaaagagtgatccactatacgaacctgagagtgactacgcataagactattagctgtctctgttaatttatcgccactatgccctcccttcctacaaggaacgttacgataggacatgggagttattctaaattctccgtggcatgggaccaaactgccttctcaagtctcaacagcatctacaccgagaccatgaaaagcattctcccatagtatttgaaaataaaggaattcacccttccccctaaggccatgttcgtttgatcccaaaaccatagggattgaggtggattgaaagggattgaagaggattttgacttgtaggggatttgatcccctcaatccctatggatcagcacaaaacgaacagagcctaacagttgtcctccacatactttggctatccagtggtcagagacacgcgttaccagccctagtaatgccagggacaatgcctacctgccgttgccagcccgttgccctttttagttctgaattttctttttacatgaaacatgcctgaatctgaatcccatctgctagaagaagaaaatcgcagaacccactgacatgcacatgcatataatcttctgctcatccatcagtagcaacccgcaagggaacgggatggatgccagggtttcggccgggtcaacgatcgcagattcgcagttccccgcaaagctcacgggcgccaggcctgcgaatgcgaacaccgatacggaggggaaagcggcgcaggaagagggatcggaggactacttacgaattccgattcgcgcgcgaagtcgacaaggagaaccttggagaatcgaggcctcctccgttctcccatgagccgtttgtctagcatatctcttatctcctcccagatgaaatttcaaacttatccctataaactttcatctacagtttcatatctcttatttttcacgttccaccgggatggagggaaggaagtagaatatctccatcagctcaaacaatcttacgggtggagggaaggaa

SEQ ID NO: 32128 - DNA, 454 bp, Zea Mays
gttttccttgccgccagccagcccattaaccctcgttcctgtcgcgcagccacgacctccacttccacatctcccccggcgtcggcgcggtcagttgaaccatggcggactccaaggccacctcggcggtcaccctccgcacccgcaagttcatgaccaaccgcctcctggcccgcaagcaattcgtgcttgaggtgatccaccccggccgcgccaacgtctccaaggcggagttgaaggagaggcttgccaaggcgtacgaggtgaaggaccccaacaccatctttgtcttcaagttccgcacccacttcggaggaggaaagtccactggtttcggcctcatctacgacaacctcgaggctgccaagaagttcgagccgaaataccgcctcatcaggtgctgctgcctcctctagatgatgacccaattacttccacaacatcatcatcttca

SEQ ID NO: 32129 - DNA, 457 bp, Zea Mays
tttccttgccgccagccagcccattaaccctcgttcctgtcgcgcagccacgacctccacttccacatctcccccggcgtcggcgcggtcagttgaaccatggcggactccaaggccacctcggcggtcaccctccgcacccgcaagttcatgaccaaccgcctcctggcccgcaagcaattcgtgcttgaggtgatccaccccggccgcgccaacgtctccaaggcggagttgaaggagaggcttgccaaggcgtacgaggtgaaggaccccaacaccatctttgtcttcaagttccgcacccacttcggaggaggaaagtccactggtttcggcctcatctacgacaacctcgaggctgccaagaagttcgagccgaaataccgcctcatcaggtaaaacaaatcagaggctagaggagcaggcgagcagacatcggcatatacctgagcctgag

SEQ ID NO: 32130 - DNA, 435 bp, Zea Mays
tttccttgccgccagccagcccattaaccctcgttcctgtcgcgcagccacgacctccacttccacatctcccccggcgtcggcgcggtcagttgaaccatggcggactccaaggccacctcggcggtcaccctccgcacccgcaagttcatgaccaaccgcctcctggcccgcaagcaattcgtgcttgaggtgatccaccccggccgcgccaacgtctccaaggcggagttgaaggagaggcttgccaaggcgtacgaggtgaaggaccccaacaccatctttgtcttcaagttccgcacccacttcggaggaggaaagtccactggtttcggcctcatctacgacaacctcgaggctgccaagaagttcgagccgaaataccgcctcatcagggttacccattattcttcttctgaaggaaagagcatcaaa

SEQ ID NO: 32131 - DNA, 537 bp, Zea Mays
tttccttgccgccagccagcccattaaccctcgttcctgtcgcgcagccacgacctccacttccacatctcccccggcgtcggcgcggtcagttgaaccatggcggactccaaggccacctcggcggtcaccctccgcacccgcaagttcatgaccaaccgcctcctggcccgcaagcaattcgtgcttgaggtgatccaccccggccgcgccaacgtctccaaggcggagttgaaggagaggcttgccaaggcgtacgaggtgaaggaccccaacaccatctttgtcttcaagttccgcacccacttcggaggaggaaagtccactggtttcggcctcatctacgacaacctcgaggctgccaagaagttcgagccgaaataccgcctcatcaggaatggtcttgctactaaggttgagaagtcccgcaagcaaatgaaggagcggaagaacagggccaagaagatccgtggtgtcaagaagaccaaagctggtgacgccaagaagaagtaaacagtgaagtttgaaataagagat

SEQ ID NO: 32132 - DNA, 524 bp, Zea Mays
cagacccactcatatgggatcctctgcatacagaaagatccggctcagaggatgtctgcttcagaactcttgaatcacccttttttgaagaagttcgaggataaggacttaaacctggggattcttgtggagaacctggaacctccaatgaatatacccgaatagcctgtcgtttttagtgatgaagcctttgttgtgccttcagggtttggcctcgaagcctcttggcatctgctcctcaactgcagcctccctacctgaatatgctataacatcattgtatgattcaagccccttatctgagcataagagtagagggaactatgctgcattccgtgtatggtcaccttattgtagctattgttgcgacgggccttgtgattttgagtcttgttttaacttttgcagtcttatcggctgtggattcaaaatgaacgaactgaatattcaaaacatgtttgccaacacgcttcaaggacgctatttcacccccaaaatgataaaagaaagcgaagtcgcgcatt

SEQ ID NO: 32133 - DNA, 532 bp, Zea Mays
cttttgtttctccacgtgcaagttgagcttgaagcatacagaaagatccggctcagaggatgtctgcttcagaactcttgaatcacccttttttgaagaagttcgaggataaggacttaaacctggggattcttgtggagaacctggaacctccaatgaatatacccgaatagcctgtcgtttttagtgatgaagcctttgttgtgccttcagggtttggcctcgaagcctcttggcatctgctcctcaactgcagcctccctacctgaatatgctataacatcattgtatgattcaagccccttatctgagcataagagtagagggaactatgctgcattccgtgtatggtcaccttattgtagctattgttgcgacgggccttgtgattttgagtcttgttttaacttttgcagtcttatcggctgtggattcaaaatgaacgaactgaatattcaaaacatgtttgccaacacgcttcaaggacgctatttcacccccaaaatgataaaagaaagcgaagtcgcgcatt

SEQ ID NO: 32134 - DNA, 529 bp, Zea Mays
tggccactgggcatcgtaactacgtaaaaaacatacagaaagatccggctcagaggatgtctgcttcagaactcttgaatcacccttttttgaagaagttcgaggataaggacttaaacctggggattcttgtggagaacctggaacctccaatgaatatacccgaatagcctgtcgtttttagtgatgaagcctttgttgtgccttcagggtttggcctcgaagcctcttggcatctgctcctcaactgcagcctccctacctgaatatgctataacatcattgtatgattcaagccccttatctgagcataagagtagagggaactatgctgcattccgtgtatggtcaccttattgtagctattgttgcgacgggccttgtgattttgagtcttgttttaacttttgcagtcttatcggctgtggattcaaaatgaacgaactgaatattcaaaacatgtttgccaacacgcttcaaggacgctatttcacccccaaaatgataaaagaaagcgaagtcgcgcatt

SEQ ID NO: 32135 - DNA, 415 bp, Zea Mays
aggagctggtggaggagctcatgattctggatcctgctcgaaatctttgatcaagatttgttagctgccgtggcaaaagtagagagtgtaatatttgcccgcaatattttgcttctgccttcaacttggggactacttggctgggagagtgagtgggggaaggacaaaggaaattgcctctcgttcaagtttttcggtaaggagaggtcgtgtcgtgtcccggtttggccaaccagtgcaacggccgagccagccaatttccgtggtttgttgagctccattttggctactgtcagattagtagctcttcgccatcaatatattactactgttttgtttaaggccagtttatgcctttttgttctccatttttttcccttgtttatcttttacattttactcctatgttcgtcgt

SEQ ID NO: 32136 - DNA, 3331 bp, Zea Mays
gaaagagacgagagcgcccgaaccccacttggggcgcccgtgccgatatataatccaatcgaaaccgccacactgttggccgccggcgccagcccgctagtaacctgcttaatttaggcatacgtgagactctgagagaaggtactgaccacacaagggaggccactcccgcccggttcgtccgcgtcgtcgccgatccgtacgcaactcccgtgatccgatccggacgtacggccgctctctctccgggctagctggcgatcgccgactgcatggggccggcggccggcgacggcgaccgcggccccggcgccgcggcggagcacaaggtgaacctgtcggcgcggcagccgttcgtggagtcggtgcggacgtgcctggccgagacgttcttccccgacgacccgttccggggcctggggtcgcgcccgcccgccgcgcgcgcgtggggcgcgctcaagtacttcgtgccggccctggagtgggcgccgcgctacaccgccggcaagttcaagtacgacctcctcgccggggtcaccatcgccagcctcgccatcccgcagggcatcagctacgccaagctcgccaacctcccgcccatcatcggcctctattccagtttcgtgccgccgctgctgtacgcggtgttcggaagctccaacaacctggcggtgggcacggtggcggcggcgtcgctgctgctggcgtccatcatcgagacggaggtcccgccggaggagaacccgcagctgtacctgcagctcttctacaccgccgccttcttcaccggcgtcttccagaccgcgctaggcgtcttcagcttgtctttgtctgtgaaggttagggctgatagtggatttcctgtcgcggtcgacgatcaccgggttcatgggcggcacggcgacgatcatcatcttgcagcagctcaaggggatgctggggatgaagcacttcacgccaaagacagacctcgtctccgtcatgcgctccatcttctattacaggcacgagtggaggtggcagagtttagttcttggcatatgcttcctcctgctcttgctgttaagcaagcacttgaggaagaagaaaccaaatctgttctgggtgtcggccattgcgcctttcctgatcgtggtcatcggcggcgtcttcgccttcctggtcaaaggagacgagcatggcatcccgatagtcggcgatctgaagaaagggatcaacccgctgtctatttcgcagctgacgtttacagacaagcacgtcaatacggcaatgaaagcggggttcttgtccgggatcctggcgctggcagtacgaacatgtttcctctgatgcatctctcagccaggcttgcatgggattttgtttgtttattatctgcgatggctctcaggaagggatcgccgtcggacggagcctggcgctggtaaagaacgagcagatcgacgggaacaaggagatgatcgcattcggcatcatgaacatcgccgggtccttcacttcttgctacctcaccacagggccgttctccaaatcggcggtgaacttccacgccgggtgccggacgcccatgtccaacgtggtgatgtcggtgtgcatcctgctggtgctgctgttcctggccccgctcttcaagtacacccccctggtggcgctctcgtccatcatcgtcgtcgccatgatcgggctcatcaaggtcagggagttctgccacctgtaccgggtcgacaagttcgacttctgcatctgcatggtcgcattcatcggcgtcgtcttcttcaccatggtcatcggcctcagtgcctcggtaggcttgtccgtggtcagggcactgctgcacgtggcgagacctagcacctgcaagctcggaagcgtcgcgggaggcgacatcttccgcgacgtcaggcactacccgcacgcgaggagcgtccccaacgtcctcgttttgcagctgggatctccgatatatttcgtcaatgcaggttacttgcgagaaaggatcttaagatgggcggaagaggaggagaacggcagcaagattgacgggcaagatctgcagtacgtggtccttgatctcgctggtatgtcccttgtacccatttctgcaggttttcgtcccgtcctcacctcgagttttcagtccaccggtgacactttgcctcatgaacattgcaggtgtgacttccatcgacaacacggggattgggatgctagtcgaggttcacaagagccttgatcgtaaagggatcagggtaatcaccggaattttgttcactgaattgacgagtactcgtgacagactaacagatggttgctccttgcagatagcgctgacgaaccccaggctggaggtgacggagaagctggtgctgtctgggtacatcaaggacatcataggggaggagtgggtgttcctcacggtgaaggacgccatcacggcgtgccggtacgcgctccagagatctagaagcaaggatgacggtgaagtatagctagcgtccagggacagtcttttagtaggaattatagttcagtagtagctcatcactagctgtagatattgagaagcaggcaggaaagcaagcatcggaggtccttgtataggagaagattcagagctacgactacgagagattggggtgtggttgcggtgcttgcatgtgttggattattgtgtggcatctggtctctccgtctttgtaagggaaatagcgaggtggctggggataggtagctagcgtttgtgtatagaccagttcagctttgcctgtaccagtttgcaattgcagcacaataggctgtttgaatcgctgaaagggtattgcccttcttcatgcgccgaaggaaccgtggccactgtcagtcttatgtatacaggagttagctgcaggacgagaaggagccacggtcactcaaaaatctcattggctctgttattagcctgtttggctaggctttgacatcccacttcggcatcgggttaagtttggatgatcttatacggaacgactacgttctaggacctgtttttgtggtttaatgggtttgatgcctaggtgacacagtgtgtaaattaaagtaccgctgatgtattttactcgttttcctgcatctatcatgcagttatactgcttactgatgttcatcctaggggacctcgtttcccttctcatgctacggttcttccggaatttatggatcggcgacgtgatagcaattctgaaatgagaataatggcctagtatttcatgacttaatttctatggaactttttttaggttaaggagtttctataaatcttatggagcacctatgccttcattagttctgatct

SEQ ID NO: 32137 - DNA, 703 bp, Zea Mays
ctcggattgcgtacgcgctgctgcagaccgtggagctcaaggtgtccatgcactgctacgggtgcgccaagaaggtccagaagcacatctccaagatggacggcgtcacgtcgttcgaggtggatttggagaagaagaaggtggtcgtgatcggggacgtgacgccgtacgaggtgctggcgagcatctccaaggtgaagttcgcggagctgtgggtggccccccaacaaccccaagcagcaagccgctgcggaaaggcgcctgcaggtggtgtagtgtagaagatctcccaatggatgctcatgtgttctcttgtattcatcctgcatgcatgggcatggctgtagctcaggcgggcgggcgggcgggcaaaaccactcagaaatgtaagccaccaggaagcaatgcaagcaaccgtgtgtgcgtgcgagtgcaaacgatttggacgtgggggacacctcacgtacgccttgcaacatgttgctctgcgtttttttttatgtaaaagggcaattggggtaacgcggcgagcccaattataccgttgatttgatacgggtgagggagagaatgaggaggaggaggaggaggagctcgggcccgctgctaaatcctagatttagcttttataaatagctattagtttgatactcgtttcattatattaaggataaaatatatccgcaattcatttaaaataaat

SEQ ID NO: 32138 - DNA, 1520 bp, Zea Mays
ctccgtttttggcgattaatgccaacgggggagagagtattagcccaaagcaaaaggaccgcaccaccacgctaatttcaaaaaaattcgaagcaaagttgtttttcaattggtatctttgagattagtacccttctaagaaattctatctcaatatctatattttaaggaggagtttctcaaaaattggtatctaaaatatttgaccttctttcaaaggataaaaaccctctgttaatagattactagtggagatgtatgagagaagaggaagatacagaggaacagagagatacggtagagagctggtagcgccgtgacggtcggaaacaagtggaagtttaggttattacatttcataccctctaccgcaacacattcctactatatatatactccagtctctgcttgtgcatcgtgggttcattttcctttgacagaacgccccttctcagcccatcatcagcttgctcttctgacccatcatccaactcagcgttcaaccgctcctgtgccacaaccggcaagacctgctctgtcgaagggctgatgctgacattcccccttcttcgaacgccgcttgtccccaagcgaccactaatggaaagtgattcttctgcgcttcggcgtcctcccaagttgcatgcgaagcatccatccctgaccagatcacttgaaccatataccaactgcatagtgaaaggtgaattgggatatgcagagacgatgaccaattgagtcaataactcttgtgcttacgtatcatgatctttgagagtcggtgtgtactgatagaggcacacagtaaacatatgtgcaccgagtaacagagggatattgtgatcaccaggcctgcttggaggcaacccaactagatcctcaaaaatatccaaaaactggtaatgaatatcctgcacctgagtattgattattggcatcttgctgtcagggaaacggttctgctgggaggtggccgagagtaaccacagctccactattgctcctgtggaaacagaagggtgaacaccttgtaaacacctagttgctccttgatagggaatgctcatccatttgttagaccagttcactagcataggactatatcgttgtagcctgtccatgcccacgaccagatcaaacaagggtaagagtaaaaacgtgagatccactgaaaaactgcgaacatgcatggtccactcaactgaaggcacctgataattgcaagtaataacttgaccaaatgaaggtattggcaagaacttcaggtctgctgaaaagtgacagcccgacatactccacttggctgaaggcaaatggtaatggcaaggaataacttgtctaatagccagttgaactgtgattgggttaaccagaggttccacacccgataacattggtcgcaatttgtcactgataaaagtatgagaagatccagagtcaatgagcaccataatgtcttgctgctgcatttgatcttataattttagtgtggtaactgtctgagtacttgaccaagctag

SEQ ID NO: 32139 - DNA, 1977 bp, Zea Mays
aaaggaacccacttctcgaatagaaattgagctcaacattgtcaccaatatgtgcccttggccatcatacacaactaacttccaggaattaccataatgtatgaatagataactagacaaccatctaagttcctggtcaccagaaccaacaaaccaagccaacacactactcagcctatagataatcttgaatttcgcactcttctgcagcatgcaccttccacctaccactgcaattgattccaatgctaatagtggagccaatccaattggagagaaactgaaagatggccatggtattggccgcacttcagtattaccgatagcatgtgccaggtcttgcatcgtcgagccaacaccattgttgcaggtggcaataacatgtgatgacaattcctcaaacacacggtgggcacctagaactagaaccgcgtgaccattgttgatgtgctgttggagttcgaccatatccggaggtgacccacacagcttgaagatcttcagcagctggtacatctcgccactgccgggcatgaggggcttgccgaagaagatctcgttgaggcaacccacgctccagaggtcgaagccgacgctgtagctggtggagttcagcagcagcacaggtgtgcggtaccagagcgtgacgacgcggctggtgagcggttgtcggcacccagcgccgtagttggcgaggccgaagtcaccaatcttgagcatgtcggggtagtcgatcagcagattggagcccttgatgtcctggtgaaggatgccctgctcatggcagtgctgcagccccacaaacagcttggcaccaatcaaggtaggtgaaggcttgaggtactactgcagcaggtgctcgatctgtccagtgcagatggtgtccaccgtcttttcctccaggttgcacactgggtgcgcgaaggcgaccacgtcccactccttgctgacggcctggtggtggcctgacaggaagttatgcgtgaggacgagggcgcaccggagttggccctatgccacggacaccatgttgctgccggtgacttgggcgacgatgtgccccgcggcggcagcggtcggtagttcgatgtggtcggagccgatttccgctgggaggagcagctccaggtacttgagcgatggtctaggcgccctcgaagcgaagagcacgggtgcggccttggcgagcgcgtccggggggacggtgcccgagatctcgttgttggggccgatggaggcgatggtgaaggaggcaggagtgcacccgcgcaggatgagtcgcgcctcgactccatcccgctgatccgagtggggaaggaaggcgatgtcggtctcgtgctctaggagatgggacatcacggatccatggtcgccgtggacggagttgtcgtcgtccgagtcaagcggtgcacccgaatcgttgttgaagaagcgtccgcgtgcggccgggtgcaccgattccaccgcaacctctggtgtgacgcaggtagtcgcgtcggggttggaggaagggctgtcccagtggccggcgaaatcggcgtcgacagccgcgtccgctccatcgaagaatccgccccagttgtcggtgattataggatccgcatagtgcttctcggtggagtcgttgccactgtcaaaaaggtcgccccaattgtcggcgaccacgtcggctccggcagccgtggactgggtcggaacagggacgcgcctggatgcctcccgcacggcccaccgcgcgtcgaacttgtcaaagaactcgctaatggcgtcgaggatgagcttcgtgtcgagtgacatggcgatgcggtgaagttgaggaaagtggattaaggtagaaaactccaaggatcgaacgaatctgataccaattgttaacagattactagtggagatgtatgagagaagaggaagatacagagaaacagagagatacggtagagagctggtagcgccgtgacggccggaaacaagtggaag

SEQ ID NO: 32140 - DNA, 1669 bp, Zea Mays
gcctctcaagctcaagggctcaaggccattagcgtaattacaaaattgtaattaattctcaatctcaaggttagtaacgtaattctagagcttccgagcagaaaaggtacggagtcggaaggatatgatcgcttaggagtgcggctagggttttttcttgtcacaccttccctcggtcccttccatcttctagccgccgccgccgccgccgctgcccaaaaccctacctaccctcttcttccccctcactctcctttcatctccattctaatggcggcccaacccgtccggcgaagctgctagtgcttgtatctactatcttcatcaggtacttcgccatcctactgaagtattccccgccgccgctgccatggccaccctcaaccctttcgaactcctcggcgccgacgacaacgacgacccgacgcagctgattgcggcggcggcggctgctgctcagaaagccgaggcgaagaagtccgccgtggcgcctgctgggaaggctgcccagcctgcggcgaccaccaagttcccgaccaagcccgctcctccctcgcagacggttcgggatgcacgcggcggtggctcatcagctcgtggaggctttggccgtggtgaacgtggccgtggcagaggtggacggggatatggccagaaccgtggcttcagtggtgacaatggcaatgagttccagggaggttatggtggcggaggctatggggatggtgctgtaactggtggatctgaaggagaaagggagagagagactcgtcccccgtaccgtggcggaggcagacgtggtggttacaggaatgttgagtttgctgatgactctgagaggccaccacggagaaactatgagcgccacagcgggactggccatggctatgagatgaagcgtgatggcgcagggcgtgggaactggggcactgccactgatgaacttattgcccaggatgcagaggactctccgaagatggaggaggctgctcctgttgctgagaaacaaggtgagcagaatgatgccccagcagcagatgagaacaaagataacaaggatgctactgcaaatgaggaggaagaaaaggaagaggacaaggagatgactctggaggaatttgagaaaataagagaggagaagaggaaagcactacttgcattgaaggctgaggagaggaaagttgaagttgacaaggatttgcagtctctgcagccactttcaaacaagaaagaaaatgatgaagttttcattaagctgggttctgacaaggataagaagaaggaaaatgctgagcgtgatgagcgtgccaagaaggtatgcattgtagttgcaaatcaaagtagtttctgacatatggttgcactgcaattgcatgtggggatggtgtgtggattgtgcatgtgctagagattccgttttacagctcttcagcttaacactttcttattgaatgcttgaatcagagtggatgtagccgtagtacatctcttcagcttaacactttcttccgcttatcaatcttttttagtaacagggactgtaatcttataaatcttaattagatctgaaattgtaagcgtgtgatttgagagttgagaccaagtattccgaatcttcaaccttgatacacaaactctgaacaaggggaaaaagcaaggggcagtctta

SEQ ID NO: 32141 - DNA, 1720 bp, Zea Mays
gcctctcaagctcaagggctcaaggccattagcgtaattacaaaattgtaattaattctcaatctcaaggttagtaacgtaattctagagcttccgagcagaaaaggtacggagtcggaaggatatgatcgcttaggagtgcggctagggttttttcttgtcacaccttccctcggtcccttccatcttctagccgccgccgccgccgccgctgcccaaaaccctacctaccctcttcttccccctcactctcctttcatctccattctaatggcggcccaacccgtccggcgaagctgctagtgcttgtatctactatcttcatcaggtacttcgccatcctactgaagtattccccgccgccgctgccatggccaccctcaaccctttcgaactcctcggcgccgacgacaacgacgacccgacgcagctgattgcggcggcggcggctgctgctcagaaagccgaggcgaagaagtccgccgtggcgcctgctgggaaggctgcccagcctgcggcgaccaccaagttcccgaccaagcccgctcctccctcgcagacggctcgtggaggctttggccgtggtgaacgtggccgtggcagaggtggacggggatatggccagaaccgtggcttcagtggtgacaatggcaatgagttccagggaggcagacgtggtggttacaggaatgttgagtttgctgatgactctgagaggccaccacggagaaactatgagcgccacagcgggactggccatggctatgagatgaagcgtgatggcgcagggcgtgggaactggggcactgccactgatgaacttattgcccaggatgcagaggactctccgaagatggaggaggctgctcctgttgctgagaaacaaggtgagcagaatgatgccccagcagcagatgagaacaaagataacaaggatgctactgcaaatgaggaggaagaaaaggaagaggacaaggagatgactctggaggaatttgagaaaataagagaggagaagaggaaagcactacttgcattgaaggctgaggagaggaaagttgaagttgacaaggatttgcagtctctgcagccactttcaaacaagaaagaaaatgatgaagttttcattaagctgggttctgacaaggataagaagaaggaaaatgctgagcgtgatgagcgtgccaagaagtcggtgagcatcaacgagttcctgaaacctgctgaaggagaaaggtactacggcggccgtggccgtggaaggggccgtggggatcgtggtggttttagaggcggatacggagggggatacagtcgtggcccagctgctgctgctccatccattgaagatcaagctcagttcccaagccttggtgggaagtgaagggcgcccagctgctgctgtcaccgagcgttgtgttgtctgctgttgtcatatttaaattttgtccgacgttaaatttctgtgccacggtttaaacggaacaaataatgatgttgcatgtggctatctttagttatgtggtacttgacgttgaataccggagttgttgtttatcagaattaacctccaatttttgtaggccagcttttaccattttgttgtcttagcatgcttgcttgtttggctgtcctgtatggcactgctgcagctgcaatccatattagttgcagctggattaaagccggagtgaacttgtcacctcttgcttgccttaca

SEQ ID NO: 32142 - DNA, 2256 bp, Zea Mays
attttttataacgaatcaactgtgttcataagaactggatcagtgcctcaaaactaatctaatattaggattgttcttcaccttttctaggaggaactgctcgtcaacgggtaatctaggatcagtgtggcatctgccactgacaatctccaacagcagcacaccaaagctgtagacgtcgctctttttgttcagctgcccttgaatggtgtactctggtgcaagatatcctctagaagatgaacacatcagccatgtaccctggattaagcatgtcctagttaagaaagtgtagctgaatctgaatctaaaaggaaacaaagcaaaagatgggtggtagaaaattactgcggtgattcttcggccgttcaatgcactaatgcttccatgtacacttgacgacgtacttcaacaaccgatatcctatgactaatgcttccatgtacaattgtgcagaaaaaaatgtaccatgctaggatggattataaaacatgggggatgataagttgctctaatattatacgactgaagcaaagcatacatcaattaaagagtatcctaagattgaaatttagtgcatcagtaagaatctcaccagttcatatcaactatggatgtaggaaggtgatttaattttggcgtcgacgtagattgtacgcctacactaaggccttaaaacacaaatatagtagaatcaattttcagtttttaaactgttaaagccatggggatgtcaaaatcagtcaaggaaattactattttcttgactgcaatacagttattgattggtacactactgacattgttagctactataacaatgtgattcatacacgtacatgagttagcttgaagagattggcagaaaaaaactaaatagaaacctataagaggtacaaactttttttaccggatccaagtattgtacagtgtccaagaaaagatagctgataacatacttaactaacaattatgacatagtatttgtccctttatcaagtgattatatagttagttcaggaaaaggaaagtataatggcaagtgcatgaatatgtcactgctctttcatggtactgtaatgctatttaacaaacactgcagaagtgcaagaagaaaatgaacatccaggataagtaaatgtaccacctaaatcgctcagcagcctacacagctgtagaaacctcgagttctgcaaccaagcgttgaacagtttagtgtcttcctgcgaagtcaatagacacggcctcggcaattggtacccccacaatggcagaagcagccatcgcctgctacaagcttttgtcggtaatcataggcgagttcttctcctacggcaatctgaaaaatagcatatcaaaaattaaaagtcaatataaattacatttggaaaatatgttaaaaagaatcttacgttttgattagcaaacaagctaatgtgagcaagctggcaatctttgctctctaccaaaaccaatcgggtgctgagatttggggaacaacttctatcaaagcaataagtacaaatgaatattggttgtaatatcaacttgctccagtgatggatttccataaaatatgataatatgcaattacctgtgattgatatagcgggacacatttccagatcttgtggcatcaatcaagtattcaatagcccctacagtccgaactctttccctatcaatctgggagccacttacccagggtggttgaggaggggagcactgggagctcgaggcctcctgcgcgagcagcggcggcagatgcggtcgagggggaggaggtaggagacggcgaggtggagggaggggtggcgcggctgcccagaggcgggatgcggcgaggaggagaaggggtgcggccgaggggggcatggcctccccgaatcgctggtgaagcaagaacgggcgaggagcttctacaaatcgacggtggtggggggaggggcgctgatgtcgaacggaggcagggtcacggtgtcgccccctgtggacacctccagcgtctgcgccaccgtgaagcggtcgcggacggagaacgaggctggacggtagcagtcgtggatccgggcatcaccgagggggtgggggcaggggaagggaggggaggccttgaatcccggatgcgtccgcaggggtgttctcggatccttgtcaccgcggcgcgggacatggggagcagccgagcaggggcggcgggcgcggagaggaccaagcaatggcaacgcgagggatgtgaggggacgggttcgtgag

SEQ ID NO: 32143 - DNA, 1339 bp, Zea Mays
attggacttgtggtagatgaccaagtaggcaaagccgcaaaggaggtggaaccggtggcaaaacattgtcagctgccgaccttcgcgatcctgaaatttcagctctggtggcttccaagctgagggagttccacaaccttgacatgcctggtcccaaatctgtgctcatttgggacagacttaggaactggctcagaactgccaagagcttgtgtccacctgaagaagccaaggaatttcggttggacagtctggagaaccagattactgcattggagaacgagtgttcaggtgattaccagtggattggtttctgtcacaatgatcttcagtatggcaatatcatgattgatgaagagaccaacgtgctgaccatcattgattatgagtatgcaagcttcaacccagttgcatatgacattgctaaccatttctgtgagatggcagcagactatcattcatcaaagcctcatatactggactacagcagatatccagatgttgatgagcagaagcgttttgttaagacctacctgaacatttctggtgaggaacctgatgcggaagttgtggagaacctgctccaaagcattgagaagcacacgctcgccagccatctagtatggggcctctggggaataatttcggaccatgttaacgacattgacttcgactacaaggagtatgcgaggcagagattcgagcagtactggcacaagtctgcgatcttaacatcttgaacatgtgtataaacacccgtacgtggtctcaggaactccctgagggcctgtggctgcacacacgaaattgtgcagtgccactgacacatagataagctgtgaaagaagaaatactgacgacgacgacgaataatcccgttttgggctcgggaggttatttctccgcaactcgatgagcttcaggcttcagcttcaggaaggaaggaaggagctatggggatttggctgcccgcttatgctgtaccaatgcaattaaaagataaagatccggtccggtgttgcgtgtgctatgtttagttttggctagcaccgccgagagccgtggtcctgttgtggtgtttctagtttctgtatgcttgatgttgttagtgtgctggataatttggttttgtgcttggggagtccttagctttgggacaacgcatacattgtatactgggtagatgtataaacataaaacagctatgggaatttggttctctacctttatttctctctcgaacaggctgtatttcgttaagaaggtaaatttgggtttgtatttgttattatcagcttgttatacatgtgtcagatcaaatgcatttcttttggtaccc

SEQ ID NO: 32144 - DNA, 982 bp, Zea Mays
ggttctgtattgtagttcagtgctgcataactgtacgtaaattttcatcaggggaccgtcaagtttcttgcgaatattgaacgcatggtgtaaacaaattaagtccattccactttctaacgaacatgacacattggatgttctccaattcaacacctcctctccagatgcaatgcaattccatgcgctgtgaggaacctgatgcggaagttgtggagaacctgctccaaagcattgagaagcacacgctcgccagccatctagtatggggcctctggggaataatttcggaccatgttaacgacattgacttcgactacaaggagtatgcgaggcagagattcgagcagtactggcacaagtctgcgatcttaacatcttgaacatgtgtataaacacccgtacgtggtctcaggaactccctgagggcctgtggctgcacacacgaaattgtgcagtgccactgacacatagataagctgtgaaagaagaaatactgacgacgacgacgaataatcccgttttgggctcgggaggttatttctccgcaactcgatgagcttcaggcttcagcttcaggaaggaaggaaggagctatggggatttggctgcccgcttatgctgtaccaatgcaattaaaagataaagatccggtccggtgttgcgtgtgctatgtttagttttggctagcaccgccgagagccgtggtcctgttgtggtgtttctagtttctgtatgcttgatgttgttagtgtgctggataatttggttttgtgcttggggagtccttagctttgggacaacgcatacattgtatactgggtagatgtataaacataaaacagctatgggaatttggttctctacctttatttctctctcgaacaggctgtatttcgttaagaaggtaaatttgggtttgtatttgttattatcagcttgttatacatgtgtcagatcaaatgcatttcttttggtaccc

SEQ ID NO: 32145 - DNA, 1044 bp, Zea Mays
cctccaccgacttcagttggaataagtataaagctaatcagctccacagtaacataacaaacacatgaataagttaagctgatatcaacatttgctgtaggggtgtcaaagaggaaagaaaaattacactggaagtgaaattacagaatgtcacaatctgtgtgaaatatttactgtatccaacatttttaattacagctaaaaggtttccacatatgaggcacaccacctcaaaaagggggagggggaaaacagcaaaatacatgacatctgatttcaaaatatggtcagagattatttttgcacatatgaggtacacagtactcaaaagcagcaaatgcatgtcatctgatttcaaaatatggtcagagcatggataaaaatgtacaggactacctactaccaactgctggtctcagaaaaatagagaggcacatgctgggcagcaggactaagtcgtaatctctgaccatattttggataaaattgtacaggactacctactaccaacttgcctgttcttccttggatacttgagaaaagcataaagtctgtttcaatgtgtgtccaagattaccttgaactttcatatagtccaaggttgtatattccagaagcattgtcttcctcgaaggagagctgttcctcagcctctgcatcggtgaaggtcagagctctctgcagcttttttgaagagaaaacctccacatctgccatgtacacagcagtcacagggcggtgatctgatagtctgagatcaactgtcttatatgacagtaatctcatacccttaccatgggaaagaattcggtcacacctacattgttagaagagagggtttgctgttactgcacgccaccagtagctttagatatacgaacataacttctacaatgataatttcattaataaaagaaaataactagcaaggcgtaaatcatgtagaacaaaatataccatgcaggtgttctccttccagatttgttatcatcacttatgtacttttctgagttaaccttgtacttatacgttggaggaaagttg

SEQ ID NO: 32146 - DNA, 650 bp, Zea Mays
gtactgcggacgcttcttggcgtacgtctccgacggcttctcgtagagccccgccattctttctcaattcttagcttcggctatctcggtatcgcctgcctatcagctgccaagtgcggttcgatcttggatggaattcatagccacaaaagtggccaaagtcatagccaattcaaaaagaggaacttttgcattatccactgaatcaaagcaaaggttgactcagactgcaacatcacatgcatggggaatcttgtgcggcagcagaaaccatacacaacatgagatgattttccacatagtagtatgaagaaagcagggacaggctgatgcagcagtcagggggtgagggcagcagtgatacacagaagagacaagcgacgcggcacaacaagagtgacacacagaagaaactaagaaatgtctattcacacttggatgataaataaaagcactagatttaaagtgctcatatgagcacaagagctacatgagcacaggatatgttcccgagtctaaaacctgtaggctgtagaaacttgtgttagcgtaaggagatccaccaaattctgaaacctgtatatcgtgcaataacccaataaagtaaattaacgtgaggtgagtcgtcagttgctcactcttaacttttc

SEQ ID NO: 32147 - DNA, 2140 bp, Zea Mays
ctcgccctctctctctccctcttcccggccttttcgccgagcgagcctctgaggttctggaatttccagtgcgggtgcattaggctgctatgggcaagtcgccggggaagtggatcaaatcggtgcttttggggaagaaatctaccaagtcaggtcctaccaagtcgaatgaatctaaggctgacaacaacagatactcgaccggggaggaccgcacattgtctgagagttctcctgtgatttctgagccggtactagttaacatccacaagaacgtagctatcaatgggaaggctgcagatgccagtgatagggcacggcaacaagatccgcagagccaaagcgttgttgagtccagatcatcggctccagctgctcagctgggagaagatcaagctgcagcgaaggcacaggcagcctttcgtggttacctggcacgaaggtcattccgtgcattaaaaggtatcgtaagactccaggcgctgattcgagggtatcttgtaaggaggcaggctgtatcaacccttcgcgcaacatggttgattgtgaagtttcaggctctagttcgtggaagaaatgttagactctctggcagtcgcatgcagctcaatgtgaagtttggtcagagtaactttgggggtgttagatcgtctgatgcatggaaagagaagctatcttcaaatgcttatgttcggaagacatgggaacctaaggggaaggggttcgggggtttctcgacccgccttctgtcttcaccaattgttttagaacctcttcacttccagtatgacaagagggatcccaattcaacctataactggtttgagagatggaccataggttgcatctggaagcctgcttttcaacccaaaagagttgctgatgggaaaccactggtaaagaaggctagttatgcaatggaaactcaatcagccaagttaaaacgcaacattcggaagggttctgctgctatcgctgggagtttccatacatctggtgaatctgataaagtaaaaaggaatccaaagaatttctctagcttccctgctgattcagtaccagatagccagttatctgaacttgaaaaggttaaaaggaacctcaggaaggtaactgattcgatggctgaagcctcaaagatatctagttccagggttgattcctcgaaggtatgtaattctacagctgaggttccaaaggaatctaatcctgtggcagaaatctcaaagatacgtagtctcctgaatgggatctctgaccatcaggatattcaatgtgagaatacacgtgaatcttcatttcctcttggaactcaagaagactctgacaatgatcatctattgcgatattcaaatatggatagcttggacttggtacctggtttgaaaagtgatcaggaaattcagctggattcggtttctataggagaaaatgttgatgatcccactgttgttgctccagcagttgaagaaatgtcaccgcaaaacattgatacggaagacaatgttttatgcaagaaagaggaagcaaggtccaaggaagagcacttgtctaatggaagccttagaactagcaagaggaagtcttcattccccaacaaatcagaatatgtagaaaatgggactcacgctactcctgttcagccaaggcagccaagctatatggctgcaacggagtccgcaaaggcgaaattgcgagcccagaattcacccagtctggattctgattcagcggcagaaaagaatggtttcacccgacgccactctcttccttccagtacaaagagtagagcacttaaagctgaatggaagcgctgaagaggcaacccatcgtccacttgaattgaattgtgcactgctctgaaacttcgctggatgaactcgaccggtcttgtcccatgttcttgctgtattgaacaaccccttgtgaagttgcgattctggttcagtttgtcgtaggttcatgtgcaaccactagtgccttgtgtcgtatattgcatggttcttgtcgaaggaacaatgcctgcgaaagctgatgttaggactgcattaactgaataacatcacccagttgcccaggtctttgtttgtcgtcttaatgagtgatgaaaaagcagtttcgcagaactgctagtgacatg

SEQ ID NO: 32148 - DNA, 2093 bp, Zea Mays
cgccctctctctctccctcttcccggccttttcgccgagcgagcctctgaggttctggaatttccagtgcgggtgcattaggctgctatgggcaagtcgccggggaagtggatcaaatcggtgcttttggggaagaaatctaccaagtcaggtcctaccaagtcgaatgaatctaaggctgacaacaacagatactcgaccggggaggaccgcacattgtctgagagttctcctgtgatttctgagccggtactagttaacatccacaagaacgtagctatcaatgggaaggctgcagatgccagtgatagggcacggcaacaagatccgcagagccaaagcgttgttgagtccagatcatcggctccagctgctcagctgggagaagatcaagctgcagcgaaggcacaggcagcctttcgtggttacctggcacgaaggtcattccgtgcattaaaaggtatcgtaagactccaggcgctgattcgagggtatcttgtaaggaggcaggctgtatcaacccttcgcgcaacatggttgattgtgaagtttcaggctctagttcgtggaagaaatgttagactctctggcagtcgcatgcagctcaatgtgaagtttggtcagagtaactttgggggtgttagatcgtctgatgcatggaaagagaagctatcttcaaatgcttatgttcggaagcttctgtcttcaccaattgttttagaacctcttcacttccagtatgacaagagggatcccaattcaacctataactggtttgagagatggaccataggttgcatctggaagcctgcttttcaacccaaaagagttgctgatgggaaaccactggtaaagaaggctagttatgcaatggaaactcaatcagccaagttaaaacgcaacattcggaagggttctgctgctatcgctgggagtttccatacatctggtgaatctgataaagtaaaaaggaatccaaagaatttctctagcttccctgctgattcagtaccagatagccagttatctgaacttgaaaaggttaaaaggaacctcaggaaggtaactgattcgatggctgaagcctcaaagatatctagttccagggttgattcctcgaaggtatgtaattctacagctgaggttccaaaggaatctaatcctgtggcagaaatctcaaagatacgtagtctcctgaatgggatctctgaccatcaggatattcaatgtgagaatacacgtgaatcttcatttcctcttggaactcaagaagactctgacaatgatcatctattgcgatattcaaatatggatagcttggacttggtacctggtttgaaaagtgatcaggaaattcagctggattcggtttctataggagaaaatgttgatgatcccactgttgttgctccagcagttgaagaaatgtcaccgcaaaacattgatacggaagacaatgttttatgcaagaaagaggaagcaaggtccaaggaagagcacttgtctaatggaagccttagaactagcaagaggaagtcttcattccccaacaaatcagaatatgtagaaaatgggactcacgctactcctgttcagccaaggcagccaagctatatggctgcaacggagtccgcaaaggcgaaattgcgagcccagaattcacccagtctggattctgattcagcggcagaaaagaatggtttcacccgacgccactctcttccttccagtacaaagagtagagcacttaaagctgaatggaagcgctgaagaggcaacccatcgtccacttgaattgaattgtgcactgctctgaaacttcgctggatgaactcgaccggtcttgtcccatgttcttgctgtattgaacaaccccttgtgaagttgcgattctggttcagtttgtcgtaggttcatgtgcaaccactagtgccttgtgtcgtatattgcatggttcttgtcgaaggaacaatgcctgcgaaagctgatgttaggactgcattaactgaataacatcacccagttgcccaggtctttgtttgtcgtcttaatgagtgatgaaaaagcagtttcgcagaactgctagtgacatg

SEQ ID NO: 32149 - DNA, 1808 bp, Zea Mays
cttttcgccgagcgagcctctgaggttctggaatttccagtgcgggtgcattaggctgctatgggcaagtcgccggggaagtggatcaaatcggtgcttttggggaagaaatctaccaagtcaggtcctaccaagtcgaatgaatctgcacgaaggtcattccgtgcattaaaaggtatcgtaagactccaggcgctgattcgagggtatcttgtaaggaggcaggctgtatcaacccttcgcgcaacatggttgattgtgaagtttcaggctctagttcgtggaagaaatgttagactctctggcagtcgcatgcagctcaatgtgaagtttggtcagagtaactttgggggtgttagatcgtctgatgcatggaaagagaagctatcttcaaatgcttatgttcggaagcttctgtcttcaccaattgttttagaacctcttcacttccagtatgacaagagggatcccaattcaacctataactggtttgagagatggaccataggttgcatctggaagcctgcttttcaacccaaaagagttgctgatgggaaaccactggtaaagaaggctagttatgcaatggaaactcaatcagccaagttaaaacgcaacattcggaagggttctgctgctatcgctgggagtttccatacatctggtgaatctgataaagtaaaaaggaatccaaagaatttctctagcttccctgctgattcagtaccagatagccagttatctgaacttgaaaaggttaaaaggaacctcaggaaggtaactgattcgatggctgaagcctcaaagatatctagttccagggttgattcctcgaaggtatgtaattctacagctgaggttccaaaggaatctaatcctgtggcagaaatctcaaagatacgtagtctcctgaatgggatctctgaccatcaggatattcaatgtgagaatacacgtgaatcttcatttcctcttggaactcaagaagactctgacaatgatcatctattgcgatattcaaatatggatagcttggacttggtacctggtttgaaaagtgatcaggaaattcagctggattcggtttctataggagaaaatgttgatgatcccactgttgttgctccagcagttgaagaaatgtcaccgcaaaacattgatacggaagacaatgttttatgcaagaaagaggaagcaaggtccaaggaagagcacttgtctaatggaagccttagaactagcaagaggaagtcttcattccccaacaaatcagaatatgtagaaaatgggactcacgctactcctgttcagccaaggcagccaagctatatggctgcaacggagtccgcaaaggcgaaattgcgagcccagaattcacccagtctggattctgattcagcggcagaaaagaatggtttcacccgacgccactctcttccttccagtacaaagagtagagcacttaaagctgaatggaagcgctgaagaggcaacccatcgtccacttgaattgaattgtgcactgctctgaaacttcgctggatgaactcgaccggtcttgtcccatgttcttgctgtattgaacaaccccttgtgaagttgcgattctggttcagtttgtcgtaggttcatgtgcaaccactagtgccttgtgtcgtatattgcatggttcttgtcgaaggaacaatgcctgcgaaagctgatgttaggactgcattaactgaataacatcacccagttgcccaggtctttgtttgtcgtcttaatgagtgatgaaaaagcagtttcgcagaactgctagtgacatg

SEQ ID NO: 32150 - DNA, 2288 bp, Zea Mays
gctcactccaccacttgactctcgtctcgtctctgcactggattggaggttggggccgtgaagggtaggtaggtcgcttgatagggacaaggggggagacggcgagaggcgtttcgccgagcagttcgcgtgctcccctccacaggccgacgcggcgacgccgctgtttcaggttctggaatttccagtgcgggtgcattaggctgctatgggcaagtcgccggggaagtggatcaaatcggtgcttttggggaagaaatctaccaagtcaggtcctaccaagtcgaatgaatctctgcagaggttgagatttcatttactagttactgttccttactgctccaagcgtgcaaactgacgcatgtccttaaggctgacaacaacagatactcgaccggggaggaccgcacattgtctgagagttctcctgtgatttctgagccggtactagttaacatccacaagaacgtagctatcaatgggaaggctgcagatgccagtgatagggcacggcaacaagatccgcagagccaaagcgttgttgagtccagatcatcggctccagctgctcagctgggagaagatcaagctgcagcgaaggcacaggcagcctttcgtggttacctggcacgaaggtcattccgtgcattaaaaggtatcgtaagactccaggcgctgattcgagggtatcttgtaaggaggcaggctgtatcaacccttcgcgcaacatggttgattgtgaagtttcaggctctagttcgtggaagaaatgttagactctctggcagtcgcatgcagctcaatgtgaagtttggtcagagtaactttgggggtgttagatcgtctgatgcatggaaagagaagctatcttcaaatgcttatgttcggaagcttctgtcttcaccaattgttttagaacctcttcacttccagtatgacaagagggatcccaattcaacctataactggtttgagagatggaccataggttgcatctggaagcctgcttttcaacccaaaagagttgctgatgggaaaccactggtaaagaaggctagttatgcaatggaaactcaatcagccaagttaaaacgcaacattcggaagggttctgctgctatcgctgggagtttccatacatctggtgaatctgataaagtaaaaaggaatccaaagaatttctctagcttccctgctgattcagtaccagatagccagttatctgaacttgaaaaggttaaaaggaacctcaggaaggtaactgattcgatggctgaagcctcaaagatatctagttccagggttgattcctcgaaggtatgtaattctacagctgaggttccaaaggaatctaatcctgtggcagaaatctcaaagatacgtagtctcctgaatgggatctctgaccatcaggatattcaatgtgagaatacacgtgaatcttcatttcctcttggaactcaagaagactctgacaatgatcatctattgcgatattcaaatatggatagcttggacttggtacctggtttgaaaagtgatcaggaaattcagctggattcggtttctataggagaaaatgttgatgatcccactgttgttgctccagcagttgaagaaatgtcaccgcaaaacattgatacggaagacaatgttttatgcaagaaagaggaagcaaggtccaaggaagagcacttgtctaatggaagccttagaactagcaagaggaagtcttcattccccaacaaatcagaatatgtagaaaatgggactcacgctactcctgttcagccaaggcagccaagctatatggctgcaacggagtccgcaaaggcgaaattgcgagcccagaattcacccagtctggattctgattcagcggcagaaaagaatggtttcacccgacgccactctcttccttccagtacaaagagtagagcacttaaagctgaatggaagcgctgaagaggcaacccatcgtccacttgaattgaattgtgcactgctctgaaacttcgctggatgaactcgaccggtcttgtcccatgttcttgctgtattgaacaaccccttgtgaagttgcgattctggttcagtttgtcgtaggttcatgtgcaaccactagtgccttgtgtcgtatattgcatggttcttgtcgaaggaacaatgcctgcgaaagctgatgttaggactgcattaactgaataacatcacccagttgcccaggtctttgtttgtcgtcttaatgagtgatgaaaaagcagtttcgcagaactgctagtgacatg

SEQ ID NO: 32151 - DNA, 2259 bp, Zea Mays
gctcactccaccacttgactctcgtctcgtctctgcactggattggaggttggggccgtgaagggtaggtaggtcgcttgatagggacaaggggggagacggcgagaggcgtttcgccgagcagttcgcgtgctcccctccacaggccgacgcggcgacgccgctgtttcaggttctggaatttccagtgcgggtgcattaggctgctatgggcaagtcgccggggaagtggatcaaatcggtgcttttggggaagaaatctaccaagtcaggtcctaccaagtcgaatgaatctaaggctgacaacaacagatactcgaccggggaggaccgcacattgtctgagagttctcctgtgatttctgagccggtactagttaacatccacaagaacgtagctatcaatgggaaggctgcagatgccagtgatagggcacggcaacaagatccgcagagccaaagcgttgttgagtccagatcatcggctccagctgctcagctgggagaagatcaagctgcagcgaaggcacaggcagcctttcgtggttacctggcacgaaggtcattccgtgcattaaaaggtatcgtaagactccaggcgctgattcgagggtatcttgtaaggaggcaggctgtatcaacccttcgcgcaacatggttgattgtgaagtttcaggctctagttcgtggaagaaatgttagactctctggcagtcgcatgcagctcaatgtgaagtttggtcagagtaactttgggggtgttagatcgtctgatgcatggaaagagaagctatcttcaaatgcttatgttcggaagacatgggaacctaaggggaaggggttcgggggtttctcgacccgccttctgtcttcaccaattgttttagaacctcttcacttccagtatgacaagagggatcccaattcaacctataactggtttgagagatggaccataggttgcatctggaagcctgcttttcaacccaaaagagttgctgatgggaaaccactggtaaagaaggctagttatgcaatggaaactcaatcagccaagttaaaacgcaacattcggaagggttctgctgctatcgctgggagtttccatacatctggtgaatctgataaagtaaaaaggaatccaaagaatttctctagcttccctgctgattcagtaccagatagccagttatctgaacttgaaaaggttaaaaggaacctcaggaaggtaactgattcgatggctgaagcctcaaagatatctagttccagggttgattcctcgaaggtatgtaattctacagctgaggttccaaaggaatctaatcctgtggcagaaatctcaaagatacgtagtctcctgaatgggatctctgaccatcaggatattcaatgtgagaatacacgtgaatcttcatttcctcttggaactcaagaagactctgacaatgatcatctattgcgatattcaaatatggatagcttggacttggtacctggtttgaaaagtgatcaggaaattcagctggattcggtttctataggagaaaatgttgatgatcccactgttgttgctccagcagttgaagaaatgtcaccgcaaaacattgatacggaagacaatgttttatgcaagaaagaggaagcaaggtccaaggaagagcacttgtctaatggaagccttagaactagcaagaggaagtcttcattccccaacaaatcagaatatgtagaaaatgggactcacgctactcctgttcagccaaggcagccaagctatatggctgcaacggagtccgcaaaggcgaaattgcgagcccagaattcacccagtctggattctgattcagcggcagaaaagaatggtttcacccgacgccactctcttccttccagtacaaagagtagagcacttaaagctgaatggaagcgctgaagaggcaacccatcgtccacttgaattgaattgtgcactgctctgaaacttcgctggatgaactcgaccggtcttgtcccatgttcttgctgtattgaacaaccccttgtgaagttgcgattctggttcagtttgtcgtaggttcatgtgcaaccactagtgccttgtgtcgtatattgcatggttcttgtcgaaggaacaatgcctgcgaaagctgatgttaggactgcattaactgaataacatcacccagttgcccaggtctttgtttgtcgtcttaatgagtgatgaaaaagcagtttcgcagaactgctagtgacatg

SEQ ID NO: 32152 - DNA, 2211 bp, Zea Mays
gctcactccaccacttgactctcgtctcgtctctgcactggattggaggttggggccgtgaagggtaggtaggtcgcttgatagggacaaggggggagacggcgagaggcgtttcgccgagcagttcgcgtgctcccctccacaggccgacgcggcgacgccgctgtttcaggttctggaatttccagtgcgggtgcattaggctgctatgggcaagtcgccggggaagtggatcaaatcggtgcttttggggaagaaatctaccaagtcaggtcctaccaagtcgaatgaatctgctgacaacaacagatactcgaccggggaggaccgcacattgtctgagagttctcctgtgatttctgagccggtactagttaacatccacaagaacgtagctatcaatgggaaggctgcagatgccagtgatagggcacggcaacaagatccgcagagccaaagcgttgttgagtccagatcatcggctccagctgctcagctgggagaagatcaagctgcagcgaaggcacaggcagcctttcgtggttacctggcacgaaggtcattccgtgcattaaaaggtatcgtaagactccaggcgctgattcgagggtatcttgtaaggaggcaggctgtatcaacccttcgcgcaacatggttgattgtgaagtttcaggctctagttcgtggaagaaatgttagactctctggcagtcgcatgcagctcaatgtgaagtttggtcagagtaactttgggggtgttagatcgtctgatgcatggaaagagaagctatcttcaaatgcttatgttcggaagcttctgtcttcaccaattgttttagaacctcttcacttccagtatgacaagagggatcccaattcaacctataactggtttgagagatggaccataggttgcatctggaagcctgcttttcaacccaaaagagttgctgatgggaaaccactggtaaagaaggctagttatgcaatggaaactcaatcagccaagttaaaacgcaacattcggaagggttctgctgctatcgctgggagtttccatacatctggtgaatctgataaagtaaaaaggaatccaaagaatttctctagcttccctgctgattcagtaccagatagccagttatctgaacttgaaaaggttaaaaggaacctcaggaaggtaactgattcgatggctgaagcctcaaagatatctagttccagggttgattcctcgaaggtatgtaattctacagctgaggttccaaaggaatctaatcctgtggcagaaatctcaaagatacgtagtctcctgaatgggatctctgaccatcaggatattcaatgtgagaatacacgtgaatcttcatttcctcttggaactcaagaagactctgacaatgatcatctattgcgatattcaaatatggatagcttggacttggtacctggtttgaaaagtgatcaggaaattcagctggattcggtttctataggagaaaatgttgatgatcccactgttgttgctccagcagttgaagaaatgtcaccgcaaaacattgatacggaagacaatgttttatgcaagaaagaggaagcaaggtccaaggaagagcacttgtctaatggaagccttagaactagcaagaggaagtcttcattccccaacaaatcagaatatgtagaaaatgggactcacgctactcctgttcagccaaggcagccaagctatatggctgcaacggagtccgcaaaggcgaaattgcgagcccagaattcacccagtctggattctgattcagcggcagaaaagaatggtttcacccgacgccactctcttccttccagtacaaagagtagagcacttaaagctgaatggaagcgctgaagaggcaacccatcgtccacttgaattgaattgtgcactgctctgaaacttcgctggatgaactcgaccggtcttgtcccatgttcttgctgtattgaacaaccccttgtgaagttgcgattctggttcagtttgtcgtaggttcatgtgcaaccactagtgccttgtgtcgtatattgcatggttcttgtcgaaggaacaatgcctgcgaaagctgatgttaggactgcattaactgaataacatcacccagttgcccaggtctttgtttgtcgtcttaatgagtgatgaaaaagcagtttcgcagaactgctagtgacatg

SEQ ID NO: 32153 - DNA, 2214 bp, Zea Mays
gctcactccaccacttgactctcgtctcgtctctgcactggattggaggttggggccgtgaagggtaggtaggtcgcttgatagggacaaggggggagacggcgagaggcgtttcgccgagcagttcgcgtgctcccctccacaggccgacgcggcgacgccgctgtttcaggttctggaatttccagtgcgggtgcattaggctgctatgggcaagtcgccggggaagtggatcaaatcggtgcttttggggaagaaatctaccaagtcaggtcctaccaagtcgaatgaatctaaggctgacaacaacagatactcgaccggggaggaccgcacattgtctgagagttctcctgtgatttctgagccggtactagttaacatccacaagaacgtagctatcaatgggaaggctgcagatgccagtgatagggcacggcaacaagatccgcagagccaaagcgttgttgagtccagatcatcggctccagctgctcagctgggagaagatcaagctgcagcgaaggcacaggcagcctttcgtggttacctggcacgaaggtcattccgtgcattaaaaggtatcgtaagactccaggcgctgattcgagggtatcttgtaaggaggcaggctgtatcaacccttcgcgcaacatggttgattgtgaagtttcaggctctagttcgtggaagaaatgttagactctctggcagtcgcatgcagctcaatgtgaagtttggtcagagtaactttgggggtgttagatcgtctgatgcatggaaagagaagctatcttcaaatgcttatgttcggaagcttctgtcttcaccaattgttttagaacctcttcacttccagtatgacaagagggatcccaattcaacctataactggtttgagagatggaccataggttgcatctggaagcctgcttttcaacccaaaagagttgctgatgggaaaccactggtaaagaaggctagttatgcaatggaaactcaatcagccaagttaaaacgcaacattcggaagggttctgctgctatcgctgggagtttccatacatctggtgaatctgataaagtaaaaaggaatccaaagaatttctctagcttccctgctgattcagtaccagatagccagttatctgaacttgaaaaggttaaaaggaacctcaggaaggtaactgattcgatggctgaagcctcaaagatatctagttccagggttgattcctcgaaggtatgtaattctacagctgaggttccaaaggaatctaatcctgtggcagaaatctcaaagatacgtagtctcctgaatgggatctctgaccatcaggatattcaatgtgagaatacacgtgaatcttcatttcctcttggaactcaagaagactctgacaatgatcatctattgcgatattcaaatatggatagcttggacttggtacctggtttgaaaagtgatcaggaaattcagctggattcggtttctataggagaaaatgttgatgatcccactgttgttgctccagcagttgaagaaatgtcaccgcaaaacattgatacggaagacaatgttttatgcaagaaagaggaagcaaggtccaaggaagagcacttgtctaatggaagccttagaactagcaagaggaagtcttcattccccaacaaatcagaatatgtagaaaatgggactcacgctactcctgttcagccaaggcagccaagctatatggctgcaacggagtccgcaaaggcgaaattgcgagcccagaattcacccagtctggattctgattcagcggcagaaaagaatggtttcacccgacgccactctcttccttccagtacaaagagtagagcacttaaagctgaatggaagcgctgaagaggcaacccatcgtccacttgaattgaattgtgcactgctctgaaacttcgctggatgaactcgaccggtcttgtcccatgttcttgctgtattgaacaaccccttgtgaagttgcgattctggttcagtttgtcgtaggttcatgtgcaaccactagtgccttgtgtcgtatattgcatggttcttgtcgaaggaacaatgcctgcgaaagctgatgttaggactgcattaactgaataacatcacccagttgcccaggtctttgtttgtcgtcttaatgagtgatgaaaaagcagtttcgcagaactgctagtgacatg

SEQ ID NO: 32154 - DNA, 2096 bp, Zea Mays
attcggtttatattttcagctgcagaggttgagatttcatttactagttactgttccttactgctccaagcgtgcaaactgacgcatgtccttgtagtttctttctctctctctctctctctccttgactcctttatccatattgtataatattttgtttcttccttcctccttcccttgaccgttgaaccatactttttagaaggctgacaacaacagatactcgaccggggaggaccgcacattgtctgagagttctcctgtgatttctgagccggtactagttaacatccacaagaacgtagctatcaatgggaaggctgcagatgccagtgatagggcacggcaacaagatccgcagagccaaagcgttgttgagtccagatcatcggctccagctgctcagctgggagaagatcaagctgcagcgaaggcacaggcagcctttcgtggttacctggcacgaaggtcattccgtgcattaaaaggtatcgtaagactccaggcgctgattcgagggtatcttgtaaggaggcaggctgtatcaacccttcgcgcaacatggttgattgtgaagtttcaggctctagttcgtggaagaaatgttagactctctggcagtcgcatgcagctcaatgtgaagtttggtcagagtaactttgggggtgttagatcgtctgatgcatggaaagagaagctatcttcaaatgcttatgttcggaagaacctcttcacttccagtatgacaagagggatcccaattcaacctataactggtttgagagatggaccataggttgcatctggaagcctgcttttcaacccaaaagagttgctgatgggaaaccactggtaaagaaggctagttatgcaatggaaactcaatcagccaagttaaaacgcaacattcggaagggttctgctgctatcgctgggagtttccatacatctggtgaatctgataaagtaaaaaggaatccaaagaatttctctagcttccctgctgattcagtaccagatagccagttatctgaacttgaaaaggttaaaaggaacctcaggaaggtaactgattcgatggctgaagcctcaaagatatctagttccagggttgattcctcgaaggtatgtaattctacagctgaggttccaaaggaatctaatcctgtggcagaaatctcaaagatacgtagtctcctgaatgggatctctgaccatcaggatattcaatgtgagaatacacgtgaatcttcatttcctcttggaactcaagaagactctgacaatgatcatctattgcgatattcaaatatggatagcttggacttggtacctggtttgaaaagtgatcaggaaattcagctggattcggtttctataggagaaaatgttgatgatcccactgttgttgctccagcagttgaagaaatgtcaccgcaaaacattgatacggaagacaatgttttatgcaagaaagaggaagcaaggtccaaggaagagcacttgtctaatggaagccttagaactagcaagaggaagtcttcattccccaacaaatcagaatatgtagaaaatgggactcacgctactcctgttcagccaaggcagccaagctatatggctgcaacggagtccgcaaaggcgaaattgcgagcccagaattcacccagtctggattctgattcagcggcagaaaagaatggtttcacccgacgccactctcttccttccagtacaaagagtagagcacttaaagctgaatggaagcgctgaagaggcaacccatcgtccacttgaattgaattgtgcactgctctgaaacttcgctggatgaactcgaccggtcttgtcccatgttcttgctgtattgaacaaccccttgtgaagttgcgattctggttcagtttgtcgtaggttcatgtgcaaccactagtgccttgtgtcgtatattgcatggttcttgtcgaaggaacaatgcctgcgaaagctgatgttaggactgcattaactgaataacatcacccagttgcccaggtctttgtttgtcgtcttaatgagtgatgaaaaagcagtttcgcagaactgctagtgacatg

SEQ ID NO: 32155 - DNA, 1343 bp, Zea Mays
ggacatttggagtattcttcagttcaggtccctccaattcccaccatgatctcttggccaaccatctaccatgttcttgaagaaacggttcccctgtatgtagctatgatagtggcctacctatccatacaatggtggaagctgttcacgccagagcagtgctccggtatcaacaagttcgtggcgaagttttccatccctttgctctctttccagatcctctctacaaacaatccttacagcatgaacctgaagctcatattctcagatgtcctacagaaatcgctctccttgctggggtttgcagttgcctctagggtgtgctgcgaggagaagtttgattggctgattacaggtttttctctatcaacgctgccaaataccttgattgttggaatcccattgctcaaaggaatgtatggcgatgaagctgtgaagctgctaagccagatagttgccttgcaaagcctgatttggtacacacttctgttgtttctgtttgagtttcgggctgctagaggaatggctatcacaacatcatctgaagctatagaatcaggtactccaggacctatgcagcaaggacacgaagaggggcaagcgaaaggagtctcggcaagatgttatggtgccttccacttcttactggtggtcagtaggaagctggtgacaaatcccaacatgtatgcaagcctagccggcctgatctgggctctgatcagcttcaggtggcgaatacagttaccatcgatcgtcaacaactccataagaatactttcagatggagggctagggatggcgatgttcagcttaggtgtcttcactgccctgcaaacgaaaatcgtggcatgtggaaccaaaaggatgctgctatcactaggcatcaggttcttcctcgggccaggcctgatggtgatctcttcctatctaatcggtatgcgtggaactttgctgaaggtggccataatacaggctctgcgcaggcagctctacctcaaggaatagtgccgtttgtgtttgccaaagagtataacgtgcatgcggatattctgagcactgcgataattctgggaatgatggttgcggttccggtggccctgggttattacttcgtcatggatcatcccagactctaaccatgtcccatttgcggaaaggattatcctctagattcatattgcgggcgtgcttgtgatattatatctttgtggaggctgtatatatctggattcgtgttagttgacccaagctaatgataacaaccagcttggtttcggtgaattgttcggccagtacttgattagtaaataattgatgcaaaagaaggaagaaggggacgcctg

SEQ ID NO: 32156 - DNA, 327 bp, Zea Mays
gtggccaaggcttcccagcagcactgaagaccatgacactcaatccaacttgcttcactcgtgatgaaaaccaacttgctgcagccttcttgcttcactcgtgatgaaaaccaacaagatgcaatatgccacgaacctaatagaacaaacacatgttcagtttgatgttaaaactgagcagtgcctggcaacgctgcttgagatcaaataaggcatgtacgctcacgtattatggaatcagggtcacctaaagatgcccatgcatgatctgaggacaactgtgtgcaaggggagaatggtacattatcatcgcacgatcactttaat

SEQ ID NO: 32157 - DNA, 1480 bp, Zea Mays
ggtttttttagtgcattcgggtgatcgactgatcgggtcttggactcttggcttgggcagacgaccagacgctagggctgggcaaggcgccgccgcagctctggcactagagaccggccgactgcaccgccgcgccaccgccagcgtgtgccacttcgaccccgccaccgcgccacaactgcttccgtgcaagtctgcagccagccagccagccaggcgctgttcacccgcgctcgcacgatgcagctgccccatgccagcaggtccggtcccaactcgtcgccacccgtcgtcgtcgccggctcgtcgtcatcggctccggcgtctcggcaacaacaatcggaggcgcctcgcggtcgaactctcgcgccgtggccccggtttgcagcccctcgctctcttctaagcaccatggatgtggataatatttgtgatattgacaacaatgtgtctaatgaagatgagatacatggtattgggggggggggggatgttaatggcaatgacagtgaccacatggaggaggaggatcatgttcttacacctactggtagtgaggtgaatgtcagaaaaaacaaatccatagatggagacaatcgtgtggtgaaacgactactagcaaccaagtcaactagtacctctacaagcaagtttatggcatcagcatttaaagcaacaaggtcaaacaagagcacagatttagtgcctcaacctcaagtttcgaaagttgcacaagatgcaagtgcgagtgcaagtgaaaatgcaagcatagctgcaagtgtccaaataagcactgaagatgattgtgatgaagaattagatgtcaagaaaaagaagctcacttcatgggtttgggagcattttacaagcaacaaacaatgtgaagaaagtgtctgaattggatctttacatgagtgacggcctagtgaaggctaatgaagagtcggcatttagctctggtggacgtgtggttgattccttccgttcgaagcttaaacctaaaattattgaagccttggtttgtactaaggattggaagcttgcttcagacaaagatttggagggtgaaataaaaactataagtgaagctatgaatgctatggaggtggacgatgaggttgcgacttgagatcttcaagcaagcatggattgcttgcactatcttatgttatttaaaaactatcctttattgtaatagtctattgtgttgaactgtcttgtgctatgttaaactcttgggtgatgtgaacttatgaacgattgtgttagactattgtatggtgtgaacttattgctatattgtgttgttgatctatggtttatgtaatgctatattgtatgatgtgttgaatgatgtgaacttattgctatattatcatgttgaactattgtcttgtatgatgtgaatttattgttatattgtcatgctagagtactatattgtatgatgtaaacttattgatatattattatgttagag

SEQ ID NO: 32158 - DNA, 1953 bp, Zea Mays
ggtttttttagtgcattcgggtgatcgactgatcgggtcttggactcttggcttgggcagacgaccagacgctagggctgggcaaggcgccgccgcagctctggcactagagaccggccgactgcaccgccgcgccaccgccagcgtgtgccacttcgaccccgccaccgcgccacaactgcttccgtgcaagtctgcagccagccagccagccaggcgctgttcacccgcgctcgcacgatgcagctgccccatgccagcaggtccggtcccaactcgtcgccacccgtcgtcgtcgccggctcgtcgtcatcggctccggcgtctcggcaacaacaatcggaggcgcctcgcggtcgaactctcgcgccgtggccccggtttgcagcccctcgctctcttctaagcaccatggatgtggataatatttgtgatattgacaacaatgtgtctaatgaagatgagatacatggtattgggggggggggggatgttaatggcaatgacagtgaccacatggaggaggaggatcatgttcttacacctactggtagtgaggtgaatgtcagaaaaaacaaatccatagatggagacaatcgtgtggtgaaacgactactagcaaccaagtcaactagtacctctacaagcaagtttatggcatcagcatttaaagcaacaaggtcaaacaagagcacagatttagtgcctcaacctcaagtttcgaaagttgcacaagatgcaagtgcgagtgcaagtgaaaatgcaagcatagctgcaagtgtccaaataagcactgaagatgattgtgatgaagaattagatgtcaagaaaaagaagctcacttcatgggtttgggagcattttacaagatggtgtgatagtagtgatcccataatctgcactatggcatactctatgagagacaagtttgataagtactgggagatgaacaatatggctttggcagtgggagcatttcttgatcctaggtacaaacacagaatggttgagctatacatgtctaagatgtatgatagtgagatggccgagttggagaaaatgacattcatgaatgttatcaatgaattatttgcattctattcatcaaccatcaatgcaaaatcaactaataagggtactagctcgaaggattctgtggcaagcaaaaatgttgttttgatggatgacgatgatgagaatgaggttaatcttgatgagttatatgcagcaacaaacaatgtgaagaaagtgtctgaattggatctttacatgagtgacggcctagtgaaggctaatgaaggtgatgcaccatttgatgccttatcatggtggaaggggcaagtgacaaattttcctattctttctagccttgctcgtgatgtactatcaatgcaagtgtcaactgttgcttcagagtcggcatttagctctggtggacgtgtggttgattccttccgttcgaagcttaaacctaaaattattgaagccttggtttgtactaaggattggaagcttgcttcagacaaagatttggagggtgaaataaaaactataagtgaagctatgaatgctatggaggtggacgatgaggttgcgacttgagatcttcaagcaagcatggattgcttgcactatcttatgttatttaaaaactatcctttattgtaatagtctattgtgttgaactgtcttgtgctatgttaaactcttgggtgatgtgaacttatgaacgattgtgttagactattgtatggtgtgaacttattgctatattgtgttgttgatctatggtttatgtaatgctatattgtatgatgtgttgaatgatgtgaacttattgctatattatcatgttgaactattgtcttgtatgatgtgaatttattgttatattgtcatgctagagtactatattgtatgatgtaaacttattgatatattattatgttagag

SEQ ID NO: 32159 - DNA, 1938 bp, Zea Mays
ggtttttttagtgcattcgggtgatcgactgatcgggtcttggactcttggcttgggcagacgaccagacgctagggctgggcaaggcgccgccgcagctctggcactagagaccggccgactgcaccgccgcgccaccgccagcgtgtgccacttcgaccccgccaccgcgccacaactgcttccgtgcaagtctgcagccagccagccagccaggcgctgttcacccgcgctcgcacgatgcagctgccccatgccagcaggtccggtcccaactcgtcgccacccgtcgtcgtcgccggctcgtcgtcatcggctccggcgtctcggcaacaacaatcggaggcgcctcgcggtcgaactctcgcgccgtggccccggtttgcagcccctcgctctcttctaagcaccatggatgtggataatatttgtgatattgacaacaatgtgtctaatgaagatgagatacatggtattgggggggggggggatgttaatggcaatgacagtgaccacatggaggaggaggatcatgttcttacacctactggtagtgaggtgaatgtcagaaaaaacaaatccatagatggagacaatcgtgtggtgaaacgactactagcaaccaagtcaactagtacctctacaagcaagtttatggcatcagcatttaaagcaacaaggtcaaacaagagcacagatttagtgcctcaacctcaagtttcgaaagttgcacaagatgcaagtgcgagtgcaagtgaaaatgcaagcatagctgcaagtgtccaaataagcactgaagatgattgtgatgaagaattagatgtcaagaaaaagaagctcacttcatgggtttgggagcattttacaagtgatcccataatctgcactatggcatactctatgagagacaagtttgataagtactgggagatgaacaatatggctttggcagtgggagcatttcttgatcctaggtacaaacacagaatggttgagctatacatgtctaagatgtatgatagtgagatggccgagttggagaaaatgacattcatgaatgttatcaatgaattatttgcattctattcatcaaccatcaatgcaaaatcaactaataagggtactagctcgaaggattctgtggcaagcaaaaatgttgttttgatggatgacgatgatgagaatgaggttaatcttgatgagttatatgcagcaacaaacaatgtgaagaaagtgtctgaattggatctttacatgagtgacggcctagtgaaggctaatgaaggtgatgcaccatttgatgccttatcatggtggaaggggcaagtgacaaattttcctattctttctagccttgctcgtgatgtactatcaatgcaagtgtcaactgttgcttcagagtcggcatttagctctggtggacgtgtggttgattccttccgttcgaagcttaaacctaaaattattgaagccttggtttgtactaaggattggaagcttgcttcagacaaagatttggagggtgaaataaaaactataagtgaagctatgaatgctatggaggtggacgatgaggttgcgacttgagatcttcaagcaagcatggattgcttgcactatcttatgttatttaaaaactatcctttattgtaatagtctattgtgttgaactgtcttgtgctatgttaaactcttgggtgatgtgaacttatgaacgattgtgttagactattgtatggtgtgaacttattgctatattgtgttgttgatctatggtttatgtaatgctatattgtatgatgtgttgaatgatgtgaacttattgctatattatcatgttgaactattgtcttgtatgatgtgaatttattgttatattgtcatgctagagtactatattgtatgatgtaaacttattgatatattattatgttagag

SEQ ID NO: 32160 - DNA, 4276 bp, Zea Mays
caaagacccaaacccaagcgccgccactgccagccatgtcgtctcgcttccaccacggcggcggcgacgaccaccgcgtgggcgacgcgggcgacgccgccctcgcccgcgacatcgtcacgctccacaaggcgctctccctcgacccttccacccaccgccgccgcaccctaccactcccctccccatcccccgtcgtcactgagcagccgcgtaacaagccccgtctcaagccctcctcctcctcgtcgtcgtcgcgtaagctcctgccgtccacccctaactcctcctccgcttccacttcctcgtcctcgtcttccttctggaagaagtccctgactgccatttcgcacctgggccgccgccgcctcgacttcgcgttcgcgctgcatgtgcactccgtcaacggcctccccgctgcgctcgatgggtctgcggtctccgtacgcttccgccgaatgtccgtgtccgcctccacccgccccgtcgtggcggccctcggcgccgccgcgttcgaggaggcgctcacgctgcggtccccggtctacttctcccgcggcgcaaaggccgtggtcaagtacgagccccgttcctttgttgtctccgtcgccgcctccactctcgagcttggtaagcacgaggtcgacctcacccgcttgctcccgctctcgttcgacgatctcgaggacggcggcgactccggcttcgggaagtggagcagcagcttccggctgtccggccccgcccgcggcgcgcggcttaacgtaaccttctcttgctcgctcctcgcgggtggcgtcggcagcgagcagcacaaggccgtggaagtggcgggggtgcggcgcggatcgatggcgcggccggtgtcagtgcaggcaccaacgcctgtgcccgcgcggagcagggacgtgagggtgctgcacgaggtgctgcccagcttgaggtctgccaggtcgctgccttttgttggtgatgggggtcttgatgcgaggaaggaggaggtggcagcactggactgcatggaggacgggtctccggaggcaaagcactgcacatcagtagaggttaagaagggggacttggtgcgcccagatggggattgcagcacgatggagttcaatgttgttgggcatggagttgaggttgcttcatatgacccacaaaggctcaaacatgtggaaaccagcaatgaggctgatcaaaatgaggatccagggttcaaaattgacgaagaggtatcattcaagcctgtgctagtatgtggtgatgtcgctgaggatcagactgttggagtgaagactgaggtggcagtctgtgatgttgctgttcaaagggagaatgtggaagacaaacatgatggaataatcaaagccaattcactgcctacctctgctctcgaagcagaggatcagttgggagcagatgtagaactggaggacctggaatgtattttgaacgagctcttagttgctaagccggaggaatttgaatcaccagtagtagaagataagtattctaggcgattgagttgcacagctgatagttacaagtctgacagtaggaagggcagatcacgcagcatggatatttcaacagattctgttgctaatgagttcttggatatgcttgcaatagagcatatcccatttgggcaaccctcagatagtgatcccgagtcaccgagggaacgactttggaagcagtttgaaaaggaagcactagcatctgacaaagctattcttggtttggactttgatgatggaattgaaggacctatttgtgagaatgttgtggaggatttcgatctctctgcaatgatacatgaggctgagctcgagcttcagaatggaagtcaacccattgataccaaatttcgagctaagtcgctggaagacgaagaaactgaggccttaatgcgtcaatttgggctaaatgagaagtccttccaatcttctcctcctgaaagtagaagtgggtttggtagccccattaacctcccacctgagcaacccctggagctaccaccattggctgaaggtttaggtccatttattcagaccaaagatggaggatttctgcgatcaatgaacccagccctgttcaaaaatgcacaaaacagctgcagcttggttatgcaggcttcttccccgattgtactgccggcagagatgggatctgggattatggatatattgcatggtctggcatcagttggaattgagaagttatcaatgcaggcaaacaaacttatgcccctagaagatgttaatggtaaaatgatgcagcagattgcctgggaggctgctccagctctggagtctgctgaaagatatgacccgttggactatcatagcgttgatgctttggtaggagggggtggaaatgctccctccagtaagaagaagaaatgtaggtgtgctgatctttcatcatccttgggtggggagaatgcttcagaatatgtttcacttgaggaccttgcaccattagctatggaaaagattgaagccctttccattgagggtttgaggatacaatctggcatgtcagaagaagaggcaccctccaatatcagtgcaaagcctattggggaattttcatctctgcaaggaaagtgtgcagagaatacctggtcccttggtttagagggaactgcagggttgcagcttctggatgttaagcagagtggagaagaagttgatggattaatgggcttatccatcactctagatgagtggatgaggcttgattctggggtggtggacgaagaagagcaatacagtgaccggacatcaaagatacttgctgctcaccatgcaaaatccatggagttagctgctgagaatcggaatggggacagaaagaacaggagatctggtagaagatggggcctgttaggaaataactttacagttgctctcatggttcaactccgtgacccactgcgcaactacgagccagtgggcacaccaatgcttgcattaattcaagttgaaagggtttttgtacccccaaagcccaaaatctacagtactgtctcagacaaaggcaacagcgagcaggatgatgaggaacccaagaccgaaaaggttccagataaggcattggtcacggaagagaaggctgaggaattagaggatcccattccccaattcaaggttacagaagtgcatgtcgctggtttcaagagcgaacctgagaagaagaaaccatggggcaatcaaacgcagcagcagtctggctctagatggttgcttgcagctggaatgggcaagggaaacaagcatcctctgatgaaatccaaagctatagtgaagccaaccaaagaggcagctggtcaggcaggagacatcctctggagcatttcttcacgtgttcatggagccgggaccaggtggggcgagctaacaggaagcaagagtcattcacggaacccaaatatcatgcttcaaaaggacaagagatttcggtgatggcttggtggtcagtagttagcgctgggaaggacggacggttggtctatctcattagaaaggggacgtagcaattggaatgtccttggtggattgtgaaaccatgtacattgagttctcttgcataggatcagtactttttatatgctgcacagttcgtgatcggtgttccttccgaactctcgtgagaaccgtgcatagaaactgttgtttcttttgccacatttaagagcagcttctgcctctgaagatttgcagcgctgggcagaggtcagtgcggcagcgttgacgccccgtggctgtgatgattctatctacgagggtccccatgatccataaaaagcttcgttggttggacgcaagctttgtctaaggaatttgcgggtcgtgtctcgatcgacagctcatcaaaccatcattcggcacagggacaaaagaaaaaatggatggaatctgttctcgtgatagcctcccccgtctcgttctacacttctactcatgcatgccatttcgtccggctttgtcgcaagcccagctgccgagatcaaactagggctggaaacgagtcgagctcggctcggtgtggctcggtgcctgaatgagctcggctcggctcgtccattccacgagccggtgaaagaggctcggctcgcgagccatattttggtgcttttcgttgcattatttggtgaattaacattatataaatttgaaatatagaatcaccattctacattatgagtaaattaaattataacttgtaatatattcatcatcaaagactaaaaaatgagctattatcc

SEQ ID NO: 32161 - DNA, 278 bp, Zea Mays
tctggaagcaagcttctgtcgacaccgtgggagcgggttagagtgcggtgcgggggagagaggaccgccacatcttgggctcgccggtgctgcccttctacaccagtggggtggttctggggcttcgccagcacgcggggaagctttgcctggttcgtgcgcatcggggttgtggccggagcctgggtaatttctcgacggaattttggcctccgtggtgtggccaccgagcaccgcagattggacacgtgatcgcataacagaagcggtgaggacac

SEQ ID NO: 32162 - DNA, 312 bp, Zea Mays
cttctgtcgacaccgtgggagcgggttagagtgcggtgcggggggagagaggcccgccgcatcctgggctcgccggtgctgcccttctacaccagtggggtggttctggggcttcgccagcacgcggggaagctttgcctggttcgtgcgcatcggggttgtggccggagcctgggtaatttctcgacggaatttcggcctccgtggtgtggccaccgagcaccgcagattggacacgtgatcgcataacagaagcggtgaggacacgagtcacctgaagagcaagttggtacctggaatctcaagtcccag

SEQ ID NO: 32163 - DNA, 9031 bp, Zea Mays
cgaaaatctccgcgccgcgctggtgcgctcgtggtgagaacccgatcgcacgttggcgcgagcgggcggcgcagattattccccatttttttctaattgcgttacatgacagtcgcgcccggctggcttcgcctggccgtggcacccctcacctctctctctctctctctctctctctctcccctgtccgcggtcgcgtcgccttccaccaccaccccaccagcccacccgcatccgcgtcgctgctgctgctgccaccgtcgtgcgtctccgcgccacgcgtgcgcgtacccgtggcggatcgcgctgcagcagaggcgatcggcgagcgatccaggggaggagatcgcttgtcggcgccgccgctgccgccgccgatcgagccgcgactcctcccgttcggtcccctcgcagctcccgtccgggcccgtccctcgaggcagggcggggtggctcgatcgcccgcagatgaaacatggcttcgacgttaaacattgtaataggttctcatgtatgggtggaagataaagatttgtcctgggttgatggcgaggtatcccggattgatggtaaaaaagcccatgttcgcacaaccaaggggaagacggtcattgcaaatatatcggatatccaccctaaagacacagaagcaccgcctgatggggtggatgacatgacaaggttatcatacttgcatgagcctggtgttttagataacctggctgtcagatatgcgaaaaatatcatttatacctatactggtaacattctgattgcaataaatccattccaaaggctacctaatctggttgatgcccgtactatggaaaaatacaaaggtgcaaatcttggtgacctagatcctcatgtatttgcaatagctgacgtctcttacaggcaaatgataaatgaaggaaagagtaactccattttggtcagtggtgaaagtggtgctggtaagactgaaactacgaagttgttgatgggatatcttgcatatctgggtgggcgatctggaacaggagagaggacagttgaacagcaagtattagaatctaatccagttcttgaagcctttgggaatgcgaaaactgttcggaacaacaactcaagtcgatttggtaaatttgttgaaatccaatttgacaagagcggtaagatatctggtgctgccattagaacttacttgctcgagagatctcgagtttgccaaattaatagtccagagaggaactaccattgcttttacttcctatgtgcagcaccatcagaggatctcaagaagtataagctcggggacccatcgttgtttcactatctcaaccagtcagcttgtattaaagttgatggaatcaatgatgctgaagaataccttgcaacaagaaaagcaatggatactgttggcattactgatcaagaacaggaagctatattccgggttgttgctgctgtgcttcatcttggaaacataaattttacaaaagggagagaagcagattcatccataataaaggatgacaaatctagattccatcttaatacagcaggagagctcttaatgtgtgattgtgagaagttggagaatgccttgataaagagggaaattaatacaccagaaggagtgattaccacaacagttggtccgaattctgctactattagccgggatggtttagcaaagcagatatactctcgattgtttgactggcttgtaaacagaataaatgcatcgataggacaagacccaaactctaacaaactgattggggtacttgatatatatggttttgaaagttttaaaaccaacagttttgaacaactgtgcatcaattttaccaatgaaaaactccagcaacattttaatcagaatgtcttcaaaatggaacaagaggaatacacaagggagcaaattaattggagttacatagagtttgttgacaatcaagatgtacttgacctgattgaaaggaaaccaggtggcattattgcgcttcttgatgaagcctgcatgtttccaaagtccacacacgagacattgtctcagaagctgtacgaaaagttcaagaaccacaaaagatttaccaaaccaaagctttctcgtactgcatttacaattcaacattatgctggagatgtaacatatcaatctgatcaattcctggacaagaacaaggactatgtggtagcagagcatcaggaattacttaatgcttctaagtgctcttttgtatcagggttatttccacaagcaacagaagagaacacaaaatcatcaaaatcctcaattgcaactcgctttaagatacaacttcatgaactcatggagactttgagctctacagagccacattacataagatgtataaaaccaaatagtgtccttaagcctggcatttttgagaataccaatgttctgcagcagcttcgatgttctggtgttcttgaagccattagaatcagctgtgctggttatcccacaaggaaactatttcatgattttctacatcgttttcgtgttcttgctcctgaaattttgaaagagaaaaatgatgaaaaagtctcctgtcaaaaggttttggacaaaatgggactacagggttatcagataggaagaactaaggtattcctgagggctggtcaaatggctgatctggatgccagaagaacagagatgcgaaacaatgcagcaaaaggcgttcagagtcaattccgtactcatgttgctcgtgagcagttcctagtactacgggacacatctatttatttgcaatctttcgttagagccagattggcatgtaagcaacatgaattcctgagacaacaagcagcagctttgagaattcagaaaaatgcacgatggtattttgcctggaaaacttattaccaactacgattgtcagccattacattgcaggccgggctaaggtccatggcagctcgtaatgagttcacctttagaaagaaaaataaagcttcagtccatatccagtcccagtggcgatgccaccgagattactcaaattatatgaatttgaagagagccgcactaacatatcagtgtgcttggcgaagaagggttgctaggaaggagctgaggaagctcaaactggctgcaagagatacacaggctctaaaggtggccaaagagaaacttgaggaacgtgtggaagagctaacaagtcgcctggaccgcgaaaagaaactaagggctgatttggagaagtctaaagcagatgaagtttccaaattgaaagaagctcttcatgagatggagcagcgagtagaagaagtgaaagcgatgcaggaacaagaatcagcaaaaaaggctgttgaagaagctctagctcaagaaagagaaaagatcagtttattgactactgaaattgagggcctaaaggttctgctagtagctgaacgagaggagaatgataaaatgaagaaagcgcatgctaatgctctggaaacaaatgaagagttaaataaggaagtcagtgatgcagatgaaaagatcaaacaatttagtgatactgtaagaagactagaagggactgtaagcgaacatgagggccttttgctaactgaaaggcaacaaaatgaagcagctaatgctgcacttgctgaatctcaagcgagaaatgaagcactggtaagcaagcttgaagatgctgtgaaacaaaatgatctcctccatgaagctgaccaaagatttcaagaagctacaaaaaatttggaatcttcactgacatttgagaagcaacgacatgaggcaaatttgatagaattagctgaagcacgagaaaagattgaagaacttcaaagagaagttggggacactgatgaaaaattcaccctgcttcagactagtatacaaagcgttgaagaaaggttaagagagaaggatgctctattgacaacagaaagactagaaagtgaagcaactaagaaatcactaaatgaatctgaggatagaaaccaggacttactactgaaaattgaaattgctcagaaagacattgctcacttccaagaaaccgtccgaagacatgaagaaaatatggcagcactggaaacttcgttgagatctgaaaggcagcaaaatgatgcaatcatgaaacaactagctgaatctcagggggaaataggagagctgcaaaggaagcttgaagatgctgatgccagaaatgggcttcttcaagattctttacagagacatgaagaaaatatggcagcactggaaacttcgttgagatctgaaaggcagcaaaatgatgcaatcatgaaacaactagctgaatctcagggggaaataggagagctgcaaaggaagcttgaagatgctgatgccagaaatgggcttcttcaagattctttacagagacatgaagaaaatatggcagcactggaaacttcgttgagatctgaaaggcagcaaaatgatgcaatcatgaaacaactagctgaatctcagggggaaataggagagctgcaaaggaagcttgaagatgctgatgccagaaatgggcttcttcaagattctttacagagacttgaagacgatgctactacaagagaagctttaatggaaactgaaaggaaagaaactgaaatgacaaaaaagacactgactgaagctctggatcaaatcgaggaattagtcaaagaagttgagtgtgctaaccacagtgtgcatcagcttcaagatagtatgcagagaatggagcaaaccgcagttgcaagggaagcaactttactagcagaacatcaggaaaaagatgcgacatcaaaagcattagcagaggcacaagggaggattgaaggtttactgaaggaaatttattctgctaatagaaaaaatgatcaacttcaaagtactatagaaaggttagaagagggtgcaacaacgacagatgctctttacttagcagaaagaaaagggcatgatcaaacgaagaaatcactttctgaagctcaagaaacaaacaaggagttactaaaaaaaattgagaaagctgagaaaaacatagatcagcttctggagaatgtggaaagacttgaaaaagatgcaattacaagagagtctttactgcttacaacaaagcaaagctatggtgacaccgcaaaattgctgcttgaatctcaagagaaaaaccaagagttagtgcacaaagtagaggactcagatagcaaaattgttctgcttgaagattcagtaaaaagactcgaagaaagtactgcagataaagattctttattggctatagaaagacatgaaaacagtgaaaccaagaaagaattagttggttctcagaaaaagattgcggaattgctaactgaagtgcaagatactcgtgcaaatgttgcagaacttgaggacttgattaggagactcgaaggaaaattggcaataactgaagctttattgctaactgaaaaggaacagaatgcttccaccttaaaattacttgcagaagcacaattgagaatcgaagaattaataaaaaaacttgaaggttcagatagaaaatctgatagccttcaggatacaataacaagacttgaacaagatgtcactgccaaagaggccttattgcttacagaaaaggaggcacacgacgcaacaaggaagactctgactgaagctcaggaagagagtggagaacttctgaagaaaattcatgataatgataaacatattcttcagcttcagtttactatacaaaggcttgaggaaactacagttgcaaatgagaatttgctgttgagggagagggagcagaatgacataacaacaaaagcgcacaatgaaagtcaagaaaaatatgaagaattactaagcaaatttgttgatgttgacaggaaaatcgaccttcttcaaggtaccatagaaaggcttggagaaaatacaacaaaggattctctgttgctatcagagagacatgaaaaggatgctattaagaaagcacttactgaggctcaagagaaaaatgaagagttactgatgaaagttgaagatgctaatgaaaaaatagaacaacttcaaactacgatagatatgcttgaagataatgtagctgcaaaagatgtttctttagaagctgcaatgaaggaaaatgatgcaattaggagatctcttactgaagctcaagagagaaatgatgaattactcaagaaaattagtgacagtgaatacaggatccatttacttcaagacacgatacaaaagcttcaagtagatgcaatatcaagattgtcgtcttttgtaatggaaaaacaagaaagtgatgcttcaaagagagctgttactgaagctcatgaaagaaatgaagatttactgaagagaaatgaggacctcctcaagaggaatgatgatctgattaagaaaattgaagactctagtaaaattgtcactcaacttcaggaagctctacaaaggcttgaaggaaaagcatgcaacttagaggctgagaaccaagttcttcgtcaacaagcaacttcaactccaccaacttcagctaaatctccagcttcacgtgcaaagatctcaaggatccatagaagtccagagaatggccataatttgaatggtgacattaggcaaactgaaatgaagccctccactggcacatcagaagcaataacctcagcagctaatgttcctgacttgggcgaccaaaaagattttgaacatggagaaaaactgcaaagaataccaaaacagaaatatcagccttctcatcaccagcagccccaggacgatcagcagtggctactcgcttgtattccacaacatcttggattttctgggagcaaaccagttgcagctctccttatataccaatgccttctccattggaaatcatttgaagccatgaagacaggtgtcttcgacagcattttgcatgctataaactcagccacagaggctcaaaatgacatgagaacattggcatattggttgtccaacttatctacattaacagttctccttcaacgatcattcaaaactactaggacggcaatctcaactccacaaaggagaagattttcatcggagaggatctttcatggaaatcaaacttcaaatgctgggcttgcttatctcagtggtcaatcagttgttgggtctgctggactgccccaagttgaagcaaaatatcctgctttgctattcaaacagcagctcgtggatctaattgaaaaggtttatggcatgataagtgacagcgtgaagaaggagctaaaccctttgcttgaattgtgtatacaggatccacgaacttctcactcgagtatcgcaaaaggcaatcttaatggcatgggtcaacagaaccaactcacatattggctgggcatagtgaaaattctcactagctacttggatgtactgagggtaaatcacgttccatcaattctggtgcataaactcttcactcagatattctcattgattgatgttcaactatttaaccggttacttttgcggcgtgagtgctgttcttttagtaacggggaatatgtcagagctggactaactgaactaaaacattggtccgacaatgctacaagagagtttgcaggttcagcgtgggaggcattgaggcatattagacaagctgtcgatttcctggtgatttctcttaaaccaatgaggacattaagagagatacacactgatgtgtgccctgccctcagcatacaacagctagagcgaatagttagtatgtactgggatgatgtgaatggaacaaacactatttcagcagagtttacatcaagcttgaaatctgcggtgcgtgatgaatcgaatatggccacaagtttttctatattgctagatgatgattccagtatacctttttcacttgatgatattacaaagacactgccagtcattgaggtggctgatgacgactttgtgccttttgtccatgaaaacccaagctttgcgtttttattgcaaagaggggagtagtccatttttcctcaccatggtgacttcacccacctgtggataagtcaggattcctgcctaggatgtacagtacgcgtgattctttttgtaccaggtagcaaggcattaaagattagatgctaggtgagcttataggattctggttttattgatttgtgtgttgattgtccatttgtattcaggttttccttgccattttttttctgtttgtagttatttttttgggcttgtatactaggggctaagggcagaaggccctgtcctgtaagcaaagtagcacaaggttttgctgtaggtgggaaagctgtacatgtgttgtaggagggggagtagcggttatcctgctggtcagggctaagaacgacagttgttgagaaggcaacggttatgccgtttttcctggatgagcagaatatcttgtcctggactgctggacagcagagcagtgcccacggaggtctctgcgcgctcgatcgcgacgatgcggccactatggtagtagatgcactcattacctgttatactagtaatttgctcgcgcctcgcgcaagtcgttaaccgatgagtttatacaattaaaagagtgttgctttagccatataaatacagaagtagtaatatatgtggatacataaacatagaagtgacaaaattatataaacatacaattgtttgcgttggtagataagttcagtagcatcgtgagcagcctagatgtcaaaattttgaagacaacaaaatactggtcttgaaggccacaaaatgcagagcaacattacaatgcacggatccttttcatgatcgtgctcactttttatgaaattcattgcttgttgtattgaatgtatatgtatacattaaggtacaattattagaattgtctcaatatgtaacgaagtaacatgaatagatagctttgcttagcacagaatgtcatgtgaatgtagcaaaaaataagtcagttttataattattatcgatttttattgtgctatcgtttgtcatgtaatatactttaagtatgatttagatttttttcgcaaaaaaaatgaataagac

SEQ ID NO: 32164 - DNA, 1083 bp, Zea Mays
ctggcttcgcctggccgtggcacccctcacctctctctctctctctctctctctctctcccctgtccgcggtcgcgtcgccttccaccaccaccccaccagcccacccgcatccgcgtcgctgctgctgctgccaccgtcgtgcgtctccgcgccacgcgtgcgcgtacccgtggcggatcgcgctgcagcagaggcgatcggcgagcgatccaggggaggagatcgcttgtcggcgccgccgctgccgccgccgatcgagccgcgactcctcccgttcggtcccctcgcagctcccgtccgggcccgtccctcgaggcagggcggggtggctcgatcgcccgcagatgaaacatggcttcgacgttaaacattgtaataggttctcatgtatgggtggaagataaagatttgtcctgggttgatggcgaggtatcccggattgatggtaaaaaagcccatgttcgcacaaccaaggggaagacggtcattgcaaatatatcggatatccaccctaaagacacagaagcaccgcctgatggggtggatgacatgacaaggttatcatacttgcatgagcctggtgttttagataacctggctgtcagatatgcgaaaaatatcatttatacctatactggtaacattctgattgcaataaatccattccaaaggctacctaatctggttgatgcccgtactatggaaaaatacaaaggtgcaaatcttggtgacctagatcctcatgtatttgcaatagctgacgtctcttacaggcaaatgataaatgaaggaaagagtaactccattttggtcagtggtgaaagtggtgctggtaagactgaaactacgaagttgttgatgggatatcttgcatatctgggtgggcgatctggaacaggagagaggacagttgaacagcaagtattagaatctaatccagttcttgaagcctttgggaatgcgaaaactgttcggaacaacaactcaagcatttcaggaaatcttatagcagctctggtgaaagttatgtggcatacttaacccttttttggtcaccatagtcactagttaaacaagcccg

SEQ ID NO: 32165 - DNA, 8851 bp, Zea Mays
ccgcggtcgcgtcgccttccaccaccaccccaccagcccacccgcatccgcgtcgctgctgctgctgccaccgtcgtgcgtctccgcgccacgcgtgcgcgtacccgtggcggatcgcgctgcagcagaggcgatcggcgagcgatccaggggaggagatcgcttgtcggcgccgccgctgccgccgccgatcgagccgcgactcctcccgttcggtcccctcgcagctcccgtccgggcccgtccctcgaggcagggcggggtggctcgatcgcccgcagatgaaacatggcttcgacgttaaacattgtaataggttctcatgtatgggtggaagataaagatttgtcctgggttgatggcgaggtatcccggattgatggtaaaaaagcccatgttcgcacaaccaaggggaagacggtcattgcaaatatatcggatatccaccctaaagacacagaagcaccgcctgatggggtggatgacatgacaaggttatcatacttgcatgagcctggtgttttagataacctggctgtcagatatgcgaaaaatatcatttatacctatactggtaacattctgattgcaataaatccattccaaaggctacctaatctggttgatgcccgtactatggaaaaatacaaaggtgcaaatcttggtgacctagatcctcatgtatttgcaatagctgacgtctcttacaggaaacaggcaaatgataaatgaaggaaagagtaactccattttggtcagtggtgaaagtggtgctggtaagactgaaactacgaagttgttgatgggatatcttgcatatctgggtgggcgatctggaacaggagagaggacagttgaacagcaagtattagaatctaatccagttcttgaagcctttgggaatgcgaaaactgttcggaacaacaactcaagtcgatttggtaaatttgttgaaatccaatttgacaagagcggtaagatatctggtgctgccattagaacttacttgctcgagagatctcgagtttgccaaattaatagtccagagaggaactaccattgcttttacttcctatgtgcagcaccatcagaggatctcaagaagtataagctcggggacccatcgttgtttcactatctcaaccagtcagcttgtattaaagttgatggaatcaatgatgctgaagaataccttgcaacaagaaaagcaatggatactgttggcattactgatcaagaacaggaagctatattccgggttgttgctgctgtgcttcatcttggaaacataaattttacaaaagggagagaagcagattcatccataataaaggatgacaaatctagattccatcttaatacagcaggagagctcttaatgtgtgattgtgagaagttggagaatgccttgataaagagggaaattaatacaccagaaggagtgattaccacaacagttggtccgaattctgctactattagccgggatggtttagcaaagcagatatactctcgattgtttgactggcttgtaaacagaataaatgcatcgataggacaagacccaaactctaacaaactgattggggtacttgatatatatggttttgaaagttttaaaaccaacagttttgaacaactgtgcatcaattttaccaatgaaaaactccagcaacattttaatcagaatgtcttcaaaatggaacaagaggaatacacaagggagcaaattaattggagttacatagagtttgttgacaatcaagatgtacttgacctgattgaaaggaaaccaggtggcattattgcgcttcttgatgaagcctgcatgtttccaaagtccacacacgagacattgtctcagaagctgtacgaaaagttcaagaaccacaaaagatttaccaaaccaaagctttctcgtactgcatttacaattcaacattatgctggagatgtaacatatcaatctgatcaattcctggacaagaacaaggactatgtggtagcagagcatcaggaattacttaatgcttctaagtgctcttttgtatcagggttatttccacaagcaacagaagagaacacaaaatcatcaaaatcctcaattgcaactcgctttaagatacaacttcatgaactcatggagactttgagctctacagagccacattacataagatgtataaaaccaaatagtgtccttaagcctggcatttttgagaataccaatgttctgcagcagcttcgatgttctggtgttcttgaagccattagaatcagctgtgctggttatcccacaaggaaactatttcatgattttctacatcgttttcgtgttcttgctcctgaaattttgaaagagaaaaatgatgaaaaagtctcctgtcaaaaggttttggacaaaatgggactacagggttatcagataggaagaactaaggtattcctgagggctggtcaaatggctgatctggatgccagaagaacagagatgcgaaacaatgcagcaaaaggcgttcagagtcaattccgtactcatgttgctcgtgagcagttcctagtactacgggacacatctatttatttgcaatctttcgttagagccagattggcatgtaagcaacatgaattcctgagacaacaagcagcagctttgagaattcagaaaaatgcacgatggtattttgcctggaaaacttattaccaactacgattgtcagccattacattgcaggccgggctaaggtccatggcagctcgtaatgagttcacctttagaaagaaaaataaagcttcagtccatatccagtcccagtggcgatgccaccgagattactcaaattatatgaatttgaagagagccgcactaacatatcagtgtgcttggcgaagaagggttgctaggaaggagctgaggaagctcaaactggctgcaagagatacacaggctctaaaggtggccaaagagaaacttgaggaacgtgtggaagagctaacaagtcgcctggaccgcgaaaagaaactaagggctgatttggagaagtctaaagcagatgaagtttccaaattgaaagaagctcttcatgagatggagcagcgagtagaagaagtgaaagcgatgcaggaacaagaatcagcaaaaaaggctgttgaagaagctctagctcaagaaagagaaaagatcagtttattgactactgaaattgagggcctaaaggttctgctagtagctgaacgagaggagaatgataaaatgaagaaagcgcatgctaatgctctggaaacaaatgaagagttaaataaggaagtcagtgatgcagatgaaaagatcaaacaatttagtgatactgtaagaagactagaagggactgtaagcgaacatgagggccttttgctaactgaaaggcaacaaaatgaagcagctaatgctgcacttgctgaatctcaagcgagaaatgaagcactggtaagcaagcttgaagatgctgtgaaacaaaatgatctcctccatgaagctgaccaaagatttcaagaagctacaaaaaatttggaatcttcactgacatttgagaagcaacgacatgaggcaaatttgatagaattagctgaagcacgagaaaagattgaagaacttcaaagagaagttggggacactgatgaaaaattcaccctgcttcagactagtatacaaagcgttgaagaaaggttaagagagaaggatgctctattgacaacagaaagactagaaagtgaagcaactaagaaatcactaaatgaatctgaggatagaaaccaggacttactactgaaaattgaaattgctcagaaagacattgctcacttccaagaaaccgtccgaagacatgaagaaaatatggcagcactggaaacttcgttgagatctgaaaggcagcaaaatgatgcaatcatgaaacaactagctgaatctcagggggaaataggagagctgcaaaggaagcttgaagatgctgatgccagaaatgggcttcttcaagattctttacagagacatgaagaaaatatggcagcactggaaacttcgttgagatctgaaaggcagcaaaatgatgcaatcatgaaacaactagctgaatctcagggggaaataggagagctgcaaaggaagcttgaagatgctgatgccagaaatgggcttcttcaagattctttacagagacatgaagaaaatatggcagcactggaaacttcgttgagatctgaaaggcagcaaaatgatgcaatcatgaaacaactagctgaatctcagggggaaataggagagctgcaaaggaagcttgaagatgctgatgccagaaatgggcttcttcaagattctttacagagacttgaagacgatgctactacaagagaagctttaatggaaactgaaaggaaagaaactgaaatgacaaaaaagacactgactgaagctctggatcaaatcgaggaattagtcaaagaagttgagtgtgctaaccacagtgtgcatcagcttcaagatagtatgcagagaatggagcaaaccgcagttgcaagggaagcaactttactagcagaacatcaggaaaaagatgcgacatcaaaagcattagcagaggcacaagggaggattgaaggtttactgaaggaaatttattctgctaatagaaaaaatgatcaacttcaaagtactatagaaaggttagaagagggtgcaacaacgacagatgctctttacttagcagaaagaaaagggcatgatcaaacgaagaaatcactttctgaagctcaagaaacaaacaaggagttactaaaaaaaattgagaaagctgagaaaaacatagatcagcttctggagaatgtggaaagacttgaaaaagatgcaattacaagagagtctttactgcttacaacaaagcaaagctatggtgacaccgcaaaattgctgcttgaatctcaagagaaaaaccaagagttagtgcacaaagtagaggactcagatagcaaaattgttctgcttgaagattcagtaaaaagactcgaagaaagtactgcagataaagattctttattggctatagaaagacatgaaaacagtgaaaccaagaaagaattagttggttctcagaaaaagattgcggaattgctaactgaagtgcaagatactcgtgcaaatgttgcagaacttgaggacttgattaggagactcgaaggaaaattggcaataactgaagctttattgctaactgaaaaggaacagaatgcttccaccttaaaattacttgcagaagcacaattgagaatcgaagaattaataaaaaaacttgaaggttcagatagaaaatctgatagccttcaggatacaataacaagacttgaacaagatgtcactgccaaagaggccttattgcttacagaaaaggaggcacacgacgcaacaaggaagactctgactgaagctcaggaagagagtggagaacttctgaagaaaattcatgataatgataaacatattcttcagcttcagtttactatacaaaggcttgaggaaactacagttgcaaatgagaatttgctgttgagggagagggagcagaatgacataacaacaaaagcgcacaatgaaagtcaagaaaaatatgaagaattactaagcaaatttgttgatgttgacaggaaaatcgaccttcttcaaggtaccatagaaaggcttggagaaaatacaacaaaggattctctgttgctatcagagagacatgaaaaggatgctattaagaaagcacttactgaggctcaagagaaaaatgaagagttactgatgaaagttgaagatgctaatgaaaaaatagaacaacttcaaactacgatagatatgcttgaagataatgtagctgcaaaagatgtttctttagaagctgcaatgaaggaaaatgatgcaattaggagatctcttactgaagctcaagagagaaatgatgaattactcaagaaaattagtgacagtgaatacaggatccatttacttcaagacacgatacaaaagcttcaagtagatgcaatatcaagattgtcgtcttttgtaatggaaaaacaagaaagtgatgcttcaaagagagctgttactgaagctcatgaaagaaatgaagatttactgaagagaaatgaggacctcctcaagaggaatgatgatctgattaagaaaattgaagactctagtaaaattgtcactcaacttcaggaagctctacaaaggcttgaaggaaaagcatgcaacttagaggctgagaaccaagttcttcgtcaacaagcaacttcaactccaccaacttcagctaaatctccagcttcacgtgcaaagatctcaaggatccatagaagtccagagaatggccataatttgaatggtgacattaggcaaactgaaatgaagccctccactggcacatcagaagcaataacctcagcagctaatgttcctgacttgggcgaccaaaaagattttgaacatggagaaaaactgcaaagaataccaaaacagaaatatcagccttctcatcaccagcagccccaggacgatcagcagtggctactcgcttgtattccacaacatcttggattttctgggagcaaaccagttgcagctctccttatataccaatgccttctccattggaaatcatttgaagccatgaagacaggtgtcttcgacagcattttgcatgctataaactcagccacagaggctcaaaatgacatgagaacattggcatattggttgtccaacttatctacattaacagttctccttcaacgatcattcaaaactactaggacggcaatctcaactccacaaaggagaagattttcatcggagaggatctttcatggaaatcaaacttcaaatgctgggcttgcttatctcagtggtcaatcagttgttgggtctgctggactgccccaagttgaagcaaaatatcctgctttgctattcaaacagcagctcgtggatctaattgaaaaggtttatggcatgataagtgacagcgtgaagaaggagctaaaccctttgcttgaattgtgtatacaggatccacgaacttctcactcgagtatcgcaaaaggcaatcttaatggcatgggtcaacagaaccaactcacatattggctgggcatagtgaaaattctcactagctacttggatgtactgagggtaaatcacgttccatcaattctggtgcataaactcttcactcagatattctcattgattgatgttcaactatttaaccggttacttttgcggcgtgagtgctgttcttttagtaacggggaatatgtcagagctggactaactgaactaaaacattggtccgacaatgctacaagagagtttgcaggttcagcgtgggaggcattgaggcatattagacaagctgtcgatttcctggtgatttctcttaaaccaatgaggacattaagagagatacacactgatgtgtgccctgccctcagcatacaacagctagagcgaatagttagtatgtactgggatgatgtgaatggaacaaacactatttcagcagagtttacatcaagcttgaaatctgcggtgcgtgatgaatcgaatatggccacaagtttttctatattgctagatgatgattccagtatacctttttcacttgatgatattacaaagacactgccagtcattgaggtggctgatgacgactttgtgccttttgtccatgaaaacccaagctttgcgtttttattgcaaagaggggagtagtccatttttcctcaccatggtgacttcacccacctgtggataagtcaggattcctgcctaggatgtacagtacgcgtgattctttttgtaccaggtagcaaggcattaaagattagatgctaggtgagcttataggattctggttttattgatttgtgtgttgattgtccatttgtattcaggttttccttgccattttttttctgtttgtagttatttttttgggcttgtatactaggggctaagggcagaaggccctgtcctgtaagcaaagtagcacaaggttttgctgtaggtgggaaagctgtacatgtgttgtaggagggggagtagcggttatcctgctggtcagggctaagaacgacagttgttgagaaggcaacggttatgccgtttttcctggatgagcagaatatcttgtcctggactgctggacagcagagcagtgcccacggaggtctctgcgcgctcgatcgcgacgatgcggccactatggtagtagatgcactcattacctgttatactagtaatttgctcgcgcctcgcgcaagtcgttaaccgatgagtttatacaattaaaagagtgttgctttagccatataaatacagaagtagtaatatatgtggatacataaacatagaagtgacaaaattatataaacatacaattgtttgcgttggtagataagttcagtagcatcgtgagcagcctagatgtcaaaattttgaagacaacaaaatactggtcttgaaggccacaaaatgcagagcaacattacaatgcacggatccttttcatgatcgtgctcactttttatgaaattcattgcttgttgtattgaatgtatatgtatacattaaggtacaattattagaattgtctcaatatgtaacgaagtaacatgaatagatagctttgcttagcacagaatgtcatgtgaatgtagcaaaaaataagtcagttttataattattatcgatttttattgtgctatcgtttgtcatgtaatatactttaagtatgatttagatttttttcgcaaaaaaaatgaataagac

SEQ ID NO: 32166 - DNA, 8370 bp, Zea Mays
cgtcgccttccaccaccaccccaccagcccacccgcatccgcgtcgctgctgctgctgccaccgtcgtgcgtctccgcgccacgcgtgcgcgtacccgtggcggatcgcgctgcagcagaggcgatcggcgagcgatccaggggaggagatcgcttgtcggcgccgccgctgccgccgccgatcgagccgcgactcctcccgttcggtcccctcgcagctcccgtccgggcccgtccctcgaggcagggcggggtggctcgatcgcccgcagatgaaacatggcttcgacgttaaacattgtaataggttctcatgtatgggtggaagataaagatttgtcctgggttgatggcgaggtatcccggattgatggtaaaaaagcccatgttcgcacaaccaaggggaagacggtcattgcaaatatatcggatatccaccctaaagacacagaagcaccgcctgatggggtggatgacatgacaaggttatcatacttgcatgagcctggtgttttagataacctggctgtcagatatgcgaaaaatatcatttatacctatactggtaacattctgattgcaataaatccattccaaaggctacctaatctggttgatgcccgtactatggaaaaatacaaaggtgcaaatcttggtgacctagatcctcatgtatttgcaatagctgacgtctcttacaggcaaatgataaatgaaggaaagagtaactccattttggtcagtggtgaaagtggtgctggtaagactgaaactacgaagttgttgatgggatatcttgcatatctgggtgggcgatctggaacaggagagaggacagttgaacagcaagtattagaatctaatccagttcttgaagcctttgggaatgcgaaaactgttcggaacaacaactcaagtcgatttggtaaatttgttgaaatccaatttgacaagagcggtaagatatctggtgctgccattagaacttacttgctcgagagatctcgagtttgccaaattaatagtccagagaggaactaccattgcttttacttcctatgtgcagcaccatcagaggatctcaagaagtataagctcggggacccatcgttgtttcactatctcaaccagtcagcttgtattaaagttgatggaatcaatgatgctgaagaataccttgcaacaagaaaagcaatggatactgttggcattactgatcaagaacaggaagctatattccgggttgttgctgctgtgcttcatcttggaaacataaattttacaaaagggagagaagcagattcatccataataaaggatgacaaatctagattccatcttaatacagcaggagagctcttaatgtgtgattgtgagaagttggagaatgccttgataaagagggaaattaatacaccagaaggagtgattaccacaacagttggtccgaattctgctactattagccgggatggtttagcaaagcagatatactctcgattgtttgactggcttgtaaacagaataaatgcatcgataggacaagacccaaactctaacaaactgattggggtacttgatatatatggttttgaaagttttaaaaccaacagttttgaacaactgtgcatcaattttaccaatgaaaaactccagcaacattttaatcagaatgtcttcaaaatggaacaagaggaatacacaagggagcaaattaattggagttacatagagtttgttgacaatcaagatgtacttgacctgattgaaaggaaaccaggtggcattattgcgcttcttgatgaagcctgcatgtttccaaagtccacacacgagacattgtctcagaagctgtacgaaaagttcaagaaccacaaaagatttaccaaaccaaagctttctcgtactgcatttacaattcaacattatgctggagatgtaacatatcaatctgatcaattcctggacaagaacaaggactatgtggtagcagagcatcaggaattacttaatgcttctaagtgctcttttgtatcagggttatttccacaagcaacagaagagaacacaaaatcatcaaaatcctcaattgcaactcgctttaagatacaacttcatgaactcatggagactttgagctctacagagccacattacataagatgtataaaaccaaatagtgtccttaagcctggcatttttgagaataccaatgttctgcagcagcttcgatgttctggtgttcttgaagccattagaatcagctgtgctggttatcccacaaggaaactatttcatgattttctacatcgttttcgtgttcttgctcctgaaattttgaaagagaaaaatgatgaaaaagtctcctgtcaaaaggttttggacaaaatgggactacagggttatcagataggaagaactaaggtattcctgagggctggtcaaatggctgatctggatgccagaagaacagagatgcgaaacaatgcagcaaaaggcgttcagagtcaattccgtactcatgttgctcgtgagcagttcctagtactacgggacacatctatttatttgcaatctttcgttagagattggcatgtaagcaacatgaattcctgagacaacaagcagcagctttgagaattcagaaaaatgcacgatggtattttgcctggaaaacttattaccaactacgattgtcagccattacattgcaggccgggctaaggtccatggcagctcgtaatgagttcacctttagaaagaaaaataaagcttcagtccatatccagtcccagtggcgatgccaccgagattactcaaattatatgaatttgaagagagccgcactaacatatcagtgtgcttggcgaagaagggttgctaggaaggagctgaggaagctcaaactggctgcaagagatacacaggctctaaaggtggccaaagagaaacttgaggaacgtgtggaagagctaacaagtcgcctggaccgcgaaaagaaactaagggctgatttggagaagtctaaagcagatgaagtttccaaattgaaagaagctcttcatgagatggagcagcgagtagaagaagtgaaagcgatgcaggaacaagaatcagcaaaaaaggctgttgaagaagctctagctcaagaaagagaaaagatcagtttattgactactgaaattgagggcctaaaggttctgctagtagctgaacgagaggagaatgataaaatgaagaaagcgcatgctaatgctctggaaacaaatgaagagttaaataaggaagtcagtgatgcagatgaaaagatcaaacaatttagtgatactgtaagaagactagaagggactgtaagcgaacatgagggccttttgctaactgaaaggcaacaaaatgaagcagctaatgctgcacttgctgaatctcaagcgagaaatgaagcactggtaagcaagcttgaagatgctgtgaaacaaaatgatctcctccatgaagctgaccaaagatttcaagaagctacaaaaaatttggaatcttcactgacatttgagaagcaacgacatgaggcaaatttgatagaattagctgaagcacgagaaaagattgaagaacttcaaagagaagttggggacactgatgaaaaattcaccctgcttcagactagtatacaaagcgttgaagaaaggttaagagagaaggatgctctattgacaacagaaagactagaaagtgaagcaactaagaaatcactaaatgaatctgaggatagaaaccaggacttactactgaaaattgaaattgctcagaaagacattgctcacttccaagaaaccgtccgaagacatgaagaaaatatggcagcactggaaacttcgttgagatctgaaaggcagcaaaatgatgcaatcatgaaacaactagctgaatctcagggggaaataggagagctgcaaaggaagcttgaagatgctgatgccagaaatgggcttcttcaagattctttacagagacatgaagaaaatatggcagcactggaaacttcgttgagatctgaaaggcagcaaaatgatgcaatcatgaaacaactagctgaatctcagggggaaataggagagctgcaaaggaagcttgaagatgctgatgccagaaatgggcttcttcaagattctttacagagacatgaagaaaatatggcagcactggaaacttcgttgagatctgaaaggcagcaaaatgatgcaatcatgaaacaactagctgaatctcagggggaaataggagagctgcaaaggaagcttgaagatgctgatgccagaaatgggcttcttcaagattctttacagagacttgaagacgatgctactacaagagaagctttaatggaaactgaaaggaaagaaactgaaatgacaaaaaagacactgactgaagctctggatcaaatcgaggaattagtcaaagaagttgagtgtgctaaccacagtgtgcatcagcttcaagatagtatgcagagaatggagcaaaccgcagttgcaagggaagcaactttactagcagaacatcaggaaaaagatgcgacatcaaaagcattagcagaggcacaagggaggattgaaggtttactgaaggaaatttattctgctaatagaaaaaatgatcaacttcaaagtactatagaaaggttagaagagggtgcaacaacgacagatgctctttacttagcagaaagaaaagggcatgatcaaacgaagaaatcactttctgaagctcaagaaacaaacaaggagttactaaaaaaaattgagaaagctgagaaaaacatagatcagcttctggagaatgtggaaagacttgaaaaagatgcaattacaagagagtctttactgcttacaacaaagcaaagctatggtgacaccgcaaaattgctgcttgaatctcaagagaaaaaccaagagttagtgcacaaagtagaggactcagatagcaaaattgttctgcttgaagattcagtaaaaagactcgaagaaagtactgcagataaagattctttattggctatagaaagacatgaaaacagtgaaaccaagaaagaattagttggttctcagaaaaagattgcggaattgctaactgaagtgcaagatactcgtgcaaatgttgcagaacttgaggacttgattaggagactcgaaggaaaattggcaataactgaagctttattgctaactgaaaaggaacagaatgcttccaccttaaaattacttgcagaagcacaattgagaatcgaagaattaataaaaaaacttgaaggttcagatagaaaatctgatagccttcaggatacaataacaagacttgaacaagatgtcactgccaaagaggccttattgcttacagaaaaggaggcacacgacgcaacaaggaagactctgactgaagctcaggaagagagtggagaacttctgaagaaaattcatgataatgataaacatattcttcagcttcagtttactatacaaaggcttgaggaaactacagttgcaaatgagaatttgctgttgagggagagggagcagaatgacataacaacaaaagcgcacaatgaaagtcaagaaaaatatgaagaattactaagcaaatttgttgatgttgacaggaaaatcgaccttcttcaaggtaccatagaaaggcttggagaaaatacaacaaaggattctctgttgctatcagagagacatgaaaaggatgctattaagaaagcacttactgaggctcaagagaaaaatgaagagttactgatgaaagttgaagatgctaatgaaaaaatagaacaacttcaaactacgatagatatgcttgaagataatgtagctgcaaaagatgtttctttagaagctgcaatgaaggaaaatgatgcaattaggagatctcttactgaagctcaagagagaaatgatgaattactcaagaaaattagtgacagtgaatacaggatccatttacttcaagacacgatacaaaagcttcaagtagatgcaatatcaagattgtcgtcttttgtaatggaaaaacaagaaagtgatgcttcaaagagagctgttactgaagctcatgaaagaaatgaagatttactgaagagaaatgaggacctcctcaagaggaatgatgatctgattaagaaaattgaagactctagtaaaattgtcactcaacttcaggaagctctacaaaggcttgaaggaaaagcatgcaacttagaggctgagaaccaagttcttcgtcaacaagcaacttcaactccaccaacttcagctaaatctccagcttcacgtgcaaagatctcaaggatccatagaagtccagagaatggccataatttgaatggtgacattaggcaaactgaaatgaagccctccactggcacatcagaagcaataacctcagcagctaatgttcctgacttgggcgaccaaaaagattttgaacatggagaaaaactgcaaagaataccaaaacagaaatatcagccttctcatcaccagcagccccaggacgatcagcagtggctactcgcttgtattccacaacatcttggattttctgggagcaaaccagttgcagctctccttatataccaatgccttctccattggaaatcatttgaagccatgaagacaggtgtcttcgacagcattttgcatgctataaactcagccacagaggctcaaaatgacatgagaacattggcatattggttgtccaacttatctacattaacagttctccttcaacgatcattcaaaactactaggacggcaatctcaactccacaaaggagaagattttcatcggagaggatctttcatggaaatcaaacttcaaatgctgggcttgcttatctcagtggtcaatcagttgttgggtctgctggactgccccaagttgaagcaaaatatcctgctttgctattcaaacagcagctcgtggatctaattgaaaaggtttatggcatgataagtgacagcgtgaagaaggagctaaaccctttgcttgaattgtgtatacaggatccacgaacttctcactcgagtatcgcaaaaggcaatcttaatggcatgggtcaacagaaccaactcacatattggctgggcatagtgaaaattctcactagctacttggatgtactgagggtaaatcacgttccatcaattctggtgcataaactcttcactcagatattctcattgattgatgttcaactatttaaccggttacttttgcggcgtgagtgctgttcttttagtaacggggaatatgtcagagctggactaactgaactaaaacattggtccgacaatgctacaagagagtttgcaggttcagcgtgggaggcattgaggcatattagacaagctgtcgatttcctggtacgtctcccggtgcttgctcggctgggcccacaggccgattcacatcccatcgtggctccattttccaagacgcgtgcgcccgttcgacagcccgaggatatcctttccaaggtgatttcagcggcgcaaggatcacctcttttgactatgcaggcactacggggtccacaagatctctcgcatccgcctaatgagtctggttccatcaaacctgcgcctgctatatctcccgagaaacctaggcgtatctgctccgaggaaattacctcaggcttttcaacggttggagctgggcctgaggagcccaggtgtgattgctcctgtcctctaggcacaggcaactgcaaagattgggcctcccaatctggggaatgttttgaggaggcaggacacccccaggcgtcgacagttgagcaacctctcctggctgctcccattgacgtgcctactctctctgatcagcagggcattggtttgagtattgagcagatcccagaacagcacattgaagatcaggggatttatttaaatgacgatcagagtactgaacagaacccagaacaacacattgaagatcaggggctcattttatatgatgatcagagtactgaacagaattctgaacagaacattgaacaacagacatccttgatccctagtggacttaatctcttgaattcacaacctgttactactcaactcaatgtgcaggatgaccggaggctcttacaggcctaccccttggtttattctagaaggcgacgacactctagaagcccaccgccattgaccaaaactccacaagaaacccctgaagttgcagctgttaggaaactcatgaaggcttctaaggctattgaagcgctgctgcctcaaccagtcatccataagcaaaaaccaaagctccaagcaccttaggccttgttactttcttccaagc

SEQ ID NO: 32167 - DNA, 8819 bp, Zea Mays
cgtcgccttccaccaccaccccaccagcccacccgcatccgcgtcgctgctgctgctgccaccgtcgtgcgtctccgcgccacgcgtgcgcgtacccgtggcggatcgcgctgcagcagaggcgatcggcgagcgatccaggggaggagatcgcttgtcggcgccgccgctgccgccgccgatcgagccgcgactcctcccgttcggtcccctcgcagctcccgtccgggcccgtccctcgaggcagggcggggtggctcgatcgcccgcagatgaaacatggcttcgacgttaaacattgtaataggttctcatgtatgggtggaagataaagatttgtcctgggttgatggcgaggtatcccggattgatggtaaaaaagcccatgttcgcacaaccaaggggaagacggtcattgcaaatatatcggatatccaccctaaagacacagaagcaccgcctgatggggtggatgacatgacaaggttatcatacttgcatgagcctggtgttttagataacctggctgtcagatatgcgaaaaatatcatttatacctatactggtaacattctgattgcaataaatccattccaaaggctacctaatctggttgatgcccgtactatggaaaaatacaaaggtgcaaatcttggtgacctagatcctcatgtatttgcaatagctgacgtctcttacaggcaaatgataaatgaaggaaagagtaactccattttggtcagtggtgaaagtggtgctggtaagactgaaactacgaagttgttgatgggatatcttgcatatctgggtgggcgatctggaacaggagagaggacagttgaacagcaagtattagaatctaatccagttcttgaagcctttgggaatgcgaaaactgttcggaacaacaactcaagtcgatttggtaaatttgttgaaatccaatttgacaagagcggtaagatatctggtgctgccattagaacttacttgctcgagagatctcgagtttgccaaattaatagtccagagaggaactaccattgcttttacttcctatgtgcagcaccatcagaggatctcaagaagtataagctcggggacccatcgttgtttcactatctcaaccagtcagcttgtattaaagttgatggaatcaatgatgctgaagaataccttgcaacaagaaaagcaatggatactgttggcattactgatcaagaacaggaagctatattccgggttgttgctgctgtgcttcatcttggaaacataaattttacaaaagggagagaagcagattcatccataataaaggatgacaaatctagattccatcttaatacagcaggagagctcttaatgtgtgattgtgagaagttggagaatgccttgataaagagggaaattaatacaccagaaggagtgattaccacaacagttggtccgaattctgctactattagccgggatggtttagcaaagcagatatactctcgattgtttgactggcttgtaaacagaataaatgcatcgataggacaagacccaaactctaacaaactgattggggtacttgatatatatggttttgaaagttttaaaaccaacagttttgaacaactgtgcatcaattttaccaatgaaaaactccagcaacattttaatcagaatgtcttcaaaatggaacaagaggaatacacaagggagcaaattaattggagttacatagagtttgttgacaatcaagatgtacttgacctgattgaaaggaaaccaggtggcattattgcgcttcttgatgaagcctgcatgtttccaaagtccacacacgagacattgtctcagaagctgtacgaaaagttcaagaaccacaaaagatttaccaaaccaaagctttctcgtactgcatttacaattcaacattatgctggagatgtaacatatcaatctgatcaattcctggacaagaacaaggactatgtggtagcagagcatcaggaattacttaatgcttctaagtgctcttttgtatcagggttatttccacaagcaacagaagagaacacaaaatcatcaaaatcctcaattgcaactcgctttaagatacaacttcatgaactcatggagactttgagctctacagagccacattacataagatgtataaaaccaaatagtgtccttaagcctggcatttttgagaataccaatgttctgcagcagcttcgatgttctggtgttcttgaagccattagaatcagctgtgctggttatcccacaaggaaactatttcatgattttctacatcgttttcgtgttcttgctcctgaaattttgaaagagaaaaatgatgaaaaagtctcctgtcaaaaggttttggacaaaatgggactacagggttatcagataggaagaactaaggtattcctgagggctggtcaaatggctgatctggatgccagaagaacagagatgcgaaacaatgcagcaaaaggcgttcagagtcaattccgtactcatgttgctcgtgagcagttcctagtactacgggacacatctatttatttgcaatctttcgttagagccagattggcatgtaagcaacatgaattcctgagacaacaagcagcagctttgagaattcagaaaaatgcacgatggtattttgcctggaaaacttattaccaactacgattgtcagccattacattgcaggccgggctaaggtccatggcagctcgtaatgagttcacctttagaaagaaaaataaagcttcagtccatatccagtcccagtggcgatgccaccgagattactcaaattatatgaatttgaagagagccgcactaacatatcagtgtgcttggcgaagaagggttgctaggaaggagctgaggaagctcaaactggctgcaagagatacacaggctctaaaggtggccaaagagaaacttgaggaacgtgtggaagagctaacaagtcgcctggaccgcgaaaagaaactaagggctgatttggagaagtctaaagcagatgaagtttccaaattgaaagaagctcttcatgagatggagcagcgagtagaagaagtgaaagcgatgcaggaacaagaatcagcaaaaaaggctgttgaagaagctctagctcaagaaagagaaaagatcagtttattgactactgaaattgagggcctaaaggttctgctagtagctgaacgagaggagaatgataaaatgaagaaagcgcatgctaatgctctggaaacaaatgaagagttaaataaggaagtcagtgatgcagatgaaaagatcaaacaatttagtgatactgtaagaagactagaagggactgtaagcgaacatgagggccttttgctaactgaaaggcaacaaaatgaagcagctaatgctgcacttgctgaatctcaagcgagaaatgaagcactggtaagcaagcttgaagatgctgtgaaacaaaatgatctcctccatgaagctgaccaaagatttcaagaagctacaaaaaatttggaatcttcactgacatttgagaagcaacgacatgaggcaaatttgatagaattagctgaagcacgagaaaagattgaagaacttcaaagagaagttggggacactgatgaaaaattcaccctgcttcagactagtatacaaagcgttgaagaaaggttaagagagaaggatgctctattgacaacagaaagactagaaagtgaagcaactaagaaatcactaaatgaatctgaggatagaaaccaggacttactactgaaaattgaaattgctcagaaagacattgctcacttccaagaaaccgtccgaagacatgaagaaaatatggcagcactggaaacttcgttgagatctgaaaggcagcaaaatgatgcaatcatgaaacaactagctgaatctcagggggaaataggagagctgcaaaggaagcttgaagatgctgatgccagaaatgggcttcttcaagattctttacagagacatgaagaaaatatggcagcactggaaacttcgttgagatctgaaaggcagcaaaatgatgcaatcatgaaacaactagctgaatctcagggggaaataggagagctgcaaaggaagcttgaagatgctgatgccagaaatgggcttcttcaagattctttacagagacatgaagaaaatatggcagcactggaaacttcgttgagatctgaaaggcagcaaaatgatgcaatcatgaaacaactagctgaatctcagggggaaataggagagctgcaaaggaagcttgaagatgctgatgccagaaatgggcttcttcaagattctttacagagacttgaagacgatgctactacaagagaagctttaatggaaactgaaaggaaagaaactgaaatgacaaaaaagacactgactgaagctctggatcaaatcgaggaattagtcaaagaagttgagtgtgctaaccacagtgtgcatcagcttcaagatagtatgcagagaatggagcaaaccgcagttgcaagggaagcaactttactagcagaacatcaggaaaaagatgcgacatcaaaagcattagcagaggcacaagggaggattgaaggtttactgaaggaaatttattctgctaatagaaaaaatgatcaacttcaaagtactatagaaaggttagaagagggtgcaacaacgacagatgctctttacttagcagaaagaaaagggcatgatcaaacgaagaaatcactttctgaagctcaagaaacaaacaaggagttactaaaaaaaattgagaaagctgagaaaaacatagatcagcttctggagaatgtggaaagacttgaaaaagatgcaattacaagagagtctttactgcttacaacaaagcaaagctatggtgacaccgcaaaattgctgcttgaatctcaagagaaaaaccaagagttagtgcacaaagtagaggactcagatagcaaaattgttctgcttgaagattcagtaaaaagactcgaagaaagtactgcagataaagattctttattggctatagaaagacatgaaaacagtgaaaccaagaaagaattagttggttctcagaaaaagattgcggaattgctaactgaagtgcaagatactcgtgcaaatgttgcagaacttgaggacttgattaggagactcgaaggaaaattggcaataactgaagctttattgctaactgaaaaggaacagaatgcttccaccttaaaattacttgcagaagcacaattgagaatcgaagaattaataaaaaaacttgaaggttcagatagaaaatctgatagccttcaggatacaataacaagacttgaacaagatgtcactgccaaagaggccttattgcttacagaaaaggaggcacacgacgcaacaaggaagactctgactgaagctcaggaagagagtggagaacttctgaagaaaattcatgataatgataaacatattcttcagcttcagtttactatacaaaggcttgaggaaactacagttgcaaatgagaatttgctgttgagggagagggagcagaatgacataacaacaaaagcgcacaatgaaagtcaagaaaaatatgaagaattactaagcaaatttgttgatgttgacaggaaaatcgaccttcttcaaggtaccatagaaaggcttggagaaaatacaacaaaggattctctgttgctatcagagagacatgaaaaggatgctattaagaaagcacttactgaggctcaagagaaaaatgaagagttactgatgaaagttgaagatgctaatgaaaaaatagaacaacttcaaactacgatagatatgcttgaagataatgtagctgcaaaagatgtttctttagaagctgcaatgaaggaaaatgatgcaattaggagatctcttactgaagctcaagagagaaatgatgaattactcaagaaaattagtgacagtgaatacaggatccatttacttcaagacacgatacaaaagcttcaagtagatgcaatatcaagattgtcgtcttttgtaatggaaaaacaagaaagtgatgcttcaaagagagctgttactgaagctcatgaaagaaatgaagatttactgaagagaaatgaggacctcctcaagaggaatgatgatctgattaagaaaattgaagactctagtaaaattgtcactcaacttcaggaagctctacaaaggcttgaaggaaaagcatgcaacttagaggctgagaaccaagttcttcgtcaacaagcaacttcaactccaccaacttcagctaaatctccagcttcacgtgcaaagatctcaaggatccatagaagtccagagaatggccataatttgaatggtgacattaggcaaactgaaatgaagccctccactggcacatcagaagcaataacctcagcagctaatgttcctgacttgggcgaccaaaaagattttgaacatggagaaaaactgcaaagaataccaaaacagaaatatcagccttctcatcaccagcagccccaggacgatcagcagtggctactcgcttgtattccacaacatcttggattttctgggagcaaaccagttgcagctctccttatataccaatgccttctccattggaaatcatttgaagccatgaagacaggctcaaaatgacatgagaacattggcatattggttgtccaacttatctacattaacagttctccttcaacgatcattcaaaactactaggacggcaatctcaactccacaaaggagaagattttcatcggagaggatctttcatggaaatcaaacttcaaatgctgggcttgcttatctcagtggtcaatcagttgttgggtctgctggactgccccaagttgaagcaaaatatcctgctttgctattcaaacagcagctcgtggatctaattgaaaaggtttatggcatgataagtgacagcgtgaagaaggagctaaaccctttgcttgaattgtgtatacaggatccacgaacttctcactcgagtatcgcaaaaggcaatcttaatggcatgggtcaacagaaccaactcacatattggctgggcatagtgaaaattctcactagctacttggatgtactgagggtaaatcacgttccatcaattctggtgcataaactcttcactcagatattctcattgattgatgttcaactatttaaccggttacttttgcggcgtgagtgctgttcttttagtaacggggaatatgtcagagctggactaactgaactaaaacattggtccgacaatgctacaagagagtttgcaggttcagcgtgggaggcattgaggcatattagacaagctgtcgatttcctggtgatttctcttaaaccaatgaggacattaagagagatacacactgatgtgtgccctgccctcagcatacaacagctagagcgaatagttagtatgtactgggatgatgtgaatggaacaaacactatttcagcagagctgacaattccaacctatctatctatagtttacatcaagcttgaaatctgcggtgcgtgatgaatcgaatatggccacaagtttttctatattgctagatgatgattccagtatacctttttcacttgatgatattacaaagacactgccagtcattgaggtggctgatgacgactttgtgccttttgtccatgaaaacccaagctttgcgtttttattgcaaagaggggagtagtccatttttcctcaccatggtgacttcacccacctgtggataagtcaggattcctgcctaggatgtacagtacgcgtgattctttttgtaccaggtagcaaggcattaaagattagatgctaggtgagcttataggattctggttttattgatttgtgtgttgattgtccatttgtattcaggttttccttgccattttttttctgtttgtagttatttttttgggcttgtatactaggggctaagggcagaaggccctgtcctgtaagcaaagtagcacaaggttttgctgtaggtgggaaagctgtacatgtgttgtaggagggggagtagcggttatcctgctggtcagggctaagaacgacagttgttgagaaggcaacggttatgccgtttttcctggatgagcagaatatcttgtcctggactgctggacagcagagcagtgcccacggaggtctctgcgcgctcgatcgcgacgatgcggccactatggtagtagatgcactcattacctgttatactagtaatttgctcgcgcctcgcgcaagtcgttaaccgatgagtttatacaattaaaagagtgttgctttagccatataaatacagaagtagtaatatatgtggatacataaacatagaagtgacaaaattatataaacatacaattgtttgcgttggtagataagttcagtagcatcgtgagcagcctagatgtcaaaattttgaagacaacaaaatactggtcttgaaggccacaaaatgcagagcaacattacaatgcacggatccttttcatgatcgtgctcactttttatgaaattcattgcttgttgtattgaatgtatatgtatacattaaggtacaattattagaattgtctcaatatgtaacgaagtaacatgaatagatagctttgcttagcacagaatgtcatgtgaatgtagcaaaaaataagtcagttttataattattatcgatttttattgtgctatcgtttgtcatgtaatatactttaagtatgatttagatttttttcgcaaaaaaaatgaataagac

SEQ ID NO: 32168 - DNA, 8856 bp, Zea Mays
cgtcgccttccaccaccaccccaccagcccacccgcatccgcgtcgctgctgctgctgccaccgtcgtgcgtctccgcgccacgcgtgcgcgtacccgtggcggatcgcgctgcagcagaggcgatcggcgagcgatccaggggaggagatcgcttgtcggcgccgccgctgccgccgccgatcgagccgcgactcctcccgttcggtcccctcgcagctcccgtccgggcccgtccctcgaggcagggcggggtggctcgatcgcccgcagatgaaacatggcttcgacgttaaacattgtaataggttctcatgtatgggtggaagataaagatttgtcctgggttgatggcgaggtatcccggattgatggtaaaaaagcccatgttcgcacaaccaaggggaagacggtcattgcaaatatatcggatatccaccctaaagacacagaagcaccgcctgatggggtggatgacatgacaaggttatcatacttgcatgagcctggtgttttagataacctggctgtcagatatgcgaaaaatatcatttatacctatactggtaacattctgattgcaataaatccattccaaaggctacctaatctggttgatgcccgtactatggaaaaatacaaaggtgcaaatcttggtgacctagatcctcatgtatttgcaatagctgacgtctcttacaggcaaatgataaatgaaggaaagagtaactccattttggtcagtggtgaaagtggtgctggtaagactgaaactacgaagttgttgatgggatatcttgcatatctgggtgggcgatctggaacaggagagaggacagttgaacagcaagtattagaatctaatccagttcttgaagcctttgggaatgcgaaaactgttcggaacaacaactcaagtcgatttggtaaatttgttgaaatccaatttgacaagagcggtaagatatctggtgctgccattagaacttacttgctcgagagatctcgagtttgccaaattaatagtccagagaggaactaccattgcttttacttcctatgtgcagcaccatcagaggatctcaagaagtataagctcggggacccatcgttgtttcactatctcaaccagtcagcttgtattaaagttgatggaatcaatgatgctgaagaataccttgcaacaagaaaagcaatggatactgttggcattactgatcaagaacaggaagctatattccgggttgttgctgctgtgcttcatcttggaaacataaattttacaaaagggagagaagcagattcatccataataaaggatgacaaatctagattccatcttaatacagcaggagagctcttaatgtgtgattgtgagaagttggagaatgccttgataaagagggaaattaatacaccagaaggagtgattaccacaacagttggtccgaattctgctactattagccgggatggtttagcaaagcagatatactctcgattgtttgactggcttgtaaacagaataaatgcatcgataggacaagacccaaactctaacaaactgattggggtacttgatatatatggttttgaaagttttaaaaccaacagttttgaacaactgtgcatcaattttaccaatgaaaaactccagcaacattttaatcagaatgtcttcaaaatggaacaagaggaatacacaagggagcaaattaattggagttacatagagtttgttgacaatcaagatgtacttgacctgattgaaaggaaaccaggtggcattattgcgcttcttgatgaagcctgcatgtttccaaagtccacacacgagacattgtctcagaagctgtacgaaaagttcaagaaccacaaaagatttaccaaaccaaagctttctcgtactgcatttacaattcaacattatgctggagatgtaacatatcaatctgatcaattcctggacaagaacaaggactatgtggtagcagagcatcaggaattacttaatgcttctaagtgctcttttgtatcagggttatttccacaagcaacagaagagaacacaaaatcatcaaaatcctcaattgcaactcgctttaagatacaacttcatgaactcatggagactttgagctctacagagccacattacataagatgtataaaaccaaatagtgtccttaagcctggcatttttgagaataccaatgttctgcagcagcttcgatgttctggtgttcttgaagccattagaatcagctgtgctggttatcccacaaggaaactatttcatgattttctacatcgttttcgtgttcttgctcctgaaattttgaaagagaaaaatgatgaaaaagtctcctgtcaaaaggttttggacaaaatgggactacagggttatcagataggaagaactaaggtattcctgagggctggtcaaatggctgatctggatgccagaagaacagagatgcgaaacaatgcagcaaaaggcgttcagagtcaattccgtactcatgttgctcgtgagcagttcctagtactacgggacacatctatttatttgcaatctttcgttagagccagattggcatgtaagcaacatgaattcctgagacaacaagcagcagctttgagaattcagaaaaatgcacgatggtattttgcctggaaaacttattaccaactacgattgtcagccattacattgcaggccgggctaaggtccatggcagctcgtaatgagttcacctttagaaagaaaaataaagcttcagtccatatccagtcccagtggcgatgccaccgagattactcaaattatatgaatttgaagagagccgcactaacatatcagtgtgcttggcgaagaagggttgctaggaaggagctgaggaagctcaaactggctgcaagagatacacaggctctaaaggtggccaaagagaaacttgaggaacgtgtggaagagctaacaagtcgcctggaccgcgaaaagaaactaagggctgatttggagaagtctaaagcagatgaagtttccaaattgaaagaagctcttcatgagatggagcagcgagtagaagaagtgaaagcgatgcaggaacaagaatcagcaaaaaaggctgttgaagaagctctagctcaagaaagagaaaagatcagtttattgactactgaaattgagggcctaaaggttctgctagtagctgaacgagaggagaatgataaaatgaagaaagcgcatgctaatgctctggaaacaaatgaagagttaaataaggaagtcagtgatgcagatgaaaagatcaaacaatttagtgatactgtaagaagactagaagggactgtaagcgaacatgagggccttttgctaactgaaaggcaacaaaatgaagcagctaatgctgcacttgctgaatctcaagcgagaaatgaagcactggtaagcaagcttgaagatgctgtgaaacaaaatgatctcctccatgaagctgaccaaagatttcaagaagctacaaaaaatttggaatcttcactgacatttgagaagcaacgacatgaggcaaatttgatagaattagctgaagcacgagaaaagattgaagaacttcaaagagaagttggggacactgatgaaaaattcaccctgcttcagactagtatacaaagcgttgaagaaaggttaagagagaaggatgctctattgacaacagaaagactagaaagtgaagcaactaagaaatcactaaatgaatctgaggatagaaaccaggacttactactgaaaattgaaattgctcagaaagacattgctcacttccaagaaaccgtccgaagacatgaagaaaatatggcagcactggaaacttcgttgagatctgaaaggcagcaaaatgatgcaatcatgaaacaactagctgaatctcagggggaaataggagagctgcaaaggaagcttgaagatgctgatgccagaaatgggcttcttcaagattctttacagagacatgaagaaaatatggcagcactggaaacttcgttgagatctgaaaggcagcaaaatgatgcaatcatgaaacaactagctgaatctcagggggaaataggagagctgcaaaggaagcttgaagatgctgatgccagaaatgggcttcttcaagattctttacagagacatgaagaaaatatggcagcactggaaacttcgttgagatctgaaaggcagcaaaatgatgcaatcatgaaacaactagctgaatctcagggggaaataggagagctgcaaaggaagcttgaagatgctgatgccagaaatgggcttcttcaagattctttacagagacttgaagacgatgctactacaagagaagctttaatggaaactgaaaggaaagaaactgaaatgacaaaaaagacactgactgaagctctggatcaaatcgaggaattagtcaaagaagttgagtgtgctaaccacagtgtgcatcagcttcaagatagtatgcagagaatggagcaaaccgcagttgcaagggaagcaactttactagcagaacatcaggaaaaagatgcgacatcaaaagcattagcagaggcacaagggaggattgaaggtttactgaaggaaatttattctgctaatagaaaaaatgatcaacttcaaagtactatagaaaggttagaagagggtgcaacaacgacagatgctctttacttagcagaaagaaaagggcatgatcaaacgaagaaatcactttctgaagctcaagaaacaaacaaggagttactaaaaaaaattgagaaagctgagaaaaacatagatcagcttctggagaatgtggaaagacttgaaaaagatgcaattacaagagagtctttactgcttacaacaaagcaaagctatggtgacaccgcaaaattgctgcttgaatctcaagagaaaaaccaagagttagtgcacaaagtagaggactcagatagcaaaattgttctgcttgaagattcagtaaaaaggtttaaccacttttcttacagactcgaagaaagtactgcagataaagattctttattggctatagaaagacatgaaaacagtgaaaccaagaaagaattagttggttctcagaaaaagattgcggaattgctaactgaagtgcaagatactcgtgcaaatgttgcagaacttgaggacttgattaggagactcgaaggaaaattggcaataactgaagctttattgctaactgaaaaggaacagaatgcttccaccttaaaattacttgcagaagcacaattgagaatcgaagaattaataaaaaaacttgaaggttcagatagaaaatctgatagccttcaggatacaataacaagacttgaacaagatgtcactgccaaagaggccttattgcttacagaaaaggaggcacacgacgcaacaaggaagactctgactgaagctcaggaagagagtggagaacttctgaagaaaattcatgataatgataaacatattcttcagcttcagtttactatacaaaggcttgaggaaactacagttgcaaatgagaatttgctgttgagggagagggagcagaatgacataacaacaaaagcgcacaatgaaagtcaagaaaaatatgaagaattactaagcaaatttgttgatgttgacaggaaaatcgaccttcttcaaggtaccatagaaaggcttggagaaaatacaacaaaggattctctgttgctatcagagagacatgaaaaggatgctattaagaaagcacttactgaggctcaagagaaaaatgaagagttactgatgaaagttgaagatgctaatgaaaaaatagaacaacttcaaactacgatagatatgcttgaagataatgtagctgcaaaagatgtttctttagaagctgcaatgaaggaaaatgatgcaattaggagatctcttactgaagctcaagagagaaatgatgaattactcaagaaaattagtgacagtgaatacaggatccatttacttcaagacacgatacaaaagcttcaagtagatgcaatatcaagattgtcgtcttttgtaatggaaaaacaagaaagtgatgcttcaaagagagctgttactgaagctcatgaaagaaatgaagatttactgaagagaaatgaggacctcctcaagaggaatgatgatctgattaagaaaattgaagactctagtaaaattgtcactcaacttcaggaagctctacaaaggcttgaaggaaaagcatgcaacttagaggctgagaaccaagttcttcgtcaacaagcaacttcaactccaccaacttcagctaaatctccagcttcacgtgcaaagatctcaaggatccatagaagtccagagaatggccataatttgaatggtgacattaggcaaactgaaatgaagccctccactggcacatcagaagcaataacctcagcagctaatgttcctgacttgggcgaccaaaaagattttgaacatggagaaaaactgcaaagaataccaaaacagaaatatcagccttctcatcaccagcagccccaggacgatcagcagtggctactcgcttgtattccacaacatcttggattttctgggagcaaaccagttgcagctctccttatataccaatgccttctccattggaaatcatttgaagccatgaagacaggtgtcttcgacagcattttgcatgctataaactcagccacagaggctcaaaatgacatgagaacattggcatattggttgtccaacttatctacattaacagttctccttcaacgatcattcaaaactactaggacggcaatctcaactccacaaaggagaagattttcatcggagaggatctttcatggaaatcaaacttcaaatgctgggcttgcttatctcagtggtcaatcagttgttgggtctgctggactgccccaagttgaagcaaaatatcctgctttgctattcaaacagcagctcgtggatctaattgaaaaggtttatggcatgataagtgacagcgtgaagaaggagctaaaccctttgcttgaattgtgtatacaggatccacgaacttctcactcgagtatcgcaaaaggcaatcttaatggcatgggtcaacagaaccaactcacatattggctgggcatagtgaaaattctcactagctacttggatgtactgagggtaaatcacgttccatcaattctggtgcataaactcttcactcagatattctcattgattgatgttcaactatttaaccggttacttttgcggcgtgagtgctgttcttttagtaacggggaatatgtcagagctggactaactgaactaaaacattggtccgacaatgctacaagagagtttgcaggttcagcgtgggaggcattgaggcatattagacaagctgtcgatttcctggtgatttctcttaaaccaatgaggacattaagagagatacacactgatgtgtgccctgccctcagcatacaacagctagagcgaatagttagtatgtactgggatgatgtgaatggaacaaacactatttcagcagagtttacatcaagcttgaaatctgcggtgcgtgatgaatcgaatatggccacaagtttttctatattgctagatgatgattccagtatacctttttcacttgatgatattacaaagacactgccagtcattgaggtggctgatgacgactttgtgccttttgtccatgaaaacccaagctttgcgtttttattgcaaagaggggagtagtccatttttcctcaccatggtgacttcacccacctgtggataagtcaggattcctgcctaggatgtacagtacgcgtgattctttttgtaccaggtagcaaggcattaaagattagatgctaggtgagcttataggattctggttttattgatttgtgtgttgattgtccatttgtattcaggttttccttgccattttttttctgtttgtagttatttttttgggcttgtatactaggggctaagggcagaaggccctgtcctgtaagcaaagtagcacaaggttttgctgtaggtgggaaagctgtacatgtgttgtaggagggggagtagcggttatcctgctggtcagggctaagaacgacagttgttgagaaggcaacggttatgccgtttttcctggatgagcagaatatcttgtcctggactgctggacagcagagcagtgcccacggaggtctctgcgcgctcgatcgcgacgatgcggccactatggtagtagatgcactcattacctgttatactagtaatttgctcgcgcctcgcgcaagtcgttaaccgatgagtttatacaattaaaagagtgttgctttagccatataaatacagaagtagtaatatatgtggatacataaacatagaagtgacaaaattatataaacatacaattgtttgcgttggtagataagttcagtagcatcgtgagcagcctagatgtcaaaattttgaagacaacaaaatactggtcttgaaggccacaaaatgcagagcaacattacaatgcacggatccttttcatgatcgtgctcactttttatgaaattcattgcttgttgtattgaatgtatatgtatacattaaggtacaattattagaattgtctcaatatgtaacgaagtaacatgaatagatagctttgcttagcacagaatgtcatgtgaatgtagcaaaaaataagtcagttttataattattatcgatttttattgtgctatcgtttgtcatgtaatatactttaagtatgatttagatttttttcgcaaaaaaaatgaataagac

SEQ ID NO: 32169 - DNA, 8163 bp, Zea Mays
cgtcgccttccaccaccaccccaccagcccacccgcatccgcgtcgctgctgctgctgccaccgtcgtgcgtctccgcgccacgcgtgcgcgtacccgtggcggatcgcgctgcagcagaggcgatcggcgagcgatccaggggaggagatcgcttgtcggcgccgccgctgccgccgccgatcgagccgcgactcctcccgttcggtcccctcgcagctcccgtccgggcccgtccctcgaggcagggcggggtggctcgatcgcccgcagatgaaacatggcttcgacgttaaacattgtaataggttctcatgtatgggtggaagataaagatttgtcctgggttgatggcgaggtatcccggattgatggtaaaaaagcccatgttcgcacaaccaaggggaagacggtcattgcaaatatatcggatatccaccctaaagacacagaagcaccgcctgatggggtggatgacatgacaaggttatcatacttgcatgagcctggtgttttagataacctggctgtcagatatgcgaaaaatatcatttatacctatactggtaacattctgattgcaataaatccattccaaaggctacctaatctggttgatgcccgtactatggaaaaatacaaaggtgcaaatcttggtgacctagatcctcatgtatttgcaatagctgacgtctcttacaggcaaatgataaatgaaggaaagagtaactccattttggtcagtggtgaaagtggtgctggtaagactgaaactacgaagttgttgatgggatatcttgcatatctgggtgggcgatctggaacaggagagaggacagttgaacagcaagtattagaatctaatccagttcttgaagcctttgggaatgcgaaaactgttcggaacaacaactcaagtcgatttggtaaatttgttgaaatccaatttgacaagagcggtaagatatctggtgctgccattagaacttacttgctcgagagatctcgagtttgccaaattaatagtccagagaggaactaccattgcttttacttcctatgtgcagcaccatcagaggatctcaagaagtataagctcggggacccatcgttgtttcactatctcaaccagtcagcttgtattaaagttgatggaatcaatgatgctgaagaataccttgcaacaagaaaagcaatggatactgttggcattactgatcaagaacaggaagctatattccgggttgttgctgctgtgcttcatcttggaaacataaattttacaaaagggagagaagcagattcatccataataaaggatgacaaatctagattccatcttaatacagcaggagagctcttaatgtgtgattgtgagaagttggagaatgccttgataaagagggaaattaatacaccagaaggagtgattaccacaacagttggtccgaattctgctactattagccgggatggtttagcaaagcagatatactctcgattgtttgactggcttgtaaacagaataaatgcatcgataggacaagacccaaactctaacaaactgattggggtacttgatatatatggttttgaaagttttaaaaccaacagttttgaacaactgtgcatcaattttaccaatgaaaaactccagcaacattttaatcagaatgtcttcaaaatggaacaagaggaatacacaagggagcaaattaattggagttacatagagtttgttgacaatcaagatgtacttgacctgattgaaaggaaaccaggtggcattattgcgcttcttgatgaagcctgcatgtttccaaagtccacacacgagacattgtctcagaagctgtacgaaaagttcaagaaccacaaaagatttaccaaaccaaagctttctcgtactgcatttacaattcaacattatgctggagatgtaacatatcaatctgatcaattcctggacaagaacaaggactatgtggtagcagagcatcaggaattacttaatgcttctaagtgctcttttgtatcagggttatttccacaagcaacagaagagaacacaaaatcatcaaaatcctcaattgcaactcgctttaagatacaacttcatgaactcatggagactttgagctctacagagccacattacataagatgtataaaaccaaatagtgtccttaagcctggcatttttgagaataccaatgttctgcagcagcttcgatgttctggtgttcttgaagccattagaatcagctgtgctggttatcccacaaggaaactatttcatgattttctacatcgttttcgtgttcttgctcctgaaattttgaaagagaaaaatgatgaaaaagtctcctgtcaaaaggttttggacaaaatgggactacagggttatcagataggaagaactaaggtattcctgagggctggtcaaatggctgatctggatgccagaagaacagagatgcgaaacaatgcagcaaaaggcgttcagagtcaattccgtactcatgttgctcgtgagcagttcctagtactacgggacacatctatttatttgcaatctttcgttagagccagattggcatgtaagcaacatgaattcctgagacaacaagcagcagctttgagaattcagaaaaatgcacgatggtattttgcctggaaaacttattaccaactacgattgtcagccattacattgcaggccgggctaaggtccatggcagctcgtaatgagttcacctttagaaagaaaaataaagcttcagtccatatccagtcccagtggcgatgccaccgagattactcaaattatatgaatttgaagagagccgcactaacatatcagtgtgcttggcgaagaagggttgctaggaaggagctgaggaagctcaaactggctgcaagagatacacaggctctaaaggtggccaaagagaaacttgaggaacgtgtggaagagctaacaagtcgcctggaccgcgaaaagaaactaagggctgatttggagaagtctaaagcagatgaagtttccaaattgaaagaagctcttcatgagatggagcagcgagtagaagaagtgaaagcgatgcaggaacaagaatcagcaaaaaaggctgttgaagaagctctagctcaagaaagagaaaagatcagtttattgactactgaaattgagggcctaaaggttctgctagtagctgaacgagaggagaatgataaaatgaagaaagcgcatgctaatgctctggaaacaaatgaagagttaaataaggaagtcagtgatgcagatgaaaagatcaaacaatttagtgatactgtaagaagactagaagggactgtaagcgaacatgagggccttttgctaactgaaaggcaacaaaatgaagcagctaatgctgcacttgctgaatctcaagcgagaaatgaagcactggtaagcaagcttgaagatgctgtgaaacaaaatgatctcctccatgaagctgaccaaagatttcaagaagctacaaaaaatttggaatcttcactgacatttgagaagcaacgacatgaggcaaatttgatagaattagctgaagcacgagaaaagattgaagaacttcaaagagaagttggggacactgatgaaaaattcaccctgcttcagactagtatacaaagcgttgaagaaaggttaagagagaaggatgctctattgacaacagaaagactagaaagtgaagcaactaagaaatcactaaatgaatctgaggatagaaaccaggacttactactgaaaattgaaattgctcagaaagacattgctcacttccaagaaaccgtccgaagacatgaagaaaatatggcagcactggaaacttcgttgagatctgaaaggcagcaaaatgatgcaatcatgaaacaactagctgaatctcagggggaaataggagagctgcaaaggaagcttgaagatgctgatgccagaaatgggcttcttcaagattctttacagagacatgaagaaaatatggcagcactggaaacttcgttgagatctgaaaggcagcaaaatgatgcaatcatgaaacaactagctgaatctcagggggaaataggagagctgcaaaggaagcttgaagatgctgatgccagaaatgggcttcttcaagattctttacagagacatgaagaaaatatggcagcactggaaacttcgttgagatctgaaaggcagcaaaatgatgcaatcatgaaacaactagctgaatctcagggggaaataggagagctgcaaaggaagcttgaagatgctgatgccagaaatgggcttcttcaagattctttacagagacttgaagacgatgctactacaagagaagctttaatggaaactgaaaggaaagaaactgaaatgacaaaaaagacactgactgaagctctggatcaaatcgaggaattagtcaaagaagttgagtgtgctaaccacagtgtgcatcagcttcaagatagtatgcagagaatggagcaaaccgcagttgcaagggaagcaactttactagcagaacatcaggaaaaagatgcgacatcaaaagcattagcagaggcacaagggaggattgaaggtttactgaaggaaatttattctgctaatagaaaaaatgatcaacttcaaagtactatagaaagacttgaacaagatgtcactgccaaagaggccttattgcttacagaaaaggaggcacacgacgcaacaaggaagactctgactgaagctcaggaagagagtggagaacttctgaagaaaattcatgataatgataaacatattcttcagcttcagtttactatacaaaggcttgaggaaactacagttgcaaatgagaatttgctgttgagggagagggagcagaatgacataacaacaaaagcgcacaatgaaagtcaagaaaaatatgaagaattactaagcaaatttgttgatgttgacaggaaaatcgaccttcttcaaggtaccatagaaaggcttggagaaaatacaacaaaggattctctgttgctatcagagagacatgaaaaggatgctattaagaaagcacttactgaggctcaagagaaaaatgaagagttactgatgaaagttgaagatgctaatgaaaaaatagaacaacttcaaactacgatagatatgcttgaagataatgtagctgcaaaagatgtttctttagaagctgcaatgaaggaaaatgatgcaattaggagatctcttactgaagctcaagagagaaatgatgaattactcaagaaaattagtgacagtgaatacaggatccatttacttcaagacacgatacaaaagcttcaagtagatgcaatatcaagattgtcgtcttttgtaatggaaaaacaagaaagtgatgcttcaaagagagctgttactgaagctcatgaaagaaatgaagatttactgaagagaaatgaggacctcctcaagaggaatgatgatctgattaagaaaattgaagactctagtaaaattgtcactcaacttcaggaagctctacaaaggcttgaaggaaaagcatgcaacttagaggctgagaaccaagttcttcgtcaacaagcaacttcaactccaccaacttcagctaaatctccagcttcacgtgcaaagatctcaaggatccatagaagtccagagaatggccataatttgaatggtgacattaggcaaactgaaatgaagccctccactggcacatcagaagcaataacctcagcagctaatgttcctgacttgggcgaccaaaaagattttgaacatggagaaaaactgcaaagaataccaaaacagaaatatcagccttctcatcaccagcagccccaggacgatcagcagtggctactcgcttgtattccacaacatcttggattttctgggagcaaaccagttgcagctctccttatataccaatgccttctccattggaaatcatttgaagccatgaagacaggtgtcttcgacagcattttgcatgctataaactcagccacagaggctcaaaatgacatgagaacattggcatattggttgtccaacttatctacattaacagttctccttcaacgatcattcaaaactactaggacggcaatctcaactccacaaaggagaagattttcatcggagaggatctttcatggaaatcaaacttcaaatgctgggcttgcttatctcagtggtcaatcagttgttgggtctgctggactgccccaagttgaagcaaaatatcctgctttgctattcaaacagcagctcgtggatctaattgaaaaggtttatggcatgataagtgacagcgtgaagaaggagctaaaccctttgcttgaattgtgtatacaggatccacgaacttctcactcgagtatcgcaaaaggcaatcttaatggcatgggtcaacagaaccaactcacatattggctgggcatagtgaaaattctcactagctacttggatgtactgagggtaaatcacgttccatcaattctggtgcataaactcttcactcagatattctcattgattgatgttcaactatttaaccggttacttttgcggcgtgagtgctgttcttttagtaacggggaatatgtcagagctggactaactgaactaaaacattggtccgacaatgctacaagagagtttgcaggttcagcgtgggaggcattgaggcatattagacaagctgtcgatttcctggtgatttctcttaaaccaatgaggacattaagagagatacacactgatgtgtgccctgccctcagcatacaacagctagagcgaatagttagtatgtactgggatgatgtgaatggaacaaacactatttcagcagagtttacatcaagcttgaaatctgcggtgcgtgatgaatcgaatatggccacaagtttttctatattgctagatgatgattccagtatacctttttcacttgatgatattacaaagacactgccagtcattgaggtggctgatgacgactttgtgccttttgtccatgaaaacccaagctttgcgtttttattgcaaagaggggagtagtccatttttcctcaccatggtgacttcacccacctgtggataagtcaggattcctgcctaggatgtacagtacgcgtgattctttttgtaccaggtagcaaggcattaaagattagatgctaggtgagcttataggattctggttttattgatttgtgtgttgattgtccatttgtattcaggttttccttgccattttttttctgtttgtagttatttttttgggcttgtatactaggggctaagggcagaaggccctgtcctgtaagcaaagtagcacaaggttttgctgtaggtgggaaagctgtacatgtgttgtaggagggggagtagcggttatcctgctggtcagggctaagaacgacagttgttgagaaggcaacggttatgccgtttttcctggatgagcagaatatcttgtcctggactgctggacagcagagcagtgcccacggaggtctctgcgcgctcgatcgcgacgatgcggccactatggtagtagatgcactcattacctgttatactagtaatttgctcgcgcctcgcgcaagtcgttaaccgatgagtttatacaattaaaagagtgttgctttagccatataaatacagaagtagtaatatatgtggatacataaacatagaagtgacaaaattatataaacatacaattgtttgcgttggtagataagttcagtagcatcgtgagcagcctagatgtcaaaattttgaagacaacaaaatactggtcttgaaggccacaaaatgcagagcaacattacaatgcacggatccttttcatgatcgtgctcactttttatgaaattcattgcttgttgtattgaatgtatatgtatacattaaggtacaattattagaattgtctcaatatgtaacgaagtaacatgaatagatagctttgcttagcacagaatgtcatgtgaatgtagcaaaaaataagtcagttttataattattatcgatttttattgtgctatcgtttgtcatgtaatatactttaagtatgatttagatttttttcgcaaaaaaaatgaataagac

SEQ ID NO: 32170 - DNA, 8177 bp, Zea Mays
cgtcgccttccaccaccaccccaccagcccacccgcatccgcgtcgctgctgctgctgccaccgtcgtgcgtctccgcgccacgcgtgcgcgtacccgtggcggatcgcgctgcagcagaggcgatcggcgagcgatccaggggaggagatcgcttgtcggcgccgccgctgccgccgccgatcgagccgcgactcctcccgttcggtcccctcgcagctcccgtccgggcccgtccctcgaggcagggcggggtggctcgatcgcccgcagatgaaacatggcttcgacgttaaacattgtaataggttctcatgtatgggtggaagataaagatttgtcctgggttgatggcgaggtatcccggattgatggtaaaaaagcccatgttcgcacaaccaaggggaagacggtcattgcaaatatatcggatatccaccctaaagacacagaagcaccgcctgatggggtggatgacatgacaaggttatcatacttgcatgagcctggtgttttagataacctggctgtcagatatgcgaaaaatatcatttatacctatactggtaacattctgattgcaataaatccattccaaaggctacctaatctggttgatgcccgtactatggaaaaatacaaaggtgcaaatcttggtgacctagatcctcatgtatttgcaatagctgacgtctcttacaggcaaatgataaatgaaggaaagagtaactccattttggtcagtggtgaaagtggtgctggtaagactgaaactacgaagttgttgatgggatatcttgcatatctgggtgggcgatctggaacaggagagaggacagttgaacagcaagtattagaatctaatccagttcttgaagcctttgggaatgcgaaaactgttcggaacaacaactcaagtcgatttggtaaatttgttgaaatccaatttgacaagagcggtaagatatctggtgctgccattagaacttacttgctcgagagatctcgagtttgccaaattaatagtccagagaggaactaccattgcttttacttcctatgtgcagcaccatcagaggatctcaagaagtataagctcggggacccatcgttgtttcactatctcaaccagtcagcttgtattaaagttgatggaatcaatgatgctgaagaataccttgcaacaagaaaagcaatggatactgttggcattactgatcaagaacaggaagctatattccgggttgttgctgctgtgcttcatcttggaaacataaattttacaaaagggagagaagcagattcatccataataaaggatgacaaatctagattccatcttaatacagcaggagagctcttaatgtgtgattgtgagaagttggagaatgccttgataaagagggaaattaatacaccagaaggagtgattaccacaacagttggtccgaattctgctactattagccgggatggtttagcaaagcagatatactctcgattgtttgactggcttgtaaacagaataaatgcatcgataggacaagacccaaactctaacaaactgattggggtacttgatatatatggttttgaaagttttaaaaccaacagttttgaacaactgtgcatcaattttaccaatgaaaaactccagcaacattttaatcagaatgtcttcaaaatggaacaagaggaatacacaagggagcaaattaattggagttacatagagtttgttgacaatcaagatgtacttgacctgattgaaaggaaaccaggtggcattattgcgcttcttgatgaagcctgcatgtttccaaagtccacacacgagacattgtctcagaagctgtacgaaaagttcaagaaccacaaaagatttaccaaaccaaagctttctcgtactgcatttacaattcaacattatgctggagatgtaacatatcaatctgatcaattcctggacaagaacaaggactatgtggtagcagagcatcaggaattacttaatgcttctaagtgctcttttgtatcagggttatttccacaagcaacagaagagaacacaaaatcatcaaaatcctcaattgcaactcgctttaagatacaacttcatgaactcatggagactttgagctctacagagccacattacataagatgtataaaaccaaatagtgtccttaagcctggcatttttgagaataccaatgttctgcagcagcttcgatgttctggtgttcttgaagccattagaatcagctgtgctggttatcccacaaggaaactatttcatgattttctacatcgttttcgtgttcttgctcctgaaattttgaaagagaaaaatgatgaaaaagtctcctgtcaaaaggttttggacaaaatgggactacagggttatcagataggaagaactaaggtattcctgagggctggtcaaatggctgatctggatgccagaagaacagagatgcgaaacaatgcagcaaaaggcgttcagagtcaattccgtactcatgttgctcgtgagcagttcctagtactacgggacacatctatttatttgcaatctttcgttagagccagattggcatgtaagcaacatgaattcctgagacaacaagcagcagctttgagaattcagaaaaatgcacgatggtattttgcctggaaaacttattaccaactacgattgtcagccattacattgcaggccgggctaaggtccatggcagctcgtaatgagttcacctttagaaagaaaaataaagcttcagtccatatccagtcccagtggcgatgccaccgagattactcaaattatatgaatttgaagagagccgcactaacatatcagtgtgcttggcgaagaagggttgctaggaaggagctgaggaagctcaaactggctgcaagagatacacaggctctaaaggtggccaaagagaaacttgaggaacgtgtggaagagctaacaagtcgcctggaccgcgaaaagaaactaagggctgatttggagaagtctaaagcagatgaagtttccaaattgaaagaagctcttcatgagatggagcagcgagtagaagaagtgaaagcgatgcaggaacaagaatcagcaaaaaaggctgttgaagaagctctagctcaagaaagagaaaagatcagtttattgactactgaaattgagggcctaaaggttctgctagtagctgaacgagaggagaatgataaaatgaagaaagcgcatgctaatgctctggaaacaaatgaagagttaaataaggaagtcagtgatgcagatgaaaagatcaaacaatttagtgatactgtaagaagactagaagggactgtaagcgaacatgagggccttttgctaactgaaaggcaacaaaatgaagcagctaatgctgcacttgctgaatctcaagcgagaaatgaagcactggtaagcaagcttgaagatgctgtgaaacaaaatgatctcctccatgaagctgaccaaagatttcaagaagctacaaaaaatttggaatcttcactgacatttgagaagcaacgacatgaggcaaatttgatagaattagctgaagcacgagaaaagattgaagaacttcaaagagaagttggggacactgatgaaaaattcaccctgcttcagactagtatacaaagcgttgaagaaaggttaagagagaaggatgctctattgacaacagaaagactagaaagtgaagcaactaagaaatcactaaatgaatctgaggatagaaaccaggacttactactgaaaattgaaattgctcagaaagacattgctcacttccaagaaaccgtccgaagacatgaagaaaatatggcagcactggaaacttcgttgagatctgaaaggcagcaaaatgatgcaatcatgaaacaactagctgaatctcagggggaaataggagagctgcaaaggaagcttgaagatgctgatgccagaaatgggcttcttcaagattctttacagagacatgaagaaaatatggcagcactggaaacttcgttgagatctgaaaggcagcaaaatgatgcaatcatgaaacaactagctgaatctcagggggaaataggagagctgcaaaggaagcttgaagatgctgatgccagaaatgggcttcttcaagattctttacagagacatgaagaaaatatggcagcactggaaacttcgttgagatctgaaaggcagcaaaatgatgcaatcatgaaacaactagctgaatctcagggggaaataggagagctgcaaaggaagcttgaagatgctgatgccagaaatgggcttcttcaagattctttacagagacttgaagacgatgctactacaagagaagctttaatggaaactgaaaggaaagaaactgaaatgacaaaaaagacactgactgaagctctggatcaaatcgaggaattagtcaaagaagttgagtgtgctaaccacagtgtgcatcagcttcaagatagtatgcagagaatggagcaaaccgcagttgcaagggaagcaactttactagcagaacatcaggaaaaagatgcgacatcaaaagcattagcagaggcacaagggaggattgaaggtttactgaaggaaatttattctgctaatagaaaaaatgatcaacttcaaagtactatagaaagacttgaacaagatgtcactgccaaagaggccttattgcttacagaaaaggaggcacacgacgcaacaaggaagactctgactgaagctcaggaagagagtggagaacttctgaagaaaattcatgataatgataaacatattcttcagcttcagtttactatacaaaggcttgaggaaactacagttgcaaatgagaatttgctgttgagggagagggagcagaatgacataacaacaaaagcgcacaatgaaagtcaagaaaaatatgaagaattactaagcaaatttgttgatgttgacaggaaaatcgaccttcttcaaggtaccatagaaaggcttggagaaaatacaacaaaggattctctgttgctatcagagagacatgaaaaggatgctattaagaaagcacttactgaggctcaagagaaaaatgaagagttactgatgaaagttgaagatgctaatgaaaaaatagaacaacttcaaactacgatagatatgcttgaagataatgtagctgcaaaagatgtttctttagaagctgcaatgaaggaaaatgatgcaattaggagatctcttactgaagctcaagagagaaatgatgaattactcaagaaaattagtgacagtgaatacaggatccatttacttcaagacacgatacaaaagcttcaagtagatgcaatatcaagattgtcgtcttttgtaatggaaaaacaagaaagtgatgcttcaaagagagctgttactgaagctcatgaaagaaatgaagatttactgaagagaaatgaggacctcctcaagaggaatgatgatctgattaagaaaattgaagactctagtaaaattgtcactcaacttcaggaagctctacaaaggcttgaaggaaaagcatgcaacttagaggctgagaaccaagttcttcgtcaacaagcaacttcaactccaccaacttcagctaaatctccagcttcacgtgcaaagatctcaaggatccatagaagtccagagaatggccataatttgaatggtgacattaggcaaactgaaatgaagccctccactggcacatcagaagcaataacctcagcagtgagtttaaccatgctaatgttcctgacttgggcgaccaaaaagattttgaacatggagaaaaactgcaaagaataccaaaacagaaatatcagccttctcatcaccagcagccccaggacgatcagcagtggctactcgcttgtattccacaacatcttggattttctgggagcaaaccagttgcagctctccttatataccaatgccttctccattggaaatcatttgaagccatgaagacaggtgtcttcgacagcattttgcatgctataaactcagccacagaggctcaaaatgacatgagaacattggcatattggttgtccaacttatctacattaacagttctccttcaacgatcattcaaaactactaggacggcaatctcaactccacaaaggagaagattttcatcggagaggatctttcatggaaatcaaacttcaaatgctgggcttgcttatctcagtggtcaatcagttgttgggtctgctggactgccccaagttgaagcaaaatatcctgctttgctattcaaacagcagctcgtggatctaattgaaaaggtttatggcatgataagtgacagcgtgaagaaggagctaaaccctttgcttgaattgtgtatacaggatccacgaacttctcactcgagtatcgcaaaaggcaatcttaatggcatgggtcaacagaaccaactcacatattggctgggcatagtgaaaattctcactagctacttggatgtactgagggtaaatcacgttccatcaattctggtgcataaactcttcactcagatattctcattgattgatgttcaactatttaaccggttacttttgcggcgtgagtgctgttcttttagtaacggggaatatgtcagagctggactaactgaactaaaacattggtccgacaatgctacaagagagtttgcaggttcagcgtgggaggcattgaggcatattagacaagctgtcgatttcctggtgatttctcttaaaccaatgaggacattaagagagatacacactgatgtgtgccctgccctcagcatacaacagctagagcgaatagttagtatgtactgggatgatgtgaatggaacaaacactatttcagcagagtttacatcaagcttgaaatctgcggtgcgtgatgaatcgaatatggccacaagtttttctatattgctagatgatgattccagtatacctttttcacttgatgatattacaaagacactgccagtcattgaggtggctgatgacgactttgtgccttttgtccatgaaaacccaagctttgcgtttttattgcaaagaggggagtagtccatttttcctcaccatggtgacttcacccacctgtggataagtcaggattcctgcctaggatgtacagtacgcgtgattctttttgtaccaggtagcaaggcattaaagattagatgctaggtgagcttataggattctggttttattgatttgtgtgttgattgtccatttgtattcaggttttccttgccattttttttctgtttgtagttatttttttgggcttgtatactaggggctaagggcagaaggccctgtcctgtaagcaaagtagcacaaggttttgctgtaggtgggaaagctgtacatgtgttgtaggagggggagtagcggttatcctgctggtcagggctaagaacgacagttgttgagaaggcaacggttatgccgtttttcctggatgagcagaatatcttgtcctggactgctggacagcagagcagtgcccacggaggtctctgcgcgctcgatcgcgacgatgcggccactatggtagtagatgcactcattacctgttatactagtaatttgctcgcgcctcgcgcaagtcgttaaccgatgagtttatacaattaaaagagtgttgctttagccatataaatacagaagtagtaatatatgtggatacataaacatagaagtgacaaaattatataaacatacaattgtttgcgttggtagataagttcagtagcatcgtgagcagcctagatgtcaaaattttgaagacaacaaaatactggtcttgaaggccacaaaatgcagagcaacattacaatgcacggatccttttcatgatcgtgctcactttttatgaaattcattgcttgttgtattgaatgtatatgtatacattaaggtacaattattagaattgtctcaatatgtaacgaagtaacatgaatagatagctttgcttagcacagaatgtcatgtgaatgtagcaaaaaataagtcagttttataattattatcgatttttattgtgctatcgtttgtcatgtaatatactttaagtatgatttagatttttttcgcaaaaaaaatgaataagac

SEQ ID NO: 32171 - DNA, 3623 bp, Zea Mays
atggcggaagacggcgcatccgcgacacaggctatggtggcgcagacgcgcccaacggggccgtgcaacggcgagggctgcccaggtggtgctgtccatggtggggaaggggggaggagtcgatttggtaaatttgttgaaatccaatttgacaagagcggtaagatatctggtgctgccattagaacttacttgctcgagagatctcgagtttgccaaattaatagtccagagaggaactaccattgcttttacttcctatgtgcagcaccatcagaggatctcaagaagtataagctcggggacccatcgttgtttcactatctcaaccagtcagcttgtattaaagttgatggaatcaatgatgctgaagaataccttgcaacaagaaaagcaatggatactgttggcattactgatcaagaacaggaagctatattccgggttgttgctgctgtgcttcatcttggaaacataaattttacaaaagggagagaagcagattcatccataataaaggatgacaaatctagattccatcttaatacagcaggagagctcttaatgtgtgattgtgagaagttggagaatgccttgataaagagggaaattaatacaccagaaggagtgattaccacaacagttggtccgaattctgctactattagccgggatggtttagcaaagcagatatactctcgattgtttgactggcttgtaaacagaataaatgcatcgataggacaagacccaaactctaacaaactgattggggtacttgatatatatggttttgaaagttttaaaaccaacagttttgaacaactgtgcatcaattttaccaatgaaaaactccagcaacattttaatcagaatgtcttcaaaatggaacaagaggaatacacaagggagcaaattaattggagttacatagagtttgttgacaatcaagatgtacttgacctgattgaaaggaaaccaggtggcattattgcgcttcttgatgaagcctgcatgtttccaaagtccacacacgagacattgtctcagaagctgtacgaaaagttcaagaaccacaaaagatttaccaaaccaaagctttctcgtactgcatttacaattcaacattatgctggagatgtaacatatcaatctgatcaattcctggacaagaacaaggactatgtggtagcagagcatcaggaattacttaatgcttctaagtgctcttttgtatcagggttatttccacaagcaacagaagagaacacaaaatcatcaaaatcctcaattgcaactcgctttaagatacaacttcatgaactcatggagactttgagctctacagagccacattacataagatgtataaaaccaaatagtgtccttaagcctggcatttttgagaataccaatgttctgcagcagcttcgatgttctggtgttcttgaagccattagaatcagctgtgctggttatcccacaaggaaactatttcatgattttctacatcgttttcgtgttcttgctcctgaaattttgaaagagaaaaatgatgaaaaagtctcctgtcaaaaggttttggacaaaatgggactacagggttatcagataggaagaactaaggtattcctgagggctggtcaaatggctgatctggatgccagaagaacagagatgcgaaacaatgcagcaaaaggcgttcagagtcaattccgtactcatgttgctcgtgagcagttcctagtactacgggacacatctatttatttgcaatctttcgttagagccagattggcatgtaagcaacatgaattcctgagacaacaagcagcagctttgagaattcagaaaaatgcacgatggtattttgcctggaaaacttattaccaactacgattgtcagccattacattgcaggccgggctaaggtccatggcagctcgtaatgagttcacctttagaaagaaaaataaagcttcagtccatatccagtcccagtggcgatgccaccgagattactcaaattatatgaatttgaagagagccgcactaacatatcagtgtgcttggcgaagaagggttgctaggaaggagctgaggaagctcaaactggctgcaagagatacacaggctctaaaggtggccaaagagaaacttgaggaacgtgtggaagagctaacaagtcgcctggaccgcgaaaagaaactaagggctgatttggagaagtctaaagcagatgaagtttccaaattgaaagaagctcttcatgagatggagcagcgagtagaagaagtgaaagcgatgcaggaacaagaatcagcaaaaaaggctgttgaagaagctctagctcaagaaagagaaaagatcagtttattgactactgaaattgagggcctaaaggttctgctagtagctgaacgagaggagaatgataaaatgaagaaagcgcatgctaatgctctggaaacaaatgaagagttaaataaggaagtcagtgatgcagatgaaaagatcaaacaatttagtgatactgtaagaagactagaagggactgtaagcgaacatgagggccttttgctaactgaaaggcaacaaaatgaagcagctaatgctgcacttgctgaatctcaagcgagaaatgaagcactggtaagcaagcttgaagatgctgtgaaacaaaatgatctcctccatgaagctgaccaaagatttcaagaagctacaaaaaatttggaatcttcactgacatttgagaagcaacgacatgaggcaaatttgatagaattagctgaagcacgagaaaagattgaagaacttcaaagagaagttggggacactgatgaaaaattcaccctgcttcagactagtatacaaagcgttgaagaaaggttaagagagaaggatgctctattgacaacagaaagactagaaagtgaagcaactaagaaatcactaaatgaatctgaggatagaaaccaggacttactactgaaaattgaaattgctcagaaagacattgctcacttccaagaaaccgtccgaagacatgaagaaaatatggcagcactggaaacttcgttgagatctgaaaggcagcaaaatgatgcaatcatgaaacaactagctgaatctcagggggaaataggagagctgcaaaggaagcttgaagatgctgatgccagaaatgggcttcttcaagattctttacagagacttgaagacgatgctactacaagagaagctttaatggaaactgaaaggaaagaaactgaaatgacaaaaaagacactgactgaagctctggatcaaatcgaggaattagtcaaagaagttgagtgtgctaaccacagtgtgcatcagcttcaagatagtatgcagagaatggagcaaaccgcagttgcaagggaagcaactttactagcagaacatcaggaaaaagatgcgacatcaaaagcattagcagaggcacaagggaggattgaaggtttactgaaggaaatttattctgctaatagaaaaaatgatcaacttcaaagtactatagaaaggactggttgagattaagtggaacagtaaattaaggaagccatgctcacgaattctgtagaacccaattttat

SEQ ID NO: 32172 - DNA, 7576 bp, Zea Mays
atggcggaagacggcgcatccgcgacacaggctatggtggcgcagacgcgcccaacggggccgtgcaacggcgagggctgcccaggtggtgctgtccatggtggggaaggggggaggagtcgatttggtaaatttgttgaaatccaatttgacaagagcggtaagatatctggtgctgccattagaacttacttgctcgagagatctcgagtttgccaaattaatagtccagagaggaactaccattgcttttacttcctatgtgcagcaccatcagaggatctcaagaagtataagctcggggacccatcgttgtttcactatctcaaccagtcagcttgtattaaagttgatggaatcaatgatgctgaagaataccttgcaacaagaaaagcaatggatactgttggcattactgatcaagaacaggaagctatattccgggttgttgctgctgtgcttcatcttggaaacataaattttacaaaagggagagaagcagattcatccataataaaggatgacaaatctagattccatcttaatacagcaggagagctcttaatgtgtgattgtgagaagttggagaatgccttgataaagagggaaattaatacaccagaaggagtgattaccacaacagttggtccgaattctgctactattagccgggatggtttagcaaagcagatatactctcgattgtttgactggcttgtaaacagaataaatgcatcgataggacaagacccaaactctaacaaactgattggggtacttgatatatatggttttgaaagttttaaaaccaacagttttgaacaactgtgcatcaattttaccaatgaaaaactccagcaacattttaatcagaatgtcttcaaaatggaacaagaggaatacacaagggagcaaattaattggagttacatagagtttgttgacaatcaagatgtacttgacctgattgaaaggaaaccaggtggcattattgcgcttcttgatgaagcctgcatgtttccaaagtccacacacgagacattgtctcagaagctgtacgaaaagttcaagaaccacaaaagatttaccaaaccaaagctttctcgtactgcatttacaattcaacattatgctggagatgtaacatatcaatctgatcaattcctggacaagaacaaggactatgtggtagcagagcatcaggaattacttaatgcttctaagtgctcttttgtatcagggttatttccacaagcaacagaagagaacacaaaatcatcaaaatcctcaattgcaactcgctttaagatacaacttcatgaactcatggagactttgagctctacagagccacattacataagatgtataaaaccaaatagtgtccttaagcctggcatttttgagaataccaatgttctgcagcagcttcgatgttctggtgttcttgaagccattagaatcagctgtgctggttatcccacaaggaaactatttcatgattttctacatcgttttcgtgttcttgctcctgaaattttgaaagagaaaaatgatgaaaaagtctcctgtcaaaaggttttggacaaaatgggactacagggttatcagataggaagaactaaggtattcctgagggctggtcaaatggctgatctggatgccagaagaacagagatgcgaaacaatgcagcaaaaggcgttcagagtcaattccgtactcatgttgctcgtgagcagttcctagtactacgggacacatctatttatttgcaatctttcgttagagccagattggcatgtaagcaacatgaattcctgagacaacaagcagcagctttgagaattcagaaaaatgcacgatggtattttgcctggaaaacttattaccaactacgattgtcagccattacattgcaggccgggctaaggtccatggcagctcgtaatgagttcacctttagaaagaaaaataaagcttcagtccatatccagtcccagtggcgatgccaccgagattactcaaattatatgaatttgaagagagccgcactaacatatcagtgtgcttggcgaagaagggttgctaggaaggagctgaggaagctcaaactggctgcaagagatacacaggctctaaaggtggccaaagagaaacttgaggaacgtgtggaagagctaacaagtcgcctggaccgcgaaaagaaactaagggctgatttggagaagtctaaagcagatgaagtttccaaattgaaagaagctcttcatgagatggagcagcgagtagaagaagtgaaagcgatgcaggaacaagaatcagcaaaaaaggctgttgaagaagctctagctcaagaaagagaaaagatcagtttattgactactgaaattgagggcctaaaggttctgctagtagctgaacgagaggagaatgataaaatgaagaaagcgcatgctaatgctctggaaacaaatgaagagttaaataaggaagtcagtgatgcagatgaaaagatcaaacaatttagtgatactgtaagaagactagaagggactgtaagcgaacatgagggccttttgctaactgaaaggcaacaaaatgaagcagctaatgctgcacttgctgaatctcaagcgagaaatgaagcactggtaagcaagcttgaagatgctgtgaaacaaaatgatctcctccatgaagctgaccaaagatttcaagaagctacaaaaaatttggaatcttcactgacatttgagaagcaacgacatgaggcaaatttgatagaattagctgaagcacgagaaaagattgaagaacttcaaagagaagttggggacactgatgaaaaattcaccctgcttcagactagtatacaaagcgttgaagaaaggttaagagagaaggatgctctattgacaacagaaagactagaaagtgaagcaactaagaaatcactaaatgaatctgaggatagaaaccaggacttactactgaaaattgaaattgctcagaaagacattgctcacttccaagaaaccgtccgaagacatgaagaaaatatggcagcactggaaacttcgttgagatctgaaaggcagcaaaatgatgcaatcatgaaacaactagctgaatctcagggggaaataggagagctgcaaaggaagcttgaagatgctgatgccagaaatgggcttcttcaagattctttacagagacatgaagaaaatatggcagcactggaaacttcgttgagatctgaaaggcagcaaaatgatgcaatcatgaaacaactagctgaatctcagggggaaataggagagctgcaaaggaagcttgaagatgctgatgccagaaatgggcttcttcaagattctttacagagacatgaagaaaatatggcagcactggaaacttcgttgagatctgaaaggcagcaaaatgatgcaatcatgaaacaactagctgaatctcagggggaaataggagagctgcaaaggaagcttgaagatgctgatgccagaaatgggcttcttcaagattctttacagagacttgaagacgatgctactacaagagaagctttaatggaaactgaaaggaaagaaactgaaatgacaaaaaagacactgactgaagctctggatcaaatcgaggaattagtcaaagaagttgagtgtgctaaccacagtgtgcatcagcttcaagatagtatgcagagaatggagcaaaccgcagttgcaagggaagcaactttactagcagaacatcaggaaaaagatgcgacatcaaaagcattagcagaggcacaagggaggattgaaggtttactgaaggaaatttattctgctaatagaaaaaatgatcaacttcaaagtactatagaaaggttagaagagggtgcaacaacgacagatgctctttacttagcagaaagaaaagggcatgatcaaacgaagaaatcactttctgaagctcaagaaacaaacaaggagttactaaaaaaaattgagaaagctgagaaaaacatagatcagcttctggagaatgtggaaagacttgaaaaagatgcaattacaagagagtctttactgcttacaacaaagcaaagctatggtgacaccgcaaaattgctgcttgaatctcaagagaaaaaccaagagttagtgcacaaagtagaggactcagatagcaaaattgttctgcttgaagattcagtaaaaagactcgaagaaagtactgcagataaagattctttattggctatagaaagacatgaaaacagtgaaaccaagaaagaattagttggttctcagaaaaagattgcggaattgctaactgaagtgcaagatactcgtgcaaatgttgcagaacttgaggacttgattaggagactcgaaggaaaattggcaataactgaagctttattgctaactgaaaaggaacagaatgcttccaccttaaaattacttgcagaagcacaattgagaatcgaagaattaataaaaaaacttgaaggttcagatagaaaatctgatagccttcaggatacaataacaagacttgaacaagatgtcactgccaaagaggccttattgcttacagaaaaggaggcacacgacgcaacaaggaagactctgactgaagctcaggaagagagtggagaacttctgaagaaaattcatgataatgataaacatattcttcagcttcagtttactatacaaaggcttgaggaaactacagttgcaaatgagaatttgctgttgagggagagggagcagaatgacataacaacaaaagcgcacaatgaaagtcaagaaaaatatgaagaattactaagcaaatttgttgatgttgacaggaaaatcgaccttcttcaaggtaccatagaaaggcttggagaaaatacaacaaaggattctctgttgctatcagagagacatgaaaaggatgctattaagaaagcacttactgaggctcaagagaaaaatgaagagttactgatgaaagttgaagatgctaatgaaaaaatagaacaacttcaaactacgatagatatgcttgaagataatgtagctgcaaaagatgtttctttagaagctgcaatgaaggaaaatgatgcaattaggagatctcttactgaagctcaagagagaaatgatgaattactcaagaaaattagtgacagtgaatacaggatccatttacttcaagacacgatacaaaagcttcaagtagatgcaatatcaagattgtcgtcttttgtaatggaaaaacaagaaagtgatgcttcaaagagagctgttactgaagctcatgaaagaaatgaagatttactgaagagaaatgaggacctcctcaagaggaatgatgatctgattaagaaaattgaagactctagtaaaattgtcactcaacttcaggaagctctacaaaggcttgaaggaaaagcatgcaacttagaggctgagaaccaagttcttcgtcaacaagcaacttcaactccaccaacttcagctaaatctccagcttcacgtgcaaagatctcaaggatccatagaagtccagagaatggccataatttgaatggtgacattaggcaaactgaaatgaagccctccactggcacatcagaagcaataacctcagcagctaatgttcctgacttgggcgaccaaaaagattttgaacatggagaaaaactgcaaagaataccaaaacagaaatatcagccttctcatcaccagcagccccaggacgatcagcagtggctactcgcttgtattccacaacatcttggattttctgggagcaaaccagttgcagctctccttatataccaatgccttctccattggaaatcatttgaagccatgaagacaggtgtcttcgacagcattttgcatgctataaactcagccacagaggctcaaaatgacatgagaacattggcatattggttgtccaacttatctacattaacagttctccttcaacgatcattcaaaactactaggacggcaatctcaactccacaaaggagaagattttcatcggagaggatctttcatggaaatcaaacttcaaatgctgggcttgcttatctcagtggtcaatcagttgttgggtctgctggactgccccaagttgaagcaaaatatcctgctttgctattcaaacagcagctcgtggatctaattgaaaaggtttatggcatgataagtgacagcgtgaagaaggagctaaaccctttgcttgaattgtgtatacaggatccacgaacttctcactcgagtatcgcaaaaggcaatcttaatggcatgggtcaacagaaccaactcacatattggctgggcatagtgaaaattctcactagctacttggatgtactgagggtaaatcacgttccatcaattctggtgcataaactcttcactcagatattctcattgattgatgttcaactatttaaccggttacttttgcggcgtgagtgctgttcttttagtaacggggaatatgtcagagctggactaactgaactaaaacattggtccgacaatgctacaagagagtttgcaggttcagcgtgggaggcattgaggcatattagacaagctgtcgatttcctggtacgtctcccggtgcttgctcggctgggcccacaggccgattcacatcccatcgtggctccattttccaagacgcgtgcgcccgttcgacagcccgaggatatcctttccaaggtgatttcagcggcgcaaggatcacctcttttgactatgcaggcactacggggtccacaagatctctcgcatccgcctaatgagtctggttccatcaaacctgcgcctgctatatctcccgagaaacctaggcgtatctgctccgaggaaattacctcaggcttttcaacggttggagctgggcctgaggagcccaggtgtgattgctcctgtcctctaggcacaggcaactgcaaagattgggcctcccaatctggggaatgttttgaggaggcaggacacccccaggcgtcgacagttgagcaacctctcctggctgctcccattgacgtgcctactctctctgatcagcagggcattggtttgagtattgagcagatcccagaacagcacattgaagatcaggggatttatttaaatgacgatcagagtactgaacagaacccagaacaacacattgaagatcaggggctcattttatatgatgatcagagtactgaacagaattctgaacagaacattgaacaacagacatccttgatccctagtggacttaatctcttgaattcacaacctgttactactcaactcaatgtgcaggatgaccggaggctcttacaggcctaccccttggtttattctagaaggcgacgacactctagaagcccaccgccattgaccaaaactccacaagaaacccctgaagttgcagctgttaggaaactcatgaaggcttctaaggctattgaagcgctgctgcctcaaccagtcatccataagcaaaaaccaaagctccaagcaccttaggccttgttactttcttccaagc

SEQ ID NO: 32173 - DNA, 7365 bp, Zea Mays
atggcggaagacggcgcatccgcgacacaggctatggtggcgcagacgcgcccaacggggccgtgcaacggcgagggctgcccaggtggtgctgtccatggtggggaaggggggaggagtcgatttggtaaatttgttgaaatccaatttgacaagagcggtaagatatctggtgctgccattagaacttacttgctcgagagatctcgagtttgccaaattaatagtccagagaggaactaccattgcttttacttcctatgtgcagcaccatcagaggatctcaagaagtataagctcggggacccatcgttgtttcactatctcaaccagtcagcttgtattaaagttgatggaatcaatgatgctgaagaataccttgcaacaagaaaagcaatggatactgttggcattactgatcaagaacaggaagctatattccgggttgttgctgctgtgcttcatcttggaaacataaattttacaaaagggagagaagcagattcatccataataaaggatgacaaatctagattccatcttaatacagcaggagagctcttaatgtgtgattgtgagaagttggagaatgccttgataaagagggaaattaatacaccagaaggagtgattaccacaacagttggtccgaattctgctactattagccgggatggtttagcaaagcagatatactctcgattgtttgactggcttgtaaacagaataaatgcatcgataggacaagacccaaactctaacaaactgattggggtacttgatatatatggttttgaaagttttaaaaccaacagttttgaacaactgtgcatcaattttaccaatgaaaaactccagcaacattttaatcagaatgtcttcaaaatggaacaagaggaatacacaagggagcaaattaattggagttacatagagtttgttgacaatcaagatgtacttgacctgattgaaaggaaaccaggtggcattattgcgcttcttgatgaagcctgcatgtttccaaagtccacacacgagacattgtctcagaagctgtacgaaaagttcaagaaccacaaaagatttaccaaaccaaagctttctcgtactgcatttacaattcaacattatgctggagatgtaacatatcaatctgatcaattcctggacaagaacaaggactatgtggtagcagagcatcaggaattacttaatgcttctaagtgctcttttgtatcagggttatttccacaagcaacagaagagaacacaaaatcatcaaaatcctcaattgcaactcgctttaagatacaacttcatgaactcatggagactttgagctctacagagccacattacataagatgtataaaaccaaatagtgtccttaagcctggcatttttgagaataccaatgttctgcagcagcttcgatgttctggtgttcttgaagccattagaatcagctgtgctggttatcccacaaggaaactatttcatgattttctacatcgttttcgtgttcttgctcctgaaattttgaaagagaaaaatgatgaaaaagtctcctgtcaaaaggttttggacaaaatgggactacagggttatcagataggaagaactaaggtattcctgagggctggtcaaatggctgatctggatgccagaagaacagagatgcgaaacaatgcagcaaaaggcgttcagagtcaattccgtactcatgttgctcgtgagcagttcctagtactacgggacacatctatttatttgcaatctttcgttagagccagattggcatgtaagcaacatgaattcctgagacaacaagcagcagctttgagaattcagaaaaatgcacgatggtattttgcctggaaaacttattaccaactacgattgtcagccattacattgcaggccgggctaaggtccatggcagctcgtaatgagttcacctttagaaagaaaaataaagcttcagtccatatccagtcccagtggcgatgccaccgagattactcaaattatatgaatttgaagagagccgcactaacatatcagtgtgcttggcgaagaagggttgctaggaaggagctgaggaagctcaaactggctgcaagagatacacaggctctaaaggtggccaaagagaaacttgaggaacgtgtggaagagctaacaagtcgcctggaccgcgaaaagaaactaagggctgatttggagaagtctaaagcagatgaagtttccaaattgaaagaagctcttcatgagatggagcagcgagtagaagaagtgaaagcgatgcaggaacaagaatcagcaaaaaaggctgttgaagaagctctagctcaagaaagagaaaagatcagtttattgactactgaaattgagggcctaaaggttctgctagtagctgaacgagaggagaatgataaaatgaagaaagcgcatgctaatgctctggaaacaaatgaagagttaaataaggaagtcagtgatgcagatgaaaagatcaaacaatttagtgatactgtaagaagactagaagggactgtaagcgaacatgagggccttttgctaactgaaaggcaacaaaatgaagcagctaatgctgcacttgctgaatctcaagcgagaaatgaagcactggtaagcaagcttgaagatgctgtgaaacaaaatgatctcctccatgaagctgaccaaagatttcaagaagctacaaaaaatttggaatcttcactgacatttgagaagcaacgacatgaggcaaatttgatagaattagctgaagcacgagaaaagattgaagaacttcaaagagaagttggggacactgatgaaaaattcaccctgcttcagactagtatacaaagcgttgaagaaaggttaagagagaaggatgctctattgacaacagaaagactagaaagtgaagcaactaagaaatcactaaatgaatctgaggatagaaaccaggacttactactgaaaattgaaattgctcagaaagacattgctcacttccaagaaaccgtccgaagacatgaagaaaatatggcagcactggaaacttcgttgagatctgaaaggcagcaaaatgatgcaatcatgaaacaactagctgaatctcagggggaaataggagagctgcaaaggaagcttgaagatgctgatgccagaaatgggcttcttcaagattctttacagagacatgaagaaaatatggcagcactggaaacttcgttgagatctgaaaggcagcaaaatgatgcaatcatgaaacaactagctgaatctcagggggaaataggagagctgcaaaggaagcttgaagatgctgatgccagaaatgggcttcttcaagattctttacagagacatgaagaaaatatggcagcactggaaacttcgttgagatctgaaaggcagcaaaatgatgcaatcatgaaacaactagctgaatctcagggggaaataggagagctgcaaaggaagcttgaagatgctgatgccagaaatgggcttcttcaagattctttacagagacttgaagacgatgctactacaagagaagctttaatggaaactgaaaggaaagaaactgaaatgacaaaaaagacactgactgaagctctggatcaaatcgaggaattagtcaaagaagttgagtgtgctaaccacagtgtgcatcagcttcaagatagtatgcagagaatggagcaaaccgcagttgcaagggaagcaactttactagcagaacatcaggaaaaagatgcgacatcaaaagcattagcagaggcacaagggaggattgaaggtttactgaaggaaatttattctgctaatagaaaaaatgatcaacttcaaagtactatagaaagacttgaacaagatgtcactgccaaagaggccttattgcttacagaaaaggaggcacacgacgcaacaaggaagactctgactgaagctcaggaagagagtggagaacttctgaagaaaattcatgataatgataaacatattcttcagcttcagtttactatacaaaggcttgaggaaactacagttgcaaatgagaatttgctgttgagggagagggagcagaatgacataacaacaaaagcgcacaatgaaagtcaagaaaaatatgaagaattactaagcaaatttgttgatgttgacaggaaaatcgaccttcttcaaggtaccatagaaaggcttggagaaaatacaacaaaggattctctgttgctatcagagagacatgaaaaggatgctattaagaaagcacttactgaggctcaagagaaaaatgaagagttactgatgaaagttgaagatgctaatgaaaaaatagaacaacttcaaactacgatagatatgcttgaagataatgtagctgcaaaagatgtttctttagaagctgcaatgaaggaaaatgatgcaattaggagatctcttactgaagctcaagagagaaatgatgaattactcaagaaaattagtgacagtgaatacaggatccatttacttcaagacacgatacaaaagcttcaagtagatgcaatatcaagattgtcgtcttttgtaatggaaaaacaagaaagtgatgcttcaaagagagctgttactgaagctcatgaaagaaatgaagatttactgaagagaaatgaggacctcctcaagaggaatgatgatctgattaagaaaattgaagactctagtaaaattgtcactcaacttcaggaagctctacaaaggcttgaaggaaaagcatgcaacttagaggctgagaaccaagttcttcgtcaacaagcaacttcaactccaccaacttcagctaaatctccagcttcacgtgcaaagatctcaaggatccatagaagtccagagaatggccataatttgaatggtgacattaggcaaactgaaatgaagccctccactggcacatcagaagcaataacctcagcagctaatgttcctgacttgggcgaccaaaaagattttgaacatggagaaaaactgcaaagaataccaaaacagaaatatcagccttctcatcaccagcagccccaggacgatcagcagtggctactcgcttgtattccacaacatcttggattttctgggagcaaaccagttgcagctctccttatataccaatgccttctccattggaaatcatttgaagccatgaagacaggtgtcttcgacagcattttgcatgctataaactcagccacagaggctcaaaatgacatgagaacattggcatattggttgtccaacttatctacattaacagttctccttcaacgatcattcaaaactactaggacggcaatctcaactccacaaaggagaagattttcatcggagaggatctttcatggaaatcaaacttcaaatgctgggcttgcttatctcagtggtcaatcagttgttgggtctgctggactgccccaagttgaagcaaaatatcctgctttgctattcaaacagcagctcgtggatctaattgaaaaggtttatggcatgataagtgacagcgtgaagaaggagctaaaccctttgcttgaattgtgtatacaggatccacgaacttctcactcgagtatcgcaaaaggcaatcttaatggcatgggtcaacagaaccaactcacatattggctgggcatagtgaaaattctcactagctacttggatgtactgagggtaaatcacgttccatcaattctggtgcataaactcttcactcagatattctcattgattgatgttcaactatttaaccggttacttttgcggcgtgagtgctgttcttttagtaacggggaatatgtcagagctggactaactgaactaaaacattggtccgacaatgctacaagagagtttgcaggttcagcgtgggaggcattgaggcatattagacaagctgtcgatttcctggtgatttctcttaaaccaatgaggacattaagagagatacacactgatgtgtgccctgccctcagcatacaacagctagagcgaatagttagtatgtactgggatgatgtgaatggaacaaacactatttcagcagagtttacatcaagcttgaaatctgcggtgcgtgatgaatcgaatatggccacaagtttttctatattgctagatgatgattccagtatacctttttcacttgatgatattacaaagacactgccagtcattgaggtggctgatgacgactttgtgccttttgtccatgaaaacccaagctttgcgtttttattgcaaagaggggagtagtccatttttcctcaccatggtgacttcacccacctgtggataagtcaggattcctgcctaggatgtacagtacgcgtgattctttttgtaccaggtagcaaggcattaaagattagatgctaggtgagcttataggattctggttttattgatttgtgtgttgattgtccatttgtattcaggttttccttgccattttttttctgtttgtagttatttttttgggcttgtatactaggggctaagggcagaaggccctgtcctgtaagcaaagtagcacaaggttttgctgtaggtgggaaagctgtacatgtgttgtaggagggggagtagcggttatcctgctggtcagggctaagaacgacagttgttgagaaggcaacggttatgccgtttttcctggatgagcagaatatcttgtcctggactgctggacagcagagcagtgcccacggaggtctctgcgcgctcgatcgcgacgatgcggccactatggtagtagatgcactcattacctgttatactagtaatttgctcgcgcctcgcgcaagtcgttaaccgatgagtttatacaattaaaagagtgttgctttagccatataaatacagaagtagtaatatatgtggatacataaacatagaagtgacaaaattatataaacatacaattgtttgcgttggtagataagttcagtagcatcgtgagcagcctagatgtcaaaattttgaagacaacaaaatactggtcttgaaggccacaaaatgcagagcaacattacaatgcacggatccttttcatgatcgtgctcactttttatgaaattcattgcttgttgtattgaatgtatatgtatacattaaggtacaattattagaattgtctcaatatgtaacgaagtaacatgaatagatagctttgcttagcacagaatgtcatgtgaatgtagcaaaaaataagtcagttttataattattatcgatttttattgtgctatcgtttgtcatgtaatatactttaagtatgatttagatttttttcgcaaaaaaaatgaataagac

SEQ ID NO: 32174 - DNA, 7869 bp, Zea Mays
atggcggaagacggcgcatccgcgacacaggctatggtggcgcagacgcgcccaacggggccgtgcaacggcgagggctgcccaggtggtgctgtccatggtggggaaggggggaggagtcgatttggtaaatttgttgaaatccaatttgacaagagcggtaagatatctggtgctgccattagaacttacttgctcgagagatctcgagtttgccaaattaatagtccagagaggaactaccattgcttttacttcctatgtgcagcaccatcagaggatctcaagaagtataagctcggggacccatcgttgtttcactatctcaaccagtcagcttgtattaaagttgatggaatcaatgatgctgaagaataccttgcaacaagaaaagcaatggatactgttggcattactgatcaagaacaggaagctatattccgggttgttgctgctgtgcttcatcttggaaacataaattttacaaaagggagagaagcagattcatccataataaaggatgacaaatctagattccatcttaatacagcaggagagctcttaatgtgtgattgtgagaagttggagaatgccttgataaagagggaaattaatacaccagaaggagtgattaccacaacagttggtccgaattctgctactattagccgggatggtttagcaaagcagatatactctcgattgtttgactggcttgtaaacagaataaatgcatcgataggacaagacccaaactctaacaaactgattggggtacttgatatatatggttttgaaagttttaaaaccaacagttttgaacaactgtgcatcaattttaccaatgaaaaactccagcaacattttaatcagaatgtcttcaaaatggaacaagaggaatacacaagggagcaaattaattggagttacatagagtttgttgacaatcaagatgtacttgacctgattgaaaggaaaccaggtggcattattgcgcttcttgatgaagcctgcatgtttccaaagtccacacacgagacattgtctcagaagctgtacgaaaagttcaagaaccacaaaagatttaccaaaccaaagctttctcgtactgcatttacaattcaacattatgctggagatgtaacatatcaatctgatcaattcctggacaagaacaaggactatgtggtagcagagcatcaggaattacttaatgcttctaagtgctcttttgtatcagggttatttccacaagcaacagaagagaacacaaaatcatcaaaatcctcaattgcaactcgctttaagatacaacttcatgaactcatggagactttgagctctacagagccacattacataagatgtataaaaccaaatagtgtccttaagcctggcatttttgagaataccaatgttctgcagcagcttcgatgttctggtgttcttgaagccattagaatcagctgtgctggttatcccacaaggaaactatttcatgattttctacatcgttttcgtgttcttgctcctgaaattttgaaagagaaaaatgatgaaaaagtctcctgtcaaaaggttttggacaaaatgggactacagggttatcagataggaagaactaaggtattcctgagggctggtcaaatggctgatctggatgccagaagaacagagatgcgaaacaatgcagcaaaaggcgttcagagtcaattccgtactcatgttgctcgtgagcagttcctagtactacgggacacatctatttatttgcaatctttcgttagagccagattggcatgtaagcaacatgaattcctgagacaacaagcagcagctttgagaattcagaaaaatgcacgatggtattttgcctggaaaacttattaccaactacgattgtcagccattacattgcaggccgggctaaggtccatggcagctcgtaatgagttcacctttagaaagaaaaataaagcttcagtccatatccagtcccagtggcgatgccaccgagattactcaaattatatgaatttgaagagagccgcactaacatatcagtgtgcttggcgaagaagggttgctaggaaggagctgaggaagctcaaactggctgcaagagatacacaggctctaaaggtggccaaagagaaacttgaggaacgtgtggaagagctaacaagtcgcctggaccgcgaaaagaaactaagggctgatttggagaagtctaaagcagatgaagtttccaaattgaaagaagctcttcatgagatggagcagcgagtagaagaagtgaaagcgatgcaggaacaagaatcagcaaaaaaggctgttgaagaagctctagctcaagaaagagaaaagatcagtttattgactactgaaattgagggcctaaaggttctgctagtagctgaacgagaggagaatgataaaatgaagaaagcgcatgctaatgctctggaaacaaatgaagagttaaataaggaagtcagtgatgcagatgaaaagatcaaacaatttagtgatactgtaagaagactagaagggactgtaagcgaacatgagggccttttgctaactgaaaggcaacaaaatgaagcagctaatgctgcacttgctgaatctcaagcgagaaatgaagcactggtaagcaagcttgaagatgctgtgaaacaaaatgatctcctccatgaagctgaccaaagatttcaagaagctacaaaaaatttggaatcttcactgacatttgagaagcaacgacatgaggcaaatttgatagaattagctgaagcacgagaaaagattgaagaacttcaaagagaagttggggacactgatgaaaaattcaccctgcttcagactagtatacaaagcgttgaagaaaggttaagagagaaggatgctctattgacaacagaaagactagaaagtgaagcaactaagaaatcactaaatgaatctgaggatagaaaccaggacttactactgaaaattgaaattgctcagaaagacattgctcacttccaagaaaccgtccgaagacatgaagaaaatatggcagcactggaaacttcgttgagatctgaaaggcagcaaaatgatgcaatcatgaaacaactagctgaatctcagggggaaataggagagctgcaaaggaagcttgaagatgctgatgccagaaatgggcttcttcaagattctttacagagacatgaagaaaatatggcagcactggaaacttcgttgagatctgaaaggcagcaaaatgatgcaatcatgaaacaactagctgaatctcagggggaaataggagagctgcaaaggaagcttgaagatgctgatgccagaaatgggcttcttcaagattctttacagagacatgaagaaaatatggcagcactggaaacttcgttgagatctgaaaggcagcaaaatgatgcaatcatgaaacaactagctgaatctcagggggaaataggagagctgcaaaggaagcttgaagatgctgatgccagaaatgggcttcttcaagattctttacagagacttgaagacgatgctactacaagagaagctttaatggaaactgaaaggaaagaaactgaaatgacaaaaaagacactgactgaagctctggatcaaatcgaggaattagtcaaagaagttgagtgtgctaaccacagtgtgcatcagcttcaagatagtatgcagagaatggagcaaaccgcagttgcaagggaagcaactttactagcagaacatcaggaaaaagatgcgacatcaaaagcattagcagaggcacaagggaggattgaaggtttactgaaggaaatttattctgctaatagaaaaaatgatcaacttcaaagtactatagaaagacttgaaaaagatgcaattacaagagagtctttactgcttacaacaaagcaaagctatggtgacaccgcaaaattgctgcttgaatctcaagagaaaaaccaagagttagtgcacaaagtagaggactcagatagcaaaattgttctgcttgaagattcagtaaaaagactcgaagaaagtactgcagataaagattctttattggctatagaaagacatgaaaacagtgaaaccaagaaagaattagttggttctcagaaaaagattgcggaattgctaactgaagtgcaagatactcgtgcaaatgttgcagaacttgaggacttgattaggagactcgaaggaaaattggcaataactgaagctttattgctaactgaaaaggaacagaatgcttccaccttaaaattacttgcagaagcacaattgagaatcgaagaattaataaaaaaacttgaaggttcagatagaaaatctgatagccttcaggatacaataacaagacttgaacaagatgtcactgccaaagaggccttattgcttacagaaaaggaggcacacgacgcaacaaggaagactctgactgaagctcaggaagagagtggagaacttctgaagaaaattcatgataatgataaacatattcttcagcttcagtttactatacaaaggcttgaggaaactacagttgcaaatgagaatttgctgttgagggagagggagcagaatgacataacaacaaaagcgcacaatgaaagtcaagaaaaatatgaagaattactaagcaaatttgttgatgttgacaggaaaatcgaccttcttcaaggtaccatagaaaggcttggagaaaatacaacaaaggattctctgttgctatcagagagacatgaaaaggatgctattaagaaagcacttactgaggctcaagagaaaaatgaagagttactgatgaaagttgaagatgctaatgaaaaaatagaacaacttcaaactacgatagatatgcttgaagataatgtagctgcaaaagatgtttctttagaagctgcaatgaaggaaaatgatgcaattaggagatctcttactgaagctcaagagagaaatgatgaattactcaagaaaattagtgacagtgaatacaggatccatttacttcaagacacgatacaaaagcttcaagtagatgcaatatcaagattgtcgtcttttgtaatggaaaaacaagaaagtgatgcttcaaagagagctgttactgaagctcatgaaagaaatgaagatttactgaagagaaatgaggacctcctcaagaggaatgatgatctgattaagaaaattgaagactctagtaaaattgtcactcaacttcaggaagctctacaaaggcttgaaggaaaagcatgcaacttagaggctgagaaccaagttcttcgtcaacaagcaacttcaactccaccaacttcagctaaatctccagcttcacgtgcaaagatctcaaggatccatagaagtccagagaatggccataatttgaatggtgacattaggcaaactgaaatgaagccctccactggcacatcagaagcaataacctcagcagctaatgttcctgacttgggcgaccaaaaagattttgaacatggagaaaaactgcaaagaataccaaaacagaaatatcagccttctcatcaccagcagccccaggacgatcagcagtggctactcgcttgtattccacaacatcttggattttctgggagcaaaccagttgcagctctccttatataccaatgccttctccattggaaatcatttgaagccatgaagacaggtgtcttcgacagcattttgcatgctataaactcagccacagaggctcaaaatgacatgagaacattggcatattggttgtccaacttatctacattaacagttctccttcaacgatcattcaaaactactaggacggcaatctcaactccacaaaggagaagattttcatcggagaggatctttcatggaaatcaaacttcaaatgctgggcttgcttatctcagtggtcaatcagttgttgggtctgctggactgccccaagttgaagcaaaatatcctgctttgctattcaaacagcagctcgtggatctaattgaaaaggtttatggcatgataagtgacagcgtgaagaaggagctaaaccctttgcttgaattgtgtatacaggatccacgaacttctcactcgagtatcgcaaaaggcaatcttaatggcatgggtcaacagaaccaactcacatattggctgggcatagtgaaaattctcactagctacttggatgtactgagggtaaatcacgttccatcaattctggtgcataaactcttcactcagatattctcattgattgatgttcaactatttaaccggttacttttgcggcgtgagtgctgttcttttagtaacggggaatatgtcagagctggactaactgaactaaaacattggtccgacaatgctacaagagagtttgcaggttcagcgtgggaggcattgaggcatattagacaagctgtcgatttcctggtgatttctcttaaaccaatgaggacattaagagagatacacactgatgtgtgccctgccctcagcatacaacagctagagcgaatagttagtatgtactgggatgatgtgaatggaacaaacactatttcagcagagtttacatcaagcttgaaatctgcggtgcgtgatgaatcgaatatggccacaagtttttctatattgctagatgatgattccagtatacctttttcacttgatgatattacaaagacactgccagtcattgaggtggctgatgacgactttgtgccttttgtccatgaaaacccaagctttgcgtttttattgcaaagaggggagtagtccatttttcctcaccatggtgacttcacccacctgtggataagtcaggattcctgcctaggatgtacagtacgcgtgattctttttgtaccaggtagcaaggcattaaagattagatgctaggtgagcttataggattctggttttattgatttgtgtgttgattgtccatttgtattcaggttttccttgccattttttttctgtttgtagttatttttttgggcttgtatactaggggctaagggcagaaggccctgtcctgtaagcaaagtagcacaaggttttgctgtaggtgggaaagctgtacatgtgttgtaggagggggagtagcggttatcctgctggtcagggctaagaacgacagttgttgagaaggcaacggttatgccgtttttcctggatgagcagaatatcttgtcctggactgctggacagcagagcagtgcccacggaggtctctgcgcgctcgatcgcgacgatgcggccactatggtagtagatgcactcattacctgttatactagtaatttgctcgcgcctcgcgcaagtcgttaaccgatgagtttatacaattaaaagagtgttgctttagccatataaatacagaagtagtaatatatgtggatacataaacatagaagtgacaaaattatataaacatacaattgtttgcgttggtagataagttcagtagcatcgtgagcagcctagatgtcaaaattttgaagacaacaaaatactggtcttgaaggccacaaaatgcagagcaacattacaatgcacggatccttttcatgatcgtgctcactttttatgaaattcattgcttgttgtattgaatgtatatgtatacattaaggtacaattattagaattgtctcaatatgtaacgaagtaacatgaatagatagctttgcttagcacagaatgtcatgtgaatgtagcaaaaaataagtcagttttataattattatcgatttttattgtgctatcgtttgtcatgtaatatactttaagtatgatttagatttttttcgcaaaaaaaatgaataagac

SEQ ID NO: 32175 - DNA, 3887 bp, Zea Mays
atccagtgtgatgttccagttgccctgttatccttctgtcaaaatcacacatcatgttagtgaactcatatggacttgaagacgatgctactacaagagaagctttaatggaaactgaaaggaaagaaactgaaatgacaaaaaagacactgactgaagctctggatcaaatcgaggaattagtcaaagaagttgagtgtgctaaccacagtgtgcatcagcttcaagatagtatgcagagaatggagcaaaccgcagttgcaagggaagcaactttactagcagaacatcaggaaaaagatgcgacatcaaaagcattagcagaggcacaagggaggattgaaggtttactgaaggaaatttattctgctaatagaaaaaatgatcaacttcaaagtactatagaaagacttgaacaagatgtcactgccaaagaggccttattgcttacagaaaaggaggcacacgacgcaacaaggaagactctgactgaagctcaggaagagagtggagaacttctgaagaaaattcatgataatgataaacatattcttcagcttcagtttactatacaaaggcttgaggaaactacagttgcaaatgagaatttgctgttgagggagagggagcagaatgacataacaacaaaagcgcacaatgaaagtcaagaaaaatatgaagaattactaagcaaatttgttgatgttgacaggaaaatcgaccttcttcaaggtaccatagaaaggcttggagaaaatacaacaaaggattctctgttgctatcagagagacatgaaaaggatgctattaagaaagcacttactgaggctcaagagaaaaatgaagagttactgatgaaagttgaagatgctaatgaaaaaatagaacaacttcaaactacgatagatatgcttgaagataatgtagctgcaaaagatgtttctttagaagctgcaatgaaggaaaatgatgcaattaggagatctcttactgaagctcaagagagaaatgatgaattactcaagaaaattagtgacagtgaatacaggatccatttacttcaagacacgatacaaaagcttcaagtagatgcaatatcaagattgtcgtcttttgtaatggaaaaacaagaaagtgatgcttcaaagagagctgttactgaagctcatgaaagaaatgaagatttactgaagagaaatgaggacctcctcaagaggaatgatgatctgattaagaaaattgaagactctagtaaaattgtcactcaacttcaggaagctctacaaaggcttgaaggaaaagcatgcaacttagaggctgagaaccaagttcttcgtcaacaagcaacttcaactccaccaacttcagctaaatctccagcttcacgtgcaaagatctcaaggatccatagaagtccagagaatggccataatttgaatggtgacattaggcaaactgaaatgaagccctccactggcacatcagaagcaataacctcagcagctaatgttcctgacttgggcgaccaaaaagattttgaacatggagaaaaactgcaaagaataccaaaacagaaatatcagccttctcatcaccagcagccccaggacgatcagcagtggctactcgcttgtattccacaacatcttggattttctgggagcaaaccagttgcagctctccttatataccaatgccttctccattggaaatcatttgaagccatgaagacaggtgtcttcgacagcattttgcatgctataaactcagccacagaggctcaaaatgacatgagaacattggcatattggttgtccaacttatctacattaacagttctccttcaacgatcattcaaaactactaggacggcaatctcaactccacaaaggagaagattttcatcggagaggatctttcatggaaatcaaacttcaaatgctgggcttgcttatctcagtggtcaatcagttgttgggtctgctggactgccccaagttgaagcaaaatatcctgctttgctattcaaacagcagctcgtggatctaattgaaaaggtttatggcatgataagtgacagcgtgaagaaggagctaaaccctttgcttgaattgtgtatacaggatccacgaacttctcactcgagtatcgcaaaaggcaatcttaatggcatgggtcaacagaaccaactcacatattggctgggcatagtgaaaattctcactagctacttggatgtactgagggtaaatcacgttccatcaattctggtgcataaactcttcactcagatattctcattgattgatgttcaactatttaaccggttacttttgcggcgtgagtgctgttcttttagtaacggggaatatgtcagagctggactaactgaactaaaacattggtccgacaatgctacaagagagtttgcaggttcagcgtgggaggcattgaggcatattagacaagctgtcgatttcctggtgatttctcttaaaccaatgaggacattaagagagatacacactgatgtgtgccctgccctcagcatacaacagctagagcgaatagttagtatgtactgggatgatgtgaatggaacaaacactatttcagcagagtttacatcaagcttgaaatctgcggtgcgtgatgaatcgaatatggccacaagtttttctatattgctagatgatgattccagtatacctttttcacttgatgatattacaaagacactgccagtcattgaggtggctgatgacgactttgtgccttttgtccatgaaaacccaagctttgcgtttttattgcaaagaggggagtagtccatttttcctcaccatggtgacttcacccacctgtggataagtcaggattcctgcctaggatgtacagtacgcgtgattctttttgtaccaggtagcaaggcattaaagattagatgctaggtgagcttataggattctggttttattgatttgtgtgttgattgtccatttgtattcaggttttccttgccattttttttctgtttgtagttatttttttgggcttgtatactaggggctaagggcagaaggccctgtcctgtaagcaaagtagcacaaggttttgctgtaggtgggaaagctgtacatgtgttgtaggagggggagtagcggttatcctgctggtcagggctaagaacgacagttgttgagaaggcaacggttatgccgtttttcctggatgagcagaatatcttgtcctggactgctggacagcagagcagtgcccacggaggtctctgcgcgctcgatcgcgacgatgcggccactatggtagtagatgcactcattacctgttatactagtaatttgctcgcgcctcgcgcaagtcgttaaccgatgagtttatacaattaaaagagtgttgctttagccatataaatacagaagtagtaatatatgtggatacataaacatagaagtgacaaaattatataaacatacaattgtttgcgttggtagataagttcagtagcatcgtgagcagcctagatgtcaaaattttgaagacaacaaaatactggtcttgaaggccacaaaatgcagagcaacattacaatgcacggatccttttcatgatcgtgctcactttttatgaaattcattgcttgttgtattgaatgtatatgtatacattaaggtacaattattagaattgtctcaatatgtaacgaagtaacatgaatagatagctttgcttagcacagaatgtcatgtgaatgtagcaaaaaataagtcagttttataattattatcgatttttattgtgctatcgtttgtcatgtaatatactttaagtatgatttagatttttttcgcaaaaaaaatgaataagac

SEQ ID NO: 32176 - DNA, 3848 bp, Zea Mays
cagaagtgaagaattcgaaaaaagcacttaccagacttgaagacgatgctactacaagagaagctttaatggaaactgaaaggaaagaaactgaaatgacaaaaaagacactgactgaagctctggatcaaatcgaggaattagtcaaagaagttgagtgtgctaaccacagtgtgcatcagcttcaagatagtatgcagagaatggagcaaaccgcagttgcaagggaagcaactttactagcagaacatcaggaaaaagatgcgacatcaaaagcattagcagaggcacaagggaggattgaaggtttactgaaggaaatttattctgctaatagaaaaaatgatcaacttcaaagtactatagaaagacttgaacaagatgtcactgccaaagaggccttattgcttacagaaaaggaggcacacgacgcaacaaggaagactctgactgaagctcaggaagagagtggagaacttctgaagaaaattcatgataatgataaacatattcttcagcttcagtttactatacaaaggcttgaggaaactacagttgcaaatgagaatttgctgttgagggagagggagcagaatgacataacaacaaaagcgcacaatgaaagtcaagaaaaatatgaagaattactaagcaaatttgttgatgttgacaggaaaatcgaccttcttcaaggtaccatagaaaggcttggagaaaatacaacaaaggattctctgttgctatcagagagacatgaaaaggatgctattaagaaagcacttactgaggctcaagagaaaaatgaagagttactgatgaaagttgaagatgctaatgaaaaaatagaacaacttcaaactacgatagatatgcttgaagataatgtagctgcaaaagatgtttctttagaagctgcaatgaaggaaaatgatgcaattaggagatctcttactgaagctcaagagagaaatgatgaattactcaagaaaattagtgacagtgaatacaggatccatttacttcaagacacgatacaaaagcttcaagtagatgcaatatcaagattgtcgtcttttgtaatggaaaaacaagaaagtgatgcttcaaagagagctgttactgaagctcatgaaagaaatgaagatttactgaagagaaatgaggacctcctcaagaggaatgatgatctgattaagaaaattgaagactctagtaaaattgtcactcaacttcaggaagctctacaaaggcttgaaggaaaagcatgcaacttagaggctgagaaccaagttcttcgtcaacaagcaacttcaactccaccaacttcagctaaatctccagcttcacgtgcaaagatctcaaggatccatagaagtccagagaatggccataatttgaatggtgacattaggcaaactgaaatgaagccctccactggcacatcagaagcaataacctcagcagctaatgttcctgacttgggcgaccaaaaagattttgaacatggagaaaaactgcaaagaataccaaaacagaaatatcagccttctcatcaccagcagccccaggacgatcagcagtggctactcgcttgtattccacaacatcttggattttctgggagcaaaccagttgcagctctccttatataccaatgccttctccattggaaatcatttgaagccatgaagacaggtgtcttcgacagcattttgcatgctataaactcagccacagaggctcaaaatgacatgagaacattggcatattggttgtccaacttatctacattaacagttctccttcaacgatcattcaaaactactaggacggcaatctcaactccacaaaggagaagattttcatcggagaggatctttcatggaaatcaaacttcaaatgctgggcttgcttatctcagtggtcaatcagttgttgggtctgctggactgccccaagttgaagcaaaatatcctgctttgctattcaaacagcagctcgtggatctaattgaaaaggtttatggcatgataagtgacagcgtgaagaaggagctaaaccctttgcttgaattgtgtatacaggatccacgaacttctcactcgagtatcgcaaaaggcaatcttaatggcatgggtcaacagaaccaactcacatattggctgggcatagtgaaaattctcactagctacttggatgtactgagggtaaatcacgttccatcaattctggtgcataaactcttcactcagatattctcattgattgatgttcaactatttaaccggttacttttgcggcgtgagtgctgttcttttagtaacggggaatatgtcagagctggactaactgaactaaaacattggtccgacaatgctacaagagagtttgcaggttcagcgtgggaggcattgaggcatattagacaagctgtcgatttcctggtgatttctcttaaaccaatgaggacattaagagagatacacactgatgtgtgccctgccctcagcatacaacagctagagcgaatagttagtatgtactgggatgatgtgaatggaacaaacactatttcagcagagtttacatcaagcttgaaatctgcggtgcgtgatgaatcgaatatggccacaagtttttctatattgctagatgatgattccagtatacctttttcacttgatgatattacaaagacactgccagtcattgaggtggctgatgacgactttgtgccttttgtccatgaaaacccaagctttgcgtttttattgcaaagaggggagtagtccatttttcctcaccatggtgacttcacccacctgtggataagtcaggattcctgcctaggatgtacagtacgcgtgattctttttgtaccaggtagcaaggcattaaagattagatgctaggtgagcttataggattctggttttattgatttgtgtgttgattgtccatttgtattcaggttttccttgccattttttttctgtttgtagttatttttttgggcttgtatactaggggctaagggcagaaggccctgtcctgtaagcaaagtagcacaaggttttgctgtaggtgggaaagctgtacatgtgttgtaggagggggagtagcggttatcctgctggtcagggctaagaacgacagttgttgagaaggcaacggttatgccgtttttcctggatgagcagaatatcttgtcctggactgctggacagcagagcagtgcccacggaggtctctgcgcgctcgatcgcgacgatgcggccactatggtagtagatgcactcattacctgttatactagtaatttgctcgcgcctcgcgcaagtcgttaaccgatgagtttatacaattaaaagagtgttgctttagccatataaatacagaagtagtaatatatgtggatacataaacatagaagtgacaaaattatataaacatacaattgtttgcgttggtagataagttcagtagcatcgtgagcagcctagatgtcaaaattttgaagacaacaaaatactggtcttgaaggccacaaaatgcagagcaacattacaatgcacggatccttttcatgatcgtgctcactttttatgaaattcattgcttgttgtattgaatgtatatgtatacattaaggtacaattattagaattgtctcaatatgtaacgaagtaacatgaatagatagctttgcttagcacagaatgtcatgtgaatgtagcaaaaaataagtcagttttataattattatcgatttttattgtgctatcgtttgtcatgtaatatactttaagtatgatttagatttttttcgcaaaaaaaatgaataagac

SEQ ID NO: 32177 - DNA, 2727 bp, Zea Mays
atggcgcccacactagcggctggaaggttagaagagggtgcaacaacgacagatgctctttacttagcagaaagaaaagggcatgatcaaacgaagaaatcactttctgaagctcaagaaacaaacaaggagttactaaaaaaaattgagaaagctgagaaaaacatagatcagcttctggagaatgtggaaagacttgaaaaagatgcaattacaagagagtctttactgcttacaacaaagcaaagctatggtgacaccgcaaaattgctgcttgaatctcaagagaaaaaccaagagttagtgcacaaagtagaggactcagatagcaaaattgttctgcttgaagattcagtaaaaaggtttaaccacttttcttacagactcgaagaaagtactgcagataaagattctttattggctatagaaagacatgaaaacagtgaaaccaagaaagaattagttggttctcagaaaaagattgcggaattgctaactgaagtgcaagatactcgtgcaaatgttgcagaacttgaggacttgattaggagacttgaacaagatgtcactgccaaagaggccttattgcttacagaaaaggaggcacacgacgcaacaaggaagactctgactgaagctcaggaagagagtggagaacttctgaagaaaattcatgataatgataaacatattcttcagcttcagtttactatacaaaggcttgaggaaactacagttgcaaatgagaatttgctgttgagggagagggagcagaatgacataacaacaaaagcgcacaatgaaagtcaagaaaaatatgaagaattactaagcaaatttgttgatgttgacaggaaaatcgaccttcttcaaggtaccatagaaaggcttggagaaaatacaacaaaggattctctgttgctatcagagagacatgaaaaggatgctattaagaaagcacttactgaggctcaagagaaaaatgaagagttactgatgaaagttgaagatgctaatgaaaaaatagaacaacttcaaactacgatagatatgcttgaagataatgtagctgcaaaagatgtttctttagaagctgcaatgaaggaaaatgatgcaattaggagatctcttactgaagctcaagagagaaatgatgaattactcaagaaaattagtgacagtgaatacaggatccatttacttcaagacacgatacaaaagcttcaagtagatgcaatatcaagattgtcgtcttttgtaatggaaaaacaagaaagtgatgcttcaaagagagctgttactgaagctcatgaaagaaatgaagatttactgaagagaaatgaggacctcctcaagaggaatgatgatctgattaagaaaattgaagactctagtaaaattgtcactcaacttcaggaagctctacaaaggcttgaaggaaaagcatgcaacttagaggctgagaaccaagttcttcgtcaacaagcaacttcaactccaccaacttcagctaaatctccagcttcacgtgcaaagatctcaaggatccatagaagtccagagaatggccataatttgaatggtgacattaggcaaactgaaatgaagccctccactggcacatcagaagcaataacctcagcagctaatgttcctgacttgggcgaccaaaaagattttgaacatggagaaaaactgcaaagaataccaaaacagaaatatcagccttctcatcaccagcagccccaggacgatcagcagtggctactcgcttgtattccacaacatcttggattttctgggagcaaaccagttgcagctctccttatataccaatgccttctccattggaaatcatttgaagccatgaagacaggtgtcttcgacagcattttgcatgctataaactcagccacagaggctcaaaatgacatgagaacattggcatattggttgtccaacttatctacattaacagttctccttcaacgatcattcaaaactactaggacggcaatctcaactccacaaaggagaagattttcatcggagaggatctttcatggaaatcaaacttcaaatgctgggcttgcttatctcagtggtcaatcagttgttgggtctgctggactgccccaagttgaagcaaaatatcctgctttgctattcaaacagcagctcgtggatctaattgaaaaggtttatggcatgataagtgacagcgtgaagaaggagctaaaccctttgcttgaattgtgtatacaggatccacgaacttctcactcgagtatcgcaaaaggcaatcttaatggcatgggtcaacagaaccaactcacatattggctgggcatagtgaaaattctcactagctacttggatgtactgagggtaaatcacgttccatcaattctggtgcataaactcttcactcagatattctcattgattgatgttcaactatttaaccggttacttttgcggcgtgagtgctgttcttttagtaacggggaatatgtcagagctggactaactgaactaaaacattggtccgacaatgctacaagagagtttgcaggttcagcgtgggaggcattgaggcatattagacaagctgtcgatttcctgcagcatgatttggccagcctagacaacccattcacagaagaggaattatgggcagcagttaaagacttacctccttgacaaagcacccggcccggatggttt

SEQ ID NO: 32178 - DNA, 4176 bp, Zea Mays
atggcgcccacactagcggctggaaggttagaagagggtgcaacaacgacagatgctctttacttagcagaaagaaaagggcatgatcaaacgaagaaatcactttctgaagctcaagaaacaaacaaggagttactaaaaaaaattgagaaagctgagaaaaacatagatcagcttctggagaatgtggaaagacttgaaaaagatgcaattacaagagagtctttactgcttacaacaaagcaaagctatggtgacaccgcaaaattgctgcttgaatctcaagagaaaaaccaagagttagtgcacaaagtagaggactcagatagcaaaattgttctgcttgaagattcagtaaaaagactcgaagaaagtactgcagataaagattctttattggctatagaaagacatgaaaacagtgaaaccaagaaagaattagttggttctcagaaaaagattgcggaattgctaactgaagtgcaagatactcgtgcaaatgttgcagaacttgaggacttgattaggagactcgaaggaaaattggcaataactgaagctttattgctaactgaaaaggaacagaatgcttccaccttaaaattacttgcagaagcacaattgagaatcgaagaattaataaaaaaacttgaaggttcagatagaaaatctgatagccttcaggatacaataacaagacttgaacaagatgtcactgccaaagaggccttattgcttacagaaaaggaggcacacgacgcaacaaggaagactctgactgaagctcaggaagagagtggagaacttctgaagaaaattcatgataatgataaacatattcttcagcttcagtttactatacaaaggcttgaggaaactacagttgcaaatgagaatttgctgttgagggagagggagcagaatgacataacaacaaaagcgcacaatgaaagtcaagaaaaatatgaagaattactaagcaaatttgttgatgttgacaggaaaatcgaccttcttcaaggtaccatagaaaggcttggagaaaatacaacaaaggattctctgttgctatcagagagacatgaaaaggatgctattaagaaagcacttactgaggctcaagagaaaaatgaagagttactgatgaaagttgaagatgctaatgaaaaaatagaacaacttcaaactacgatagatatgcttgaagataatgtagctgcaaaagatgtttctttagaagctgcaatgaaggaaaatgatgcaattaggagatctcttactgaagctcaagagagaaatgatgaattactcaagaaaattagtgacagtgaatacaggatccatttacttcaagacacgatacaaaagcttcaagtagatgcaatatcaagattgtcgtcttttgtaatggaaaaacaagaaagtgatgcttcaaagagagctgttactgaagctcatgaaagaaatgaagatttactgaagagaaatgaggacctcctcaagaggaatgatgatctgattaagaaaattgaagactctagtaaaattgtcactcaacttcaggaagctctacaaaggcttgaaggaaaagcatgcaacttagaggctgagaaccaagttcttcgtcaacaagcaacttcaactccaccaacttcagctaaatctccagcttcacgtgcaaagatctcaaggatccatagaagtccagagaatggccataatttgaatggtgacattaggcaaactgaaatgaagccctccactggcacatcagaagcaataacctcagcagctaatgttcctgacttgggcgaccaaaaagattttgaacatggagaaaaactgcaaagaataccaaaacagaaatatcagccttctcatcaccagcagccccaggacgatcagcagtggctactcgcttgtattccacaacatcttggattttctgggagcaaaccagttgcagctctccttatataccaatgccttctccattggaaatcatttgaagccatgaagacaggtgtcttcgacagcattttgcatgctataaactcagccacagaggctcaaaatgacatgagaacattggcatattggttgtccaacttatctacattaacagttctccttcaacgatcattcaaaactactaggacggcaatctcaactccacaaaggagaagattttcatcggagaggatctttcatggaaatcaaacttcaaatgctgggcttgcttatctcagtggtcaatcagttgttgggtctgctggactgccccaagttgaagcaaaatatcctgctttgctattcaaacagcagctcgtggatctaattgaaaaggtttatggcatgataagtgacagcgtgaagaaggagctaaaccctttgcttgaattgtgtatacaggatccacgaacttctcactcgagtatcgcaaaaggcaatcttaatggcatgggtcaacagaaccaactcacatattggctgggcatagtgaaaattctcactagctacttggatgtactgagggtaaatcacgttccatcaattctggtgcataaactcttcactcagatattctcattgattgatgttcaactatttaaccggttacttttgcggcgtgagtgctgttcttttagtaacggggaatatgtcagagctggactaactgaactaaaacattggtccgacaatgctacaagagagtttgcaggttcagcgtgggaggcattgaggcatattagacaagctgtcgatttcctggtgatttctcttaaaccaatgaggacattaagagagatacacactgatgtgtgccctgccctcagcatacaacagctagagcgaatagttagtatgtactgggatgatgtgaatggaacaaacactatttcagcagagtttacatcaagcttgaaatctgcggtgcgtgatgaatcgaatatggccacaagtttttctatattgctagatgatgattccagtatacctttttcacttgatgatattacaaagacactgccagtcattgaggtggctgatgacgactttgtgccttttgtccatgaaaacccaagctttgcgtttttattgcaaagaggggagtagtccatttttcctcaccatggtgacttcacccacctgtggataagtcaggattcctgcctaggatgtacagtacgcgtgattctttttgtaccaggtagcaaggcattaaagattagatgctaggtgagcttataggattctggttttattgatttgtgtgttgattgtccatttgtattcaggttttccttgccattttttttctgtttgtagttatttttttgggcttgtatactaggggctaagggcagaaggccctgtcctgtaagcaaagtagcacaaggttttgctgtaggtgggaaagctgtacatgtgttgtaggagggggagtagcggttatcctgctggtcagggctaagaacgacagttgttgagaaggcaacggttatgccgtttttcctggatgagcagaatatcttgtcctggactgctggacagcagagcagtgcccacggaggtctctgcgcgctcgatcgcgacgatgcggccactatggtagtagatgcactcattacctgttatactagtaatttgctcgcgcctcgcgcaagtcgttaaccgatgagtttatacaattaaaagagtgttgctttagccatataaatacagaagtagtaatatatgtggatacataaacatagaagtgacaaaattatataaacatacaattgtttgcgttggtagataagttcagtagcatcgtgagcagcctagatgtcaaaattttgaagacaacaaaatactggtcttgaaggccacaaaatgcagagcaacattacaatgcacggatccttttcatgatcgtgctcactttttatgaaattcattgcttgttgtattgaatgtatatgtatacattaaggtacaattattagaattgtctcaatatgtaacgaagtaacatgaatagatagctttgcttagcacagaatgtcatgtgaatgtagcaaaaaataagtcagttttataattattatcgatttttattgtgctatcgtttgtcatgtaatatactttaagtatgatttagatttttttcgcaaaaaaaatgaataagac

SEQ ID NO: 32179 - DNA, 1087 bp, Zea Mays
ccatcttcactacgcgatgcttccaggccccttcgggctccggccgccagtgctatcttcgttgcgtgatggagctccaaggctccacccccctccagacgcttagatggatcaggtgccggttgcattcattgaagatttggccctctccaccaccgtgtcgctaccccatacccgtcgtccctgcatatctgaatgacgcaccttcaatccactgctgcccaaggagcgaatgggaaggaccggtacgagcgttctgtccggtagctaggtagcaagaagcaccaacccttcatgctcccaagaaggacacaactgctgagattgctaagaaacaagagcaagaaaaacaaaggtaggaaaaagcttccgaagttggtcgatataggctttgtagccacagtggaagtcttagtcattctctgccaaggccttttgggcagatatcggatcacaaggaactggtacaaggcctacccagagcacaaggcatgccccatgatgttcctccacatgatgttgctgatgaagttccctctccttccaacaggagtcctcttcatgagcacatcgtttggggttctgtggtcagtgcaagcgctccctgaattgacaggcacaagagcaagcgatgatgagttacggaagaagatatataacaagttgaagacctattccatcgttactgtaacaatggtcagatttagttctccattagtatcaatacatatgttaaggtacacatgttctgatgtttgtgacatagttggaatgacatgttcatgagtatgcgacagcagctgatgaaatgcaacacaactagcaatgggcttagcgaagaggatacatagttttatgcgcgacaaattgttttcggtttcgagagtcgagtctattttagattcagattggaatcagtcaactacagatgaatgcactagcatgaggtaaaattttacctatgaggcaagctgaagagaattcgatcctcttaacggtgtttctaccacttctcattttagaaagctaaatatgaatttttgtctaattacacttattttcttacatatgtactacacgaagaaac

SEQ ID NO: 32180 - DNA, 3065 bp, Zea Mays
cgcgaagggcaagcgacggcggcggcacggacacaagattctgtcaagcgtcgatcccctctggtggccacgtctcaccagtacaagggtcaagtcatgcatgaagtagctcgagtctttagagaaaaaatgtcttttctatttatattatataagtttcattctaattaatgtattgaagacattttctaaattatttttatgtacttgttctgtcaaagagaggtgcatcattatatggatccatgatctcgtcatggtcatcacactagtgatgtagtcttttgcaacttattagtgtcaacagacacgagattattatgcttgttgtaataaggttgtctatatcgtaacaaaacttgcatgtctctatggagctgaagtgctatgtattgacagcgtgactcgtacttgacaatactctggattaaccgaacaacaatttgagccagggattacagctgaaagggattatacccccaaggggttcaagtgacaaagagaggattaactcaatccctctctggattcaatccctctctggaatgaaaatatgttaaccgaacatgccctaggcaggggcggagccagcccttattttggggtcagctgaccccggtaattttttgaatatctaatagaaaaacggtgttaataacaaaagttctatagtaaagatccagtagataatactgatgaccccgataaattatttgctagcttcgctactggccctaggtgagtttgcggagcggtccagtagcgtagctaatccacttggaagcactggtgctttgaaagaaagcaacagttcgcagatggtgaccgagagtccgagggacgacaacgacaagacagacgctcgctgttcgtgtgcgctgcctgcactgcacctctctctcattcaccgagagtcgtgtagctaccggggtgctcgcactgctcatcgccttgttatggcatgttcggttacaccaatctagaagaggattgaaaggaattaaatcactaatttaaaaggggattgaaaaagattaaatcttcttctagtcaaaaatgactagaaagtatttaaacacctttaattctcttccggattggtgtaaccgaagcccttagggcctgttcggttacatcagaacgagactaggaactattctagatgatcaattactttatagattaaactatcattccaagtggaattgttccggatgttgaatccgagataacctaacagacccttaaacgactcgtagctctgccggtttctgtaacaaacgcaggagtcgtgggagacactttgcattgtgtcgggtgtgcgacaccgacacgcgcccggcaggcaccgagccgctgtgtaacgacgagcgagaatggtggccacgaagccgcgggtcgccgtagtcggcgcaggcgtggccgggctcacagcggcgcaccggctctgcgccgcaggcggcgagaggttcgaggtgacggtcgtagaggccggcgcccgcgcgggcgggcgggtgctcacgtccgagttcgccggccaccgcgtcgagatgggcgccacgtgggtgcagggggtcgatgggagccccgtgtacgcgctcgcgcgcgacgccggcgcgctcgcctgcggcaaggaccttcccccgtacgagcgcatggacgggttccccggccgcgtgctcacggtcgccgagggcggcgaggaggtcgacgccgaccgggtggccagtccgatcgaggagctgtacaggggcatgatggaggccgcgcgcgccggcgaggccggcggcggaggtggcgtcgaggagtacctgagtcgcggcctccgagcgttccaggcggcgcgaccgggcggcggcaaggagctggaggaggtcgaggacgcgctgctcgccatgcacatcaaccgggagagggcggacacctccgccgacgacctcggcgacctcgacctcgccaccgagggcgagtaccgcgacttccccggcgagcacgtcacgatccctgccgggtactcccgcgtcgtggaccacctcgtcgcggcgctcccgccggataccgttcgcctcggcctccgcctccgccgcctcgactggagcgagacccccctgcgacttcacttcgacgatggcgcgacggcgatctccgccgaccacgtcatcctcacggtgtcgctgggcgtcctcaaggcgagccttggtaaggacgcccacgccgcgggcggcatcgccttcgacccaccgctcccgcagttcaagcgcgaggccgtcgcgaggctcggcttcggcgtcgtgaacaagatgttcatggagctggaggccgtgccagcggcgagaccggaaggcgaccgaggtggcggcggcgagcacccgctagccgcgtctgcgccaccggagttcccgttcctacacatggctttccgggggcacgtgtcggagatcccgtggtggatgcgtggcaccgagtcgatctgccccgtccacgcgggctccagcgtggcgctggcgtggttcgccgggcgggaggccgagcacctcgagtctctccccgacgacgaggtcatccgcggggtacactccacgctggactccttcctcccggccccgtcacggtggagggtgaagcggatcaagaggagcgggtgggccacggaccagctcttcctgggatcctacacctacgtgcccgtcgggtccagcggcgaggacctcgaccggatggccgagccgctgccacgccggttggacgccgacgtcgacgttgcccgcgcgccgccgccccgcgttctgttcgccggcgaggcgacgcaccggacgcactactcgacgacgcacgccgcgtacctgagcggtgtgagggaggccgagcggttgctgcagcactacgcttaggttgcagacttgcagttgcaggtgcgttcgtaattgcaccgacgagtcgaggtgacgcgtcagcgtcatatcctaggggattttgccctgtgttcttgctgtgtgctagactgctaaggtatatggatttggattttgtgctattctattctggaagtacatgaaccgaccaaa

SEQ ID NO: 32181 - DNA, 2569 bp, Zea Mays
gggctgattgggtatagtgatagtgattatgctggggatgttgacagcaggaagagcactactggagtggttttcttcctgaacaatagtccggttacttggacttcgatgaaacaaaaggtggtggctcaatcaacctgtgaagcagaatatatagctgctgccaatgcggcttgtcaggcattatggctgagtagggtactggccgaagtacaaggagtatcactgaaagctccaatgctaaaagtgggcaacaaatcagctattgccctcattaagaacccagtgctacatggtcagagcaagcacatagaagtgaagtatcattttgttcgggagtgtgctgagaatgggcagatcaaagtggacttcatcaggagcgaagaacagctgcgggacttcctaacgaaaccgcttgggaagaccaaatttcaagagttgcgctctaaggtcggactggtggatgtagacagattgcaccacaaggcttaggaggagattgttaggaaagtaatccttgattggtgctagtttacttattctgttttaggaaatagctagtatggtagtggatcagtcttatatggacggatccaatcagcaagatcaggactgatagcagtccggattattcccttgtaatagctagtttgtttccttatgaaagtctataaatatatggccttagaggctaagaaaaggcagtcaataggacgccaccaaatctgctgtgttcctctccaacaaagagttcgcgtgcgtgtgagtccctgggaggtttttctcatacctgaagaacttacctgggaggtaggaactcgccggcaacctgcagggttgtctctccggcgcagattccaacacacaatacaatgcccaaacaaggcaaaagaacacagggaaaaaagaccagaaccctaatacaaacagggaaaaaaaactctatccttatctcatgctgtaataggatgacctcagctgtcacagcattaagcactagaaatagtcctgaccctacagaaggcagctgggaggccaaggctttcaagttgctttgcaccagccctactccaacgctccaccttttttttgggagggggggcagcaatctgaacgtcatgcaccttatcttatttgtgggtggaacactttatgtgattggttgcctggccagccacgtccaggcttagcacgtgcattgaccatacttgagccagtgattggttacctgcatgcgcggacgcagtcttggtgctttttcaacgttctgcttccatgagcggagacgtgagggaggcgtgtttctaccggcccaggctggcgcaaaccgggtggaggtggggccgacaaccaatcacgtgttttgtgatcgtgaaggaagtgagcctgactaccatattgttagcaagtcttttgaactttaactaaaggagaaggtgaccttctatatgttcataatgtgaataggatgaagggacagacgatttccctggagtggtgaggcgcagcaacatgtgtaccatactatggatggcaggagaagtgattggtgatgaagagagcagatatttgtacatcatctgggatttactattccattatctaaaaagatattgtactccctacgttcttttttatttgtcgcgttttagttcaaaaatgaactagcggtcgacaaatattcaagaacggagatatatatcatacagtcgtaatgtgtaaatgcagatgataaaatcacagcatgacctagttgagtccaataccagttaaatgtgaacttgaactctgttgtggggtgtgcgggtggccatggaatagcatgatgtatagaaggtggagcaacaggaaccttgtctctgttcacatcaattggtgtaaagatagctgggtttgaagggaaaggaagttcattgccagtttgaaatgatgggacatattggccgttgaatgaaggaaaaataagaaaccatcataccaaactgattctaaaggttaagatgcagatagatttcaataaactcctcaacaattggctctgggatctgcataaatggggacgtttttctctttggttattgataaaaatggtcaagagcactagatcctgctgcagtcagtactgattgtttagttggtgaaacagtttcacctgtggaaggcagcttattagaagctgtgtaaccatttcctggcagataaaaagaggaaaaatcatccgcttttcagtcacaacataaaaacttcatggttgtctggttgattgatgggttgtcggttgcatattaatcctaccatttataaacatgtacaacaaatagtagtccatgcgggtggttttactgttaatcctaataaagaaacacccatcactatataataaaagtggaaactgcaaaacattaaaagtatacagttttgtggttacggacctaagcgttcgagtattcgatcttgtacttctgatggatgaagtacatcatccaagtaattttgtggatgccaatttgttatggatagaagaaccttgtgagcaacagcgggtgcatgagattgcttcaatccttca

SEQ ID NO: 32182 - DNA, 2431 bp, Zea Mays
ctcagtaaagtgatgtttgatgcaggttcccctcgtcctgctccacataaaagtaacagtacttctgcaccaagccatggatatcctggtagtactgcacctgcacctgtacgtttgcctccgccaaaaggaaagggagaaggaaattttgctcatgctccaaaccatcccaatcaataccattcaacgtcatattctccaggatcagctctaccacctgcgcatccacctgacattcctgcatttagaaagcccaagattttggcaccagcgcctagtcaatcgctgctacctccaccaacaaattcatactgcacgacgccctgctcagatcctctgaccaatagtcctccaggaatgacatgcctctgtgtgttgccaataaaagttgagcttcgctttggtatagcattgtacacattctttacacttgtccccgaacttgcacaagatattgcatcgggagtgttcatgaatcaaagtcaagttcgtgttatgggggcaaatgctgcacctgatgaccctgaaaagacaatagtctttattgatcttgtgccactgggaccaaaatttgacaatgcgacggcattttcagtatttgaaaggttttgtaataagcaggtcatcataaatcataatcattttggaaagtatgacgtgttgtatgttctctaccaaggccttcctccgtcaccaccggcagcaagcatgaacaatggtcttagcaatgtaaatggtccaagtttgcatccgcttgctgctgatgtgggaaattatagagaaagaaaaggcaggtcctgtttctgcaatggttgggaacaggctagaaagcagacctatttcggcatcaccatccttcagctcaagtttggtggcatataaaggatctgccaaaacatttaacctggttgagatggagagagctacactaggatttgatgagtccagaattattggtgagggtggttttgggcgtgtctatgaaggtattcttgaggatggagaacgggttgctatcaaggttttaaagcgggacgatcaacaaggtacccgggagtttttggctgaggtcgagatgcttagccgattgcatcataggaacttggttaagctgataggtatatgcacagaggggcatagccgatgtttggtttatgagcttgttccgaatggcagtgtggaatctcacttgcatgataagggagctgctcagtttgattggaacgctaggctcaaaattgcacttggtgcagcacgcgcacttgcatatttgcatgaggattcaagtccacgtgtcatacaccgtgatttcaagtccagtaacatcttattggaacatgacttcaccccaaaggtgtcagactttggcttagcaaggacagctttgggtgagggaaacgagcatatttcaactcgtgtcatgggaacttttgggtatcttgctcctgaatatgcaatgactggccatcttctagtaaagagtgatgtttacagctacggtgttgttcttcttgagcttcttacagggaggaaaccggtagatatgttaagacctcctggacaggaaaacttagtggcatgggctggttctcttctgacaagcagggatggtctggaatcaatcatagatcattcacttgggcgcagcattccatttgacagcatcgcaaaagtagcagccattgcttctatgtgtgttcagcctgaggtggaccagcgcccattcatgggtgaagtagttcaagctctaaagctggtatgcaatgaaggcggcgagttcaatgagtcaacctttagccaagatttgcatatccaagatgtcgaggttatgagtagagcaagtacggatgtagacgttgacccaacgctatctgctgagctgttcacttcatcagcgcgttatgatgctatagatgcccctggttctttccgaagatactcaagttcaggtcctctaagagtagggagaactggactgaacaaagagaggggcctgtcaacaggcagctcaagtgaacacgttgggctacagaggtttaggattgatggagaatagtcagcctgcaagcagctcatgatgatgtgcgcatggaagaaatacacattggattattttcttccaagccagatttcatactcatcgtgaatagtatgtggaaaattgagaaaggcgtaaaaatcagtgtgccactgttcggtgctcccgtcgccttctttggaaagctcaaacaagacttcacacgaatttttgtacagttctagagatgatagatgcttttaggaaagaaggggtgtacacgagtttttcagctgtaattccccacgaaccgtattacgtttcgccgtagcatcagtgcaaatcaattaaagggcgtgcacgcagtcaccattttgagttcaatgaaaaaaaattcatcctgattgaccgcaa

SEQ ID NO: 32183 - DNA, 2427 bp, Zea Mays
ctcagtaaagtgatgtttgatgcaggttcccctcgtcctgctccacataaaagtaacagtacttctgcaccaagccatggatatcctggtagtactgcacctgcacctgtacgtttgcctccgccaaaaggaaagggagaaggaaattttgctcatgctccaaaccatcccaatcaataccattcaacgtcatattctccaggatcagctctaccacctgcgcatccacctgacattcctgcatttagaaagcccaagattttggcaccagcgcctagtcaatcgctgctacctccaccaacaaattcatactgcacgacgccctgctcagatcctctgaccaatagtcctccaggaatgacatgcctctgtgtgttgccaataaaagttgagcttcgctttggtatagcattgtacacattctttacacttgtccccgaacttgcacaagatattgcatcgggagtgttcatgaatcaaagtcaagttcgtgttatgggggcaaatgctgcacctgatgaccctgaaaagacaatagtctttattgatcttgtgccactgggaccaaaatttgacaatgcgacggcattttcagtatttgaaaggttttgtaataagcaggtcatcataaatcataatcattttggaaagtatgacgtgttgtatgttctctaccaaggccttcctccgtcaccaccggcagcaagcatgaacaatggtcttagcaatgtaaatggtccaagtttgcatccgcttgctgctgatgtgggaaattatagagaaagaaaaggtcctgtttctgcaatggttgggaacaggctagaaagcagacctatttcggcatcaccatccttcagctcaagtttggtggcatataaaggatctgccaaaacatttaacctggttgagatggagagagctacactaggatttgatgagtccagaattattggtgagggtggttttgggcgtgtctatgaaggtattcttgaggatggagaacgggttgctatcaaggttttaaagcgggacgatcaacaaggtacccgggagtttttggctgaggtcgagatgcttagccgattgcatcataggaacttggttaagctgataggtatatgcacagaggggcatagccgatgtttggtttatgagcttgttccgaatggcagtgtggaatctcacttgcatgataagggagctgctcagtttgattggaacgctaggctcaaaattgcacttggtgcagcacgcgcacttgcatatttgcatgaggattcaagtccacgtgtcatacaccgtgatttcaagtccagtaacatcttattggaacatgacttcaccccaaaggtgtcagactttggcttagcaaggacagctttgggtgagggaaacgagcatatttcaactcgtgtcatgggaacttttgggtatcttgctcctgaatatgcaatgactggccatcttctagtaaagagtgatgtttacagctacggtgttgttcttcttgagcttcttacagggaggaaaccggtagatatgttaagacctcctggacaggaaaacttagtggcatgggctggttctcttctgacaagcagggatggtctggaatcaatcatagatcattcacttgggcgcagcattccatttgacagcatcgcaaaagtagcagccattgcttctatgtgtgttcagcctgaggtggaccagcgcccattcatgggtgaagtagttcaagctctaaagctggtatgcaatgaaggcggcgagttcaatgagtcaacctttagccaagatttgcatatccaagatgtcgaggttatgagtagagcaagtacggatgtagacgttgacccaacgctatctgctgagctgttcacttcatcagcgcgttatgatgctatagatgcccctggttctttccgaagatactcaagttcaggtcctctaagagtagggagaactggactgaacaaagagaggggcctgtcaacaggcagctcaagtgaacacgttgggctacagaggtttaggattgatggagaatagtcagcctgcaagcagctcatgatgatgtgcgcatggaagaaatacacattggattattttcttccaagccagatttcatactcatcgtgaatagtatgtggaaaattgagaaaggcgtaaaaatcagtgtgccactgttcggtgctcccgtcgccttctttggaaagctcaaacaagacttcacacgaatttttgtacagttctagagatgatagatgcttttaggaaagaaggggtgtacacgagtttttcagctgtaattccccacgaaccgtattacgtttcgccgtagcatcagtgcaaatcaattaaagggcgtgcacgcagtcaccattttgagttcaatgaaaaaaaattcatcctgattgaccgcaa

SEQ ID NO: 32184 - DNA, 2322 bp, Zea Mays
ctcagtaaagtgatgtttgatgcaggttcccctcgtcctgctccacataaaagtaacagtacttctgcaccaagccatggatatcctggtagtactgcacctgcacctgtacgtttgcctccgccaaaaggaaagggagaaggaaattttgctcatgctccaaaccatcccaatcaataccattcaacgtcatattctccaggatcagctctaccacctgcgcatccacctgacattcctgcatttagaaagcccaagattttggcaccagcgcctagtcaatcgctgctacctccaccaacaaattcatactgcacgacgccctgctcagatcctctgaccaatagtcctccaggaatgacatgcctctgtgtgttgccaataaaagttgagcttcgctttggtatagcattgtacacattctttacacttgtccccgaacttgcacaagatattgcatcgggagtgttcatgaatcaaagtcaagttcgtgttatgggggcaaatgctgcacctgatgaccctgaaaagacaatagtctttattgatcttgtgccactgggaccaaaatttgacaatgcgacggcattttcagtatttgaaaggttttgtaataagcaggtcatcataaatcataatcattttggaaagtatgacgtgttgtatgttctctaccaaggtcctgtttctgcaatggttgggaacaggctagaaagcagacctatttcggcatcaccatccttcagctcaagtttggtggcatataaaggatctgccaaaacatttaacctggttgagatggagagagctacactaggatttgatgagtccagaattattggtgagggtggttttgggcgtgtctatgaaggtattcttgaggatggagaacgggttgctatcaaggttttaaagcgggacgatcaacaaggtacccgggagtttttggctgaggtcgagatgcttagccgattgcatcataggaacttggttaagctgataggtatatgcacagaggggcatagccgatgtttggtttatgagcttgttccgaatggcagtgtggaatctcacttgcatggatcagataagggagctgctcagtttgattggaacgctaggctcaaaattgcacttggtgcagcacgcgcacttgcatatttgcatgaggattcaagtccacgtgtcatacaccgtgatttcaagtccagtaacatcttattggaacatgacttcaccccaaaggtgtcagactttggcttagcaaggacagctttgggtgagggaaacgagcatatttcaactcgtgtcatgggaacttttgggtatcttgctcctgaatatgcaatgactggccatcttctagtaaagagtgatgtttacagctacggtgttgttcttcttgagcttcttacagggaggaaaccggtagatatgttaagacctcctggacaggaaaacttagtggcatgggctggttctcttctgacaagcagggatggtctggaatcaatcatagatcattcacttgggcgcagcattccatttgacagcatcgcaaaagtagcagccattgcttctatgtgtgttcagcctgaggtggaccagcgcccattcatgggtgaagtagttcaagctctaaagctggtatgcaatgaaggcggcgagttcaatgagtcaacctttagccaagatttgcatatccaagatgtcgaggttatgagtagagcaagtacggatgtagacgttgacccaacgctatctgctgagctgttcacttcatcagcgcgttatgatgctatagatgcccctggttctttccgaagatactcaagttcaggtcctctaagagtagggagaactggactgaacaaagagaggggcctgtcaacaggcagctcaagtgaacacgttgggctacagaggtttaggattgatggagaatagtcagcctgcaagcagctcatgatgatgtgcgcatggaagaaatacacattggattattttcttccaagccagatttcatactcatcgtgaatagtatgtggaaaattgagaaaggcgtaaaaatcagtgtgccactgttcggtgctcccgtcgccttctttggaaagctcaaacaagacttcacacgaatttttgtacagttctagagatgatagatgcttttaggaaagaaggggtgtacacgagtttttcagctgtaattccccacgaaccgtattacgtttcgccgtagcatcagtgcaaatcaattaaagggcgtgcacgcagtcaccattttgagttcaatgaaaaaaaattcatcctgattgaccgcaa

SEQ ID NO: 32185 - DNA, 2101 bp, Zea Mays
ctcagtaaagtgatgtttgatgcaggttcccctcgtcctgctccacataaaagtaacagtacttctgcaccaagccatggatatcctggtagtactgcacctgcacctgtacgtttgcctccgccaaaaggaaagggagaaggaaattttgctcatgctccaaaccatcccaatcaataccattcaacgtcatattctccaggatcagctctaccacctgcgcatccacctgacattcctgcatttagaaagcccaagattttggcaccagcgcctagtcaatcgctgctacctccaccaacaaattcatactgcacgacgccctgctcagatcctctgaccaatagtcctccaggaatgacatgcctctgtgtgttgccaataaaagttgagcttcgctttggtatagcattgtacacattctttacacttgtccccgaacttgcacaagatattgcatcgggagtgttcatgaatcaaagtcaagttcgtgttatgggggcaaatgctgcacctgatgaccctgaaaagacaatagtctttattgatcttgtgccactgggaccaaaatttgacaatgcgacggcattttcagtatttgaaaggttttgtaataagcaggtcatcataaatcataatcattttggaaagtatgacgtgttgtatgttctctaccaaggccttcctccgtcaccaccggcagcaagcatgaacaatggtcttagcaatgtaaatggtccaagtttgcatccgcttgctgctgatgtgggaaattatagagaaagaaaaggcaggtcctgtttctgcaatggttgggaacaggctagaaagcagacctatttcggcatcaccatccttcagctcaagtttggtggcatataaaggatctgccaaaacatttaacctggttgagatggagagagctacactaggatttgatgagtccagaattattggtgagggtggttttgggcgtgtctatgaaggtattcttgaggatggagaacgggttgctatcaaggttttaaagcgggacgatcaacaaggtacccgggagtttttggctgaggtcgagatgcttagccgattgcatcataggaacttggttaagctgataggtatatgcacagaggggcatagccgatgtttggtttatgagcttgttccgaatggcagtgtggaatctcacttgcatgggaggaaaccggtagatatgttaagacctcctggacaggaaaacttagtggcatgggctggttctcttctgacaagcagggatggtctggaatcaatcatagatcattcacttgggcgcagcattccatttgacagcatcgcaaaagtagcagccattgcttctatgtgtgttcagcctgaggtggaccagcgcccattcatgggtgaagtagttcaagctctaaagctggtatgcaatgaaggcggcgagttcaatgagtcaacctttagccaagatttgcatatccaagatgtcgaggttatgagtagagcaagtacggatgtagacgttgacccaacgctatctgctgagctgttcacttcatcagcgcgttatgatgctatagatgcccctggttctttccgaagatactcaagttcaggtcctctaagagtagggagaactggactgaacaaagagaggggcctgtcaacaggcagctcaagtgaacacgttgggctacagaggtttaggattgatggagaatagtcagcctgcaagcagctcatgatgatgtgcgcatggaagaaatacacattggattattttcttccaagccagatttcatactcatcgtgaatagtatgtggaaaattgagaaaggcgtaaaaatcagtgtgccactgttcggtgctcccgtcgccttctttggaaagctcaaacaagacttcacacgaatttttgtacagttctagagatgatagatgcttttaggaaagaaggggtgtacacgagtttttcagctgtaattccccacgaaccgtattacgtttcgccgtagcatcagtgcaaatcaattaaagggcgtgcacgcagtcaccattttgagttcaatgaaaaaaaattcatcctgattgaccgcaa

SEQ ID NO: 32186 - DNA, 1944 bp, Zea Mays
gtttttttgtcctttaaccgtacgagtttactgtataagattgtttccagaaaataaaaaaaatcaagcgcctgaaaatatatagcggctctctgaaaagaatgtgagtaaaagggaggcagacacattttcatgaataatgtaagaatctctagccgcgcatccgtgtccaatgcaataacatgcacgctacaaacatatagcttagctgtaaaggagtttcaagtactattccttactggcgcgtgactgacacccactcatatatatatgcttgcccttgccttcactagacattatatatacgtacgtaaacatatttacatgtaacccatgttgttactaccctgatcgatgagagtgagagaaacctactatatctatattaattatttcataaactctatacttaatcatatctgatactccgcgcgcgcttgatgaagagtcatccatgcatgtatatatgcatctaccgatggaagtaaatagggtgaataattcagggaatccaacagtgggactgcatgccggcgttcgccgagaagcaggtgtcgtcgagagacgaagcgctggcagccgacgccgccgccgtcgaccccaggatggcttccatgaagtccatcaccggagccagagcaggctcgggcatgaaactgccggcgcacttgggttcaaggaacaccgggaggccggcgccttccggttgcaccgccgccgtcacgacatcggcagctgcctggttgttgcactgcctcgcgccgccgccgccgtcctccggctccggcgggtagcaggcgtccgccgccgtgcggcactgcttgacgaactccccctcgacggcggcggcgtactggagagcggccgcgccgccggggaggaagagcgtctgggagccgaagtccgccgcccacgccgccgcggggtcgacgtgcgccatggaaggagaaggctgcgtcgtcgtcacgcccactgcttgcgccgccgctgctgacgcgctgtccgccccgttcagcggcgcgcatccggcggccgcgaggtcctgtgctccggcggctcctccatccagaatgttgtagtacaggtctgcagcgagcattgcattgcagcagaagaagccgagttagagtagatcgtaaaagaggaaacagtaatattagaagccaaaagatctgacaccacagttcacatatacagagtcctgctgggggagggacgtgtcattacctgggtggaggctgcccacggcctgggagatgagcttcttcttgatggtggagttccagaagttcttcacctcgttgtccgttctaccaggcagatgcttggcgatctgggcccacctgtgtgtgcagtggcacgcatttttagctagctgcattttccattcgcgtctctttcctttgtcccaaactcccaagcaagttattaaggcgacatatgtgggcggcagttgcatgtagagataaaggaacaactgcgtcatgcagagggaaattaagcagcagagtggcatgcatgtatgcatagctgatttgcgtgtagtaggggccggccggcggcggcggcggcgacggacgaccaaggattgattacctgttcccaagcaccctgtggagctcgacgatgagggcctcctcctgctgcgagaagcttcccctcttcaggtccggcctcaggtagttgatccacctcagcctgcagctcttgccgcaccgctgcagccctgcgtgaaagcaagcacacatggtatggtacgtaatcatgcattgaactgaactgaactgctcctttttttttcccgcgcgcgctgcttcggtgcatgaaattaaacaataaccacgacctcgcacacaaatgtacatgtctgtagtacctgcttgccttgggactgagctccagcaaccatggccgtgcgcggtgatgtacttgacgagcttctcg

SEQ ID NO: 32187 - DNA, 1903 bp, Zea Mays
atggcgcgggtgcgagaaacccagccatggcggcaccggccccaagcccaagccctggcggcggcgcgccatcaagccccggtcccaccggcgggcgtggtcctcctggtacgcggtctacaactggtccccgagccttgcgcccctgcgcatctcctcctcatggctggcctttttctgcggctaggaggccctagagacgctcggcctcggcgcggagcgtggcgccctcgctctcgttggtggcgacgacttgctcggcggcggcgacctcctcgcaggcctggacataactagccgtcgccttttttgatgtgacagtaacaatcagcaaacaaaccgtgaataacaatcctcactgaactcgcagcgttctctcctctaaagctccggctgggcggctctctgcaagacatgctaaatatacggcaccggcgacactcgccagccgccctgcgccccgttcgtgaagaatgtgtcagccattttgggtttctcgcagggctgcctgccgctgcgtagatgggacgagctcaatgtgttcttacagaaaaccaggccaaggatcgtttttgggctgaatgctctgaacggtcgggtcccgatgcctgacgattctttaggggggccatggaattacacgaacgcagcttctttcattcgctacaccgtgagcaagggatacgatgtacatggatgggagctcggaaatgagctcagtggcagcggagtcagggctcgaatcgacgcggatcagtacgcagcagacgtgatcgctctaaaacacatcgtcgatagcgcctaccagggcaagccatcgaagcctctcgtgcttgcgtcaggaggcttcttcgacgcggtctggttcacccaactcgtcagcaagacaaagccagaccagatggacgcgatcactcaccatatctacaatctaggccccggggttgacgaccatctggttcagaaaatccttgacccttcttaccttgacggcaaggcgagcacgttcagcaactttcagcaaccttcaggggatactcaagtccgcaggcacgtccgctgtcgcctgggttggcgaggctggaggcacgtatctggatcagctttagtacgacacaaagagctactgcagacagaccttggttggaggcaactatggcctgctcaacacaagtacatttgaaccaaaccctgactattatagtgctttgctgtggcaccgcctcatgggcaccaaggtcctctcgacgacattcaacagcacaaacaagatccgtgcctacgcacactgcgtgaaaaactcaggatcgctctgctcctgatcaacctggacggcatcagcacgaaccgcatctacgtgacgagccaaggcgcgcacgcccagagcgaaaggaagaaggggagcgggacctccgacgtccacatcatccctgtagggctcggcgaagcagcagccgcgctcacgagacaggagtaccatctgactcctaaggacgggaacttgcagagccagcagctgctgctgaacggcaacgtcctggcaaccgacgccgacggggagatcccggagctggagcccgtgcaggtggaggggacgcagcccataaccgtgggcccttactctaccgtgtttgctcacgtccccagcttctacgctcctacgtgcctgtagctagagttttcgtctggattttttttcagcctttctcggtgtgcatctcgtaggttaggtaagtctgtccgggtgaaaggcgaagcttgttcatctttgcccatagtccgtgaagtgtaagctgctaggctggaaggagtggtcagatatataatgtgtgagcaaaagatggaaggaagctggaaatgagataataaaagaaagggttttgagttttagtctcattttgtt

SEQ ID NO: 32188 - DNA, 1564 bp, Zea Mays
atggcgcgggtgcgagaaacccagccatggcggcaccggccccaagcccaagccctggcggcggcgcgccatcaagccccggtcccaccggcgggcgtggtcctcctgggctgcctgccgctgcgtagatgggacgagctcaatgtgttcttacagaaaaccaggccaaggatcgtttttgggctgaatgctctgaacggtcgggtcccgatgcctgacgattctttaggggggccatggaattacacgaacgcagcttctttcattcgctacaccgtgagcaagggatacgatgtacatggatgggagctcggaaatgagctcagtggcagcggagtcagggctcgaatcgacgcggatcagtacgcagcagacgtgatcgctctaaaacacatcgtcgatagcgcctaccagggcaagccatcgaagcctctcgtgcttgcgtcaggaggcttcttcgacgcggtctggttcacccaactcgtcagcaagacaaagccagaccagatggacgcgatcactcaccatatctacaatctaggccccggggttgacgaccatctggttcagaaaatccttgacccttcttaccttgacggcaaggcgagcacgttcagcaactttcagcaaccttcaggggatactcaagtccgcaggcacgtccgctgtcgcctgggttggcgaggctggaggcacgtacaacagttgccaccaccttgtcactgatgcgtttgtgttcagcttctggtatctggatcagctttagtacgacacaaagagctactgcagacagaccttggttggaggcaactatggcctgctcaacacaagtacatttgaaccaaaccctgactattatagtgctttgctgtggcaccgcctcatgggcaccaaggtcctctcgacgacattcaacagcacaaacaagatccgtgcctacgcacactgcgtgaaaaactcagaagggatcgctctgctcctgatcaacctggacggcatcagcacgaaccgcatctacgtgacgagccaaggcgcgcacgcccagagcgaaaggaagaaggggagcgggacctccgacgtccacatcatccctgtagggctcggcgaagcagcagccgcgctcacgagacaggagtaccatctgactcctaaggacgggaacttgcagagccagcagctgctgctgaacggcaacgtcctggcaaccgacgccgacggggagatcccggagctggagcccgtgcaggtggaggggacgcagcccataaccgtgggcccttactctaccgtgtttgctcacgtccccagcttctacgctcctacgtgcctgtagctagagttttcgtctggattttttttcagcctttctcggtgtgcatctcgtaggttaggtaagtctgtccgggtgaaaggcgaagcttgttcatctttgcccatagtccgtgaagtgtaagctgctaggctggaaggagtggtcagatatataatgtgtgagcaaaagatggaaggaagctggaaatgagataataaaagaaagggttttgagttttagtctcattttgtt

SEQ ID NO: 32189 - DNA, 1513 bp, Zea Mays
atggcgcgggtgcgagaaacccagccatggcggcaccggccccaagcccaagccctggcggcggcgcgccatcaagccccggtcccaccggcgggcgtggtcctcctgggctgcctgccgctgcgtagatgggacgagctcaatgtgttcttacagaaaaccaggccaaggatcgtttttgggctgaatgctctgaacggtcgggtcccgatgcctgacgattctttaggggggccatggaattacacgaacgcagcttctttcattcgctacaccgtgagcaagggatacgatgtacatggatgggagctcggaaatgagctcagtggcagcggagtcagggctcgaatcgacgcggatcagtacgcagcagacgtgatcgctctaaaacacatcgtcgatagcgcctaccagggcaagccatcgaagcctctcgtgcttgcgtcaggaggcttcttcgacgcggtctggttcacccaactcgtcagcaagacaaagccagaccagatggacgcgatcactcaccatatctacaatctaggccccggggttgacgaccatctggttcagaaaatccttgacccttcttaccttgacggcaaggcgagcacgttcagcaactttcagcaaccttcaggggatactcaagtccgcaggcacgtccgctgtcgcctgggttggcgaggctggaggcacgtatctggatcagctttagtacgacacaaagagctactgcagacagaccttggttggaggcaactatggcctgctcaacacaagtacatttgaaccaaaccctgactattatagtgctttgctgtggcaccgcctcatgggcaccaaggtcctctcgacgacattcaacagcacaaacaagatccgtgcctacgcacactgcgtgaaaaactcagaagggatcgctctgctcctgatcaacctggacggcatcagcacgaaccgcatctacgtgacgagccaaggcgcgcacgcccagagcgaaaggaagaaggggagcgggacctccgacgtccacatcatccctgtagggctcggcgaagcagcagccgcgctcacgagacaggagtaccatctgactcctaaggacgggaacttgcagagccagcagctgctgctgaacggcaacgtcctggcaaccgacgccgacggggagatcccggagctggagcccgtgcaggtggaggggacgcagcccataaccgtgggcccttactctaccgtgtttgctcacgtccccagcttctacgctcctacgtgcctgtagctagagttttcgtctggattttttttcagcctttctcggtgtgcatctcgtaggttaggtaagtctgtccgggtgaaaggcgaagcttgttcatctttgcccatagtccgtgaagtgtaagctgctaggctggaaggagtggtcagatatataatgtgtgagcaaaagatggaaggaagctggaaatgagataataaaagaaagggttttgagttttagtctcattttgtt

SEQ ID NO: 32190 - DNA, 1813 bp, Zea Mays
atggcgcgggtgcgagaaacccagccatggcggcaccggccccaagcccaagccctggcggcggcgcgccatcaagccccggtcccaccggcgggcgtggtcctcctgggctgcctgccgctgcgtagatgggacgagctcaatgtgttcttacagaaaaccaggccaaggatcgtttttgggctgaatgctctgaacggtcgggtcccgatgcctgacgattctttaggggggccatggaattacacgaacgcagcttctttcattcgctacaccgtgagcaagggatacgatgtacatggatgggagctcggtatgttgattctgagttatcttgtggattgtgttggttttgtcagaaaaaaagaacctcatgtcactcgatagcctttttacacccactttatttagagaagagcaatacgtatgttgaaaatgaaatattatgataagagtacatagaaaaggaatcggacaagtgtgtcaacatcacttcaggtaataatacagtggttatgcatagtgcagtgctttgtggccaaaacacacagagattgttgctgcaggaaatgagctcagtggcagcggagtcagggctcgaatcgacgcggatcagtacgcagcagacgtgatcgctctaaaacacatcgtcgatagcgcctaccagggcaagccatcgaagcctctcgtgcttgcgtcaggaggcttcttcgacgcggtctggttcacccaactcgtcagcaagacaaagccagaccagatggacgcgatcactcaccatatctacaatctaggccccggggttgacgaccatctggttcagaaaatccttgacccttcttaccttgacggcaaggcgagcacgttcagcaactttcagcaaccttcaggggatactcaagtccgcaggcacgtccgctgtcgcctgggttggcgaggctggaggcacgtacaacagttgccaccaccttgtcactgatgcgtttgtgttcagcttctggtatctggatcagctttagtacgacacaaagagctactgcagacagaccttggttggaggcaactatggcctgctcaacacaagtacatttgaaccaaaccctgactattatagtgctttgctgtggcaccgcctcatgggcaccaaggtcctctcgacgacattcaacagcacaaacaagatccgtgcctacgcacactgcgtgaaaaactcaggatcgctctgctcctgatcaacctggacggcatcagcacgaaccgcatctacgtgacgagccaaggcgcgcacgcccagagcgaaaggaagaaggggagcgggacctccgacgtccacatcatccctgtagggctcggcgaagcagcagccgcgctcacgagacaggagtaccatctgactcctaaggacgggaacttgcagagccagcagctgctgctgaacggcaacgtcctggcaaccgacgccgacggggagatcccggagctggagcccgtgcaggtggaggggacgcagcccataaccgtgggcccttactctaccgtgtttgctcacgtccccagcttctacgctcctacgtgcctgtagctagagttttcgtctggattttttttcagcctttctcggtgtgcatctcgtaggttaggtaagtctgtccgggtgaaaggcgaagcttgttcatctttgcccatagtccgtgaagtgtaagctgctaggctggaaggagtggtcagatatataatgtgtgagcaaaagatggaaggaagctggaaatgagataataaaagaaagggttttgagttttagtctcattttgtt

SEQ ID NO: 32191 - DNA, 1963 bp, Zea Mays
atggcgcgggtgcgagaaacccagccatggcggcaccggccccaagcccaagccctggcggcggcgcgccatcaagccccggtcccaccggcgggcgtggtcctcctgggctgcctgccgctgcgtagatgggacgagctcaatgtgttcttacagaaaaccaggtatggttgccgaacttcctttcctgcttgattctacaggccaaggatcgtttttgggctgaatgctctgaacggtcgggtcccgatgcctgacgattctttaggggggccatggaattacacgaacgcagcttctttcattcgctacaccgtgagcaagggatacgatgtacatggatgggagctcggtatgttgattctgagttatcttgtggattgtgttggttttgtcagaaaaaaagaacctcatgtcactcgatagcctttttacacccactttatttagagaagagcaatacgtatgttgaaaatgaaatattatgataagagtacatagaaaaggaatcggacaagtgtgtcaacatcacttcaggtaataatacagtggttatgcatagtgcagtgctttgtggccaaaacacacagagattgttgctgcaggaaatgagctcagtggcagcggagtcagggctcgaatcgacgcggatcagtacgcagcagacgtgatcgctctaaaacacatcgtcgatagcgcctaccagggcaagccatcgaagcctctcgtgcttgcgtcaggaggcttcttcgacgcggtctggttcacccaactcgtcagcaagacaaagccagaccagatggacgcgatcactcaccatatctacaatctaggccccggggttgacgaccatctggttcagaaaatccttgacccttcttaccttgacggcaaggcgagcacgttcagcaactttcagcaaccttcaggggatactcaagtccgcaggcacgtccgctgtcgcctgggttggcgaggctggaggcacgtatctggatcagctttagtacgacacaaagagctactgcagacagaccttggttggaggcaactatggcctgctcaacacaagtacatttgaaccaaaccctgactattataggtagattagactagacacgcacaagttctctctctctccaaattaagcaccatcataatctaccatctttctgtagtgctttgctgtggcaccgcctcatgggcaccaaggtcctctcgacgacattcaacagcacaaacaagatccgtgcctacgcacactgcgtgaaaaactcagtaaggaggagtggcacatgcgatggaaagctcctgttgactgtccgatgtctgaaccatgcacgctttaacatgtttttaggaagggatcgctctgctcctgatcaacctggacggcatcagcacgaaccgcatctacgtgacgagccaaggcgcgcacgcccagagcgaaaggaagaaggggagcgggacctccgacgtccacatcatccctgtagggctcggcgaagcagcagccgcgctcacgagacaggagtaccatctgactcctaaggacgggaacttgcagagccagcagctgctgctgaacggcaacgtcctggcaaccgacgccgacggggagatcccggagctggagcccgtgcaggtggaggggacgcagcccataaccgtgggcccttactctaccgtgtttgctcacgtccccagcttctacgctcctacgtgcctgtagctagagttttcgtctggattttttttcagcctttctcggtgtgcatctcgtaggttaggtaagtctgtccgggtgaaaggcgaagcttgttcatctttgcccatagtccgtgaagtgtaagctgctaggctggaaggagtggtcagatatataatgtgtgagcaaaagatggaaggaagctggaaatgagataataaaagaaagggttttgagttttagtctcattttgtt

SEQ ID NO: 32192 - DNA, 1706 bp, Zea Mays
gctcggcctcggcgcggagcgtggcgccctcgctctcgttggtggcgacgacttgctcggcggcggcgacctcctcgcagcgttctctcctctaaagctccggctgggcggctctctgcaagacatgctaaatatacggcaccggcgacactcgccagccgccctgcgccccgttcgtgaagaatgtgtcagccattttgggtttctcgcagggctgcctgccgctgcgtagatgggacgagctcaatgtgttcttacagaaaaccaggccaaggatcgtttttgggctgaatgctctgaacggtcgggtcccgatgcctgacgattctttaggggggccatggaattacacgaacgcagcttctttcattcgctacaccgtgagcaagggatacgatgtacatggatgggagctcgtgctttgtggccaaaacacacagagattgttgctgcaggaaatgagctcagtggcagcggagtcagggctcgaatcgacgcggatcagtacgcagcagacgtgatcgctctaaaacacatcgtcgatagcgcctaccagggcaagccatcgaagcctctcgtgcttgcgtcaggaggcttcttcgacgcggtctggttcacccaactcgtcagcaagacaaagccagaccagatggacgcgatcactcaccatatctacaatctaggccccggggttgacgaccatctggttcagaaaatccttgacccttcttaccttgacggcaaggcgagcacgttcagcaactttcagcaaccttcaggggatactcaagtccgcaggcacgtccgctgtcgcctgggttggcgaggctggaggcacgtacaacagttgccaccaccttgtcactgatgcgtttgtgttcagcttctggtatctggatcagctttagtacgacacaaagagctactgcagacagaccttggttggaggcaactatggcctgctcaacacaagtacatttgaaccaaaccctgactattatagtgctttgctgtggcaccgcctcatgggcaccaaggtcctctcgacgacattcaacagcacaaacaagatccgtgcctacgcacactgcgtgaaaaactcagaagggatcgctctgctcctgatcaacctggacggcatcagcacgaaccgcatctacgtgacgagccaaggcgcgcacgcccagagcgaaaggaagaaggggagcgggacctccgacgtccacatcatccctgtagggctcggcgaagcagcagccgcgctcacgagacaggagtaccatctgactcctaaggacgggaacttgcagagccagcagctgctgctgaacggcaacgtcctggcaaccgacgccgacggggagatcccggagctggagcccgtgcaggtggaggggacgcagcccataaccgtgggcccttactctaccgtgtttgctcacgtccccagcttctacgctcctacgtgcctgtagctagagttttcgtctggattttttttcagcctttctcggtgtgcatctcgtaggttaggtaagtctgtccgggtgaaaggcgaagcttgttcatctttgcccatagtccgtgaagtgtaagctgctaggctggaaggagtggtcagatatataatgtgtgagcaaaagatggaaggaagctggaaatgagataataaaagaaagggttttgagttttagtctcattttgtt

SEQ ID NO: 32193 - DNA, 1798 bp, Zea Mays
ctcgctctcgttggtggcgacgacttgctcggcggcggcgacctcctcgcagcgttctctcctctaaagctccggctgggcggctctctgcaagacatgctaaatatacggcaccggcgacactcgccagccgccctgcgccccgttcgtgaagaatgtgtcagccattttgggtttctcgcagggctgcctgccgctgcgtagatgggacgagctcaatgtgttcttacagaaaaccaggccaaggatcgtttttgggctgaatgctctgaacggtcgggtcccgatgcctgacgattctttaggggggccatggaattacacgaacgcagcttctttcattcgctacaccgtgagcaagggatacgatgtacatggatgggagctcggaaatgagctcagtggcagcggagtcagggctcgaatcgacgcggatcagtacgcagcagacgtgatcgctctaaaacacatcgtcgatagcgcctaccagggcaagccatcgaagcctctcgtgcttgcgtcaggaggcttcttcgacgcggtctggttcacccaactcgtcagcaagacaaagccagaccagatggacgcgatcactcaccatatctacaatctaggccccggggttgacgaccatctggttcagaaaatccttgacccttcttaccttgacggcaaggcgagcacgttcagcaactttcagcaaccttcaggggatactcaagtccgcaggcacgtccgctgtcgcctgggttggcgaggctggaggcacgtacaacagttgccaccaccttgtcactgatgcgtttgtgttcagcttctggtatctggatcagctttagtacgacacaaagagctactgcagacagaccttggttggaggcaactatggcctgctcaacacaagtacatttgaaccaaaccctgactattataggtagattagactagacacgcacaagttctctctctctccaaattaagcaccatcataatctaccatctttctgtagtgctttgctgtggcaccgcctcatgggcaccaaggtcctctcgacgacattcaacagcacaaacaagatccgtgcctacgcacactgcgtgaaaaactcagtaaggaggagtggcacatgcgatggaaagctcctgttgactgtccgatgtctgaaccatgcacgctttaacatgtttttaggaagggatcgctctgctcctgatcaacctggacggcatcagcacgaaccgcatctacgtgacgagccaaggcgcgcacgcccagagcgaaaggaagaaggggagcgggacctccgacgtccacatcatccctgtagggctcggcgaagcagcagccgcgctcacgagacaggagtaccatctgactcctaaggacgggaacttgcagagccagcagctgctgctgaacggcaacgtcctggcaaccgacgccgacggggagatcccggagctggagcccgtgcaggtggaggggacgcagcccataaccgtgggcccttactctaccgtgtttgctcacgtccccagcttctacgctcctacgtgcctgtagctagagttttcgtctggattttttttcagcctttctcggtgtgcatctcgtaggttaggtaagtctgtccgggtgaaaggcgaagcttgttcatctttgcccatagtccgtgaagtgtaagctgctaggctggaaggagtggtcagatatataatgtgtgagcaaaagatggaaggaagctggaaatgagataataaaagaaagggttttgagttttagtctcattttgtt

SEQ ID NO: 32194 - DNA, 1670 bp, Zea Mays
agccgtcgccttttttgatgtgacagtaacaatcagcaaacaaaccgtgaataacaatcctcactgaactcgcagcgttctctcctctaaagctccggctgggcggctctctgcaagacatgctaaatatacggcaccggcgacactcgccagccgccctgcgccccgttcgtgaagaatgtgtcagccattttgggtttctcgcagggctgcctgccgctgcgtagatgggacgagctcaatgtgttcttacagaaaaccaggccaaggatcgtttttgggctgaatgctctgaacggtcgggtcccgatgcctgacgattctttaggggggccatggaattacacgaacgcagcttctttcattcgctacaccgtgagcaagggatacgatgtacatggatgggagctcgtgctttgtggccaaaacacacagagattgttgctgcaggaaatgagctcagtggcagcggagtcagggctcgaatcgacgcggatcagtacgcagcagacgtgatcgctctaaaacacatcgtcgatagcgcctaccagggcaagccatcgaagcctctcgtgcttgcgtcaggaggcttcttcgacgcggtctggttcacccaactcgtcagcaagacaaagccagaccagatggacgcgatcactcaccatatctacaatctaggccccggggttgacgaccatctggttcagaaaatccttgacccttcttaccttgacggcaaggcgagcacgttcagcaactttcagcaaccttcaggggatactcaagtccgcaggcacgtccgctgtcgcctgggttggcgaggctggaggcacgtacaacagttgccaccaccttgtcactgatgcgtttgtgttcagcttctggtatctggatcagctttagtacgacacaaagagctactgcagacagaccttggttggaggcaactatggcctgctcaacacaatgctttgctgtggcaccgcctcatgggcaccaaggtcctctcgacgacattcaacagcacaaacaagatccgtgcctacgcacactgcgtgaaaaactcagaagggatcgctctgctcctgatcaacctggacggcatcagcacgaaccgcatctacgtgacgagccaaggcgcgcacgcccagagcgaaaggaagaaggggagcgggacctccgacgtccacatcatccctgtagggctcggcgaagcagcagccgcgctcacgagacaggagtaccatctgactcctaaggacgggaacttgcagagccagcagctgctgctgaacggcaacgtcctggcaaccgacgccgacggggagatcccggagctggagcccgtgcaggtggaggggacgcagcccataaccgtgggcccttactctaccgtgtttgctcacgtccccagcttctacgctcctacgtgcctgtagctagagttttcgtctggattttttttcagcctttctcggtgtgcatctcgtaggttaggtaagtctgtccgggtgaaaggcgaagcttgttcatctttgcccatagtccgtgaagtgtaagctgctaggctggaaggagtggtcagatatataatgtgtgagcaaaagatggaaggaagctggaaatgagataataaaagaaagggttttgagttttagtctcattttgtt

SEQ ID NO: 32195 - DNA, 1581 bp, Zea Mays
agccgtcgccttttttgatgtgacagtaacaatcagcaaacaaaccgtgaataacaatcctcactgaactcgcagcgttctctcctctaaagctccggctgggcggctctctgcaagacatgctaaatatacggcaccggcgacactcgccagccgccctgcgccccgttcgtgaagaatgtgtcagccattttgggtttctcgcagggctgcctgccgctgcgtagatgggacgagctcaatgtgttcttacagaaaaccaggccaaggatcgtttttgggctgaatgctctgaacggtcgggtcccgatgcctgacgattctttaggggggccatggaattacacgaacgcagcttctttcattcgctacaccgtgagcaagggatacgatgtacatggatgggagctcggaaatgagctcagtggcagcggagtcagggctcgaatcgacgcggatcagtacgcagcagacgtgatcgctctaaaacacatcgtcgatagcgcctaccagggcaagccatcgaagcctctcgtgcttgcgtcaggaggcttcttcgacgcggtctggttcacccaactcgtcagcaagacaaagccagaccagatggacgcgatcactcaccatatctacaatctaggccccggggttgacgaccatctggttcagaaaatccttgacccttcttaccttgacggcaaggcgagcacgttcagcaactttcagcaaccttcaggggatactcaagtccgcaggcacgtccgctgtcgcctgggttggcgaggctggaggcacgtatctggatcagctttagtacgacacaaagagctactgcagacagaccttggttggaggcaactatggcctgctcaacacaatgctttgctgtggcaccgcctcatgggcaccaaggtcctctcgacgacattcaacagcacaaacaagatccgtgcctacgcacactgcgtgaaaaactcagaagggatcgctctgctcctgatcaacctggacggcatcagcacgaaccgcatctacgtgacgagccaaggcgcgcacgcccagagcgaaaggaagaaggggagcgggacctccgacgtccacatcatccctgtagggctcggcgaagcagcagccgcgctcacgagacaggagtaccatctgactcctaaggacgggaacttgcagagccagcagctgctgctgaacggcaacgtcctggcaaccgacgccgacggggagatcccggagctggagcccgtgcaggtggaggggacgcagcccataaccgtgggcccttactctaccgtgtttgctcacgtccccagcttctacgctcctacgtgcctgtagctagagttttcgtctggattttttttcagcctttctcggtgtgcatctcgtaggttaggtaagtctgtccgggtgaaaggcgaagcttgttcatctttgcccatagtccgtgaagtgtaagctgctaggctggaaggagtggtcagatatataatgtgtgagcaaaagatggaaggaagctggaaatgagataataaaagaaagggttttgagttttagtctcattttgtt

SEQ ID NO: 32196 - DNA, 2320 bp, Zea Mays
gcggccatcaacaggaggaccatatcccacacacgcatatgatcggtgcgctgtgtgtgtcgtctccacccccgcttcttctcctcttcctcctcccgctgtccgctctcgcataagccaactcgaaccagcgaaggctagctagcgcttccgccaagcctgcaggccacgccggccggaaccgattgctctgattgattggtcaatcagtcatcaggccgcaatcgtatagctcatcagctgagcgaagacactgctgctagctgcagggcgggcgagagctcatctccaccggccggccgtcggcggctcagcgctttgcaggggcggcgcgcgcgctccggccgacggcgaagcgaagcgaattaagcggccgagaggcgggttgttgttgtcccatcgttagccatcaatcatcgtgtgattgatagggaagcgtacgtgcgtcctcccagaatccctgcgccagtcgtttcggcggttcagcttccgttcctgctggttccttccttgttgcatcggcggcggcggcgcgcggcggcgatggacgctacctttggctgctgggccggcgccggccaccatgttgacgagtacttgtcgcgccaggctgctggatgcggtcggctcgacatggtggacgaggccttcctcggggcgtgctttggccagctccagtgcgacggggcccttactactgccgccggtggcgtcgacgccggggcgtgccagctggtgagctcgaatgcgggtgccgtccaaggcggcgccggtatggacggtgacccgctcgcgttcttgagcgcggggacgggggacgtcttcgacgcgggccttctcgacgcggcgctcgcgttcaccagggagctcggcgtcggcgtcgtcggcgacggcggggccgcgtcgaacggcgccttgctctccagctacgatagcggcaccaccggcggcaacatatcctcaggggagtcaaacaactacagcggcggcggcggcggccatgacgccgaggtggtgtcaccgaccacggcgccgccgccgccgttgacgtttacccaccacgcgtcgtccaactcccaggcccagcaggcggcgcaccacgccaaaaggaaggtgaccgatgagtacccggcgacaacgacaacgacaaccgcagcaccgccaccggcgttcccgctgcccggcggcggcggcggcgcgaagcggcgtgcagcgacgagcatcagcttcggcggcggccacgtccccagctgcggcgcggccgcggccgggtacgagccggacatggaggcgatggcgcaggtgaaggagatgatctaccgcgcggcggccatgcggcccgtgaacctcgggcccgaggccgtcggcgcggcgggggcgggcgcggagaggccccggcggaagaacgtgcgcatctcgagcgacccgcagacggtggcggcgcggctgcggcgcgagcgcgtgagcgagcgcctgcgcgtgctgcagaagctggtcccggggggcagcaagatggacacggcgtccatgctcgacgaggcggccagctacctcaagttcctcaagtcccaggtccaggcgctggaaaccctaggcacgacgacggcgaccaacgccaacagcagcgcgagcgccaccaccagcaggagcagcgcggcgagcaggtcgccgcagtacaactattacggcggcggcggcaataataataatcctgccggctttcttggattcagtaacgttatttctccggctgggtatgtaaatccgggtggatcgtcgtcgaatactggcagcaacaaactgctgttttagtgactgttcttgtgtgattgttgtttgtcgtccggagcggacgatgcacatacacatgcatgcatgcatgttgctgtttcacatacggccggcgtacgtagcgatgatgatgtgatcgtctaccatgtgagtaccgagtgtacttactacatagtagtagtactctatagcacggtgtttaaggttgtagctacgcatatgtatgtgcaaattaagttgggattcggcgcactactgttgatcaagtgatcgagatgctgcagctgtactagtacaactgtagtagatagtgagtgagacacagactgcatgcagaagcagaacgagggaaaacggtgacgatgatgactgaactggcagagaaaaagaaaatgtagacagtatagtgtttcttgcaatacctaataattaatcgatgatccaaatgtagtgtagaaacagactgctagctgttaattagtattctctctattctttctttatttgtcgtgggcgaaaaatatttgag

SEQ ID NO: 32197 - DNA, 4511 bp, Zea Mays
cacgcgtatataacccaagaggagcgcgcggacgggacgacgcccgcgccaccacaattcacaagccacccacgccccccgtgcccgtgcgcgcggcctatatatcgccccgtccgtccccgatgggcgcgcccgcgccgaggccgccgccgccgcgcgcaaccgcccgcgccctgctcgccgtctccgtcgccgtcgccgcgtggctcggcgcctccgcgggctcggacagcggcgccggcgtgctgcggcgggcgcagcgcggggagttcgcgtcgtggatggccggcgtgcggcgggccatccacgagcggcccgagctggcgttccaggagcacgagacgagcgcgctggtccggagggagctcgacgcgatgggcgtcgcgtacaggtacccggtcgccgggacgggcgtcgtcgcggccgtcggcaccggggcgccgccgttcgtcgcgctgcgcgccgacatggacgcgctcccgctgcaggaggaagtggagtgggagcacaagagcaaggaggcccggaagatgcacgcctgcggccacgacgcgcacaccgcaatgctgctcggtgccgccaggatcctccatgagcgccgcaacgacctgcaggtatggtcgcaacctgaacctcgcccgccttcgttcttcctctcccttcaccgtcacacaactgcctggttgtcgtcgacgtcgagcaacccaacctgcgcgcacgtgtcaccctgtaatagttcgctgggatttcggtcgcctggcttattggggtcctagtcctttaaattttgtcacgttgttgcgctttcatgttcggcgcaactgtgtactactgtgcaggtttcaccagtggttagcgctggtacggtttgttgcaaagtcattttcatcagttagctagtggttagcgattggatttgctttgtttcctagctcactcctcagtagccgcggtgattgtttgggggccacggccttttttgatctcctcgtggtggcagactggcaggtgaggtaaagaagacccgtaggtttaagaataaaaattgggctggagcctggaggtcaccacacctatttgcaacgtgttccaagcgtgtcactactggtatcaccaaagctctcgtgagggcatagatagttgaactacgtttagaagatgatctacagaatagcttaatgacttttgacatggatagtatagctaccatgtgatgatgtgaatggggttttcttcacgttagagatgtccgacacgtttgtgatctttgcattcttcaactcatgcattcatgtccaaatgctacctcgtatgtcgttgtcactgccagcataggctacgacctgtcaccttaattaggtctctctagttctgtcagggacaggcaaaccttctcccaggacccttaatcgctagttgagacaaattaatttatttccacgtcaatcttctccagttcccaaggaaatttgagtctctctatggaatgcgtgatcttttcttgttttatgcgtttttttacgtggaacttttttttaatttattctatagaattcctaggttccaaagagaccttacaagctcggaggagctcaccaaactagatagagaagagtagggatggtagttggacccgtgagtatggatacccgcgggtttcgtacccaccggatatggatacgggtacaaaaactcactcgtgggtcctatcgggtcagatacccgaaatacatcgggtcgggtatgggtaaaatgctttatccacgggtatccagtggatacccgaagtatcaatatacctctttaaatgtgctacatccactaaaaatgtgctacattcactagaaaaactcactcgcatgtgttgttgattaatgaatattaatttgtgttgtgttaacagtcaactgtaatgtaatcgagactaatgagtcattgacaatgttataactgtcaactatcatgaactcattaagcttttattctctgtactcaaatttaaatttattagatgtgataattatgagtcgagatattgtatcgacgtgtagccaaatatagtcattctcgtgttgcattggtgcttagatgtaaactaaaatattttatgcatttattataacactgatcgaatgttatttagtctacactaacatatccactggatacctgatacccggtggatacccgatgggcatggatactggtacagttttctcgcctgattgacttggtgggtatggatatttgtagaagtctcgggtacaatttcggatcgaatattattatacccgaataaaacccgacccgctgtcatccctagagaagagagggcaatcccattagaaacatagctttgttgctgctagcgttggaatagtaattgtttataagcatatatccagttatccagagaagttttcctttgcgattctagctgtgctagcgttgttcgttgttcttactctggcagctagctcagcgcctcagcccatatatagatttgctcaagaaaagaaaagaaaacgagagacgttctcacgttgttctggcttcaagttttgtagtttcgttgtttctgcaatttcaccaaaggtttgatttttttccccattcagggcacagtagtcctccttttccagccgggtgaggaggtcggtattggcgcaaagaggatggtggaggcaggcgccgtggagaacgtggaggccatattcgggttccacgtcaccgtgctgctccccaccggcgtggtgggctccaggaccggcccgctgcttgccgggtgcgggttcttcgaggcggtgatcaccggggtcggcggccacgccgcctccccacacaacaccgtagaccccgtcctggcagcctccagcgtcgtgctcagcctgcagagcctcgtgtcgcgcgaggcggacccgctggactcgcaggtggtgacggtgacgaggttcctgggcggcggcgcgttcaacgtggtcccgggctccgtgacgatcggcggcacgttccggtgcttctcggccgagggcttcctgcggctgaagcggcggatcgaggaggtggtcgtggcgcagtccgcggtgcaccggtgcgcggcgtccgtggacttcagcgccggtgggagcccgctgctgcccccgaccgtgaacgccgcgccgctgcacgcgcacttcgaggccgtcgccgccgacacggtcggcgtgggcgccgtccgtggcgccatggagccctgcatgggcagcgaggacttcgcgtccttctcggcggccgtccccgcctcgcacttctacttcgtcggcatagggaacgaggcgatcggggccgtgcacgccgcgcactcgccgcacttcctcgtcgacgatggtgcgctcccgtacggcgccgcgatgcacgccaacctcgccatcgagtacttgcggaaccacgcgatagccaataggtccgttggtccccacgacgagctttagttagatctactgcagccagcctttcgcgagcagccacagcggtggcggcggcgccggcgccggcttcacgctcatagctcgtgcccagcgaagctcaagacgagctcatgcttgcgatcgtcaagcaatcacgtcgtgatccgatcattttgtggctcagggagggcgttgtaggaatgcagtgcgactgatgttgttgttcaatgcgcggggcgtaattaagctggttgagagataagaatgagatgttgcctttacaatacaggcgctcctgtccgagctctgttccacaattagtttgggaaatgaaagatgagaccgtggactccaatgtttcacatcctgcttttttttttataaagcaccgaaaattttaaaattagaagtactgattccgttctcgaatattgtcgcgtgctatataaaaaaaagaacggaagaagtaggttggaaggaaggagtaggttggaagggacatcttttgtatagttcatcagagaagaaacattacacaagaaattccagagaaaaaatcattaatatgcataatggttggaagggacgtgactctgattctgaaacaaatacctactgcggctgaggaactgccgatatagaatatctgaatcggtaaagatacatcatcataattcatacatgcgatgcagctagcgtaggaagaaacatgctaggactagtactagtacatacaaagtaggaacgggacaaactcgccgtggcctggagcactcagtggcgcaggctgccgaagaggagcgccacggcggggcagaggacggcggcgacgacggaggacgagacggcggcggccccagacgtggggctgggcgcgggcgcgtcggcggccatcgcgacccccgcgagggcggacgcggcgagcgcggcggcggcgacggcgcggaaggccttggatgccatttccttacggtacagtttgcaggcttgtaccgtgcaccgtagaaagggagatgccgaggagggatctgggattctgggttgtactggtgcagtggtgtttgt

SEQ ID NO: 32198 - DNA, 2505 bp, Zea Mays
ctcaaaatcaaatcaaacgaagcgcggacaccgtcacaccgggtcaccggcacactaattcgttactccccgctctctctcctccgcccccgcctcgtcctccgaccctccgccattcccaaagcacgctccgctttccttttgtttactctcccgcatcctcctctcgtttccctttccgcccatgcggatccgtctcctcgcatccgccgccgtcgcccacctcccccgcgcccgaatctgacccgggcggagttagggatgggggcagaaggggagggggcagtggaggaggccacggggttcgaggtgtgcatcgtgctgcccaagctctcccgcgccgccgcgacggggcccaccgaggactgcgtggcgcggctggtgcgagagctcgagggtgccggcctgctcgtcgagcgcgtccgcggcgtccccgctgagttcatcaagctggctgcaccaatggggaccctggggagagctgctgctgatatgcagatgaaaaagctaacctacatcggaatggagcttcaatttcaatgggaccaggtcgcagcattcgttaggcagccagatggttctctgtttagctggagagagcggtattgctgcttccgctacttgatatatggcattgtgaacaagacaaactctgaaatagctattaaatttgatggtaaggagttccattggaagcaaagtgagtccttattgacaatgctggaagctgaaggagttgtaaagcgaatattccctttgcatgatgaaattaagaggaagcaactcctgagaaattgggcacttaattggcttgacttcacatggcaacctattgatgagatttactcctactttggaacaaagattgcaacatactttgcgttcctaggaatgtatacacgatggcttttcttcccagctgtttttggattgacaactcaactaatagattttgggtcattgcagtggttggttcttcctgctttctttatctttgttatttcttgggccgtcttctttctgcaattttggaaaaggaagaattcagcacttcttgcaagatggggtattaattgttcactatctgaatacaaaaatctgggcatcgaactcagttccttgagtgattctcttactgttgaggaaaagaagttttgtgatgtatctgctgagaaaagcaagttacaaaggaacgaatggtttggtgttctccttagaataaggaacaatgctatcattgtgctggctatcatctgtcttcagttgccatttgagttggcctatgctcatctatatgagattacagaaactgaggctatgaagtatttgttgactgcagtatatcttgttgcaattcaatattacaccagaattggtggcaaggtgtctgtcaatttgataaagtatgaaaacaaccaaggagaagaatcgagttccgctagtttagtttataaggtctttggtctttactttatgcagtcatatattgggttattttaccatgcttcattgtatcgtgatatactggccctccgccaagtcctcatccagcgtctcattgtgtcccaggtattggaaaatctgattgagaattccattccttaccttaagtacagctacaaaaagtacatagctgttcacaagaaaaagcatgagaaagaatcaccagtgggtaggtcagtgcggttatcaacaagagtggagaaagagtatttaaaaccctcttatactgcgagcattggagcagaacttgaagacggtttatttgatgactttctggagctggctcttcagtttggcatgatcatgatgtttgcctgtgcatttccattgatattctgctttgcagctctgaacaatgttactgaaatcagagcagatgcattaaagttgctagtcatgttgaaaagacctgagccgcgtgctgcagctacaattggagcatggttgaacatattccaggaggggaaatggaggattgagccaggactagcagcaatcctcataatggagcatgctctcctcttaatcaagtttggtttctcacactttgtgcctgaggagcctgcgtgggtgaaagcaaatcgtgtgcgatatgtagctcaggcacaaaacgtctgctccaaacaacttttgaggagcatttcaaaatttgacggaaaactggattgagaaacatcatgcacagtttagcggttatcgctggttttgtagtttaggtagagcggttttgtatagtacaaagatgtacaaatctaggggtgtaatatcttgatgcatatgaccgttaagtgtagatattaggtgatcgccacctatcttaccagcaaatggtgaagaatgcccacaagtgtaagtcagtttttcccctctttcattttaatggtctgttgaattgaacggaaactcacatgctgcaccatgtaggaggtgtttgtaatgtgctgtgggtgatttcgaagagtaagatggcaccctagccaacagatatcaattagatatcaa

SEQ ID NO: 32199 - DNA, 828 bp, Zea Mays
tgggaccgtcagagactcggctacctctcctgcaaaatggctatggcagtggcttccttcgtcgccgcttcgcaccaccacggcagtcacctggccgccggcgtccccttctccgcgcgagtaggcaggagcttaggccgcagtggcgtcaccatctacatgagagcccaggtggacgtacaaccgagctaacttcctctctctctctctctctttctcctcccacagctggcagcatcccccaattcgcacacacttgcccttgttttactctgttccattctctcgcagaagaagcgcaatagtgaatctgggagcagtagcggaggtggggacgtgcgggccagcagcgggcggcgagtgtggcgtcgtcggaaactgaccaaagaggatgacatgttgcgttacaagttggatcgtatcccttttctagaggagaaggtgagaaaagtaagggagaatgggaagatcatatgcctggacattaatcagctgatgttatctcaagagaatagatttgcattcaccatggaggtggctgaagaagctaatgtctatcttgagaagaacaggcatgaatatgggctgaagaagcctatactgcatgttctcagtgaccgcatgaatgaagctgggttttctcggcctgagggttacctttatccttatcctattaagcctggtccttatttcattaaagaggaaggaaattgagtaaaatcacgtgctacttgtaacaggattatcattttcaacaactatagtttggcctgcatccagacaaaagaacatattcagattaggaagattacgactgagatgcaggtg

SEQ ID NO: 32200 - DNA, 644 bp, Zea Mays
tgggaccgtcagagactcggctacctctcctgcaaaatggctatggcagtggcttccttcgtcgccgcttcgcaccaccacggcagtcacctggccgccggcgtccccttctccgcgcgagtaggcaggagcttaggccgcagtggcgtcaccatctacatgagagcccagaagaagcgcaatagtgaatctgggagcagtagcggaggtggggacgtgcgggccagcagcgggcggcgagtgtggcgtcgtcggaaactgaccaaagaggatgacatgttgcgttacaagttggatcgtatcccttttctagaggagaaggtgagaaaagtaagggagaatgggaagatcatatgcctggacattaatcagctgatgttatctcaagagaatagatttgcattcaccatggaggtggctgaagaagctaatgtctatcttgagaagaacaggcatgaatatgggctgaagaagcctatactgcatgttctcagtgaccgcatgaatgaagctgggttttctcggcctgagggttacctttatccttatcctattaagcctggtccttatttcattaaagaggaaggaaattgagtaaaatcacgtgctacttgattaggaagattacgactgagatgcaggtg

SEQ ID NO: 32201 - DNA, 885 bp, Zea Mays
tgggaccgtcagagactcggctacctctcctgcaaaatggctatggcagtggcttccttcgtcgccgcttcgcaccaccacggcagtcacctggccgccggcgtccccttctccgcgcgagtaggcaggagcttaggccgcagtggcgtcaccatctacatgagagcccagaagaagcgcaatagtgaatctgggagcagtagcggaggtggggacgtgcgggccagcagcgggcggcgagtgtggcgtcgtcggaaactgaccaaagaggatgacatgttgcgttacaagttggatcgtatcccttttctagaggagaaggtgagaaaagtaagggagaatgggaagatcatatgcctggacattaatcagctgatgttatctcaagagaatagatttgcattcaccatggaggtggctgaagaagctaatgtctatcttgagaagaacaggcatgaatatgggctgaagaagcctatactgcatgttctcagtgaccgcatgaatgaagctgggttttctcggcctgagggttacctttatccttatcctattaagcctggtccttatttcattaaagaggaaggaaattgagtaaaatcacgtgctacttgtaacaggattatcattttcaacaactatagtttggcctgcatccagacaaaagaacatattcaggtatggtattaatggtctagcaattaatatattgcacagaagcaagagcgaatcccatacctgcagatacattgaagagaagaattaaaaggatgatgccaagtgcaaaagtgtctttaggcatattttgttctcttcgactggttttgcgacgatgaaaaatgcaagcaacaggaaaccgatttcggagtcgcggcttcactgtag

SEQ ID NO: 32202 - DNA, 726 bp, Zea Mays
gcaagggggaaatcttcttatagatctgttccgtcactgtgacaatcatttgggagagaaacaagtaaacaacccttttttccataaaactccatctggaacgccacagttgctgctactgagtaccatccttatatccttatttcctaattgttgtggtgcatgtacaggtttttttaaacgaattccgaattggttattgctgttagaactcatttgagtgctaccttctcatatgctccttttttctctctggctgttatgttaaaggaccagatacaagtcaatcttccctttaaattacagttcaattattttatatctggcttctgcaagacacttcaaaaaaaatataacagcatgtggtccctgtgttatctactagcatgagccattgttccatgcaatttggtacatagtggggcatattttgttacgtttactttctatattcttagtatatttatagcctatatccccaaactatatcatatacttagcacacacccattgttataatccacgcgcgcatggcgcgcgcactttactagtatataacattgttggcaacaggagctaatctctttattacacgatgactatgcacttaactacttaccacttggcacctgcttgtctaggcccggtttaccaccctagctagagctgctagctgctgctctgctcctgcgtgccctgcccggttgccatcgtggcatgttgatt

SEQ ID NO: 32203 - DNA, 164 bp, Zea Mays
gagccctcgccggacatcgcactccatggcagaatctgtgccaccatgtgccgtgaatcatgctgctgcgcaccgtgggcagccatgcctgtgcttcgtgtcatgtgcggtcacggggatctgaagaatcaccctggtaactggaatctcaagtgccaggcaag

SEQ ID NO: 32204 - DNA, 321 bp, Zea Mays
tccgacctccctataaaatgcagggcaagctcagagtttcatttcatccacaccttcagggcgccgttcttggtactatagcaactatataggagtagtgtttgggtttcactttgatctcttgtgttctttctcgcagcgtgtccgggtggtgttgtgctttcttgcagtgagcctgctctgtttttaccaatggtttctttgttcatgtggtggttttgagctccatttttcttcttcttcttcttctctctccctgggactgttgtttttttgttacaaaatataatatacatcaaagtcgttataggttactggtta

SEQ ID NO: 32205 - DNA, 3636 bp, Zea Mays
cgtaggtcgacacctcgcactcgcgcctgccgtgccgtctgccgaacaaaaaaagcgtgctgtgcctgagacgccgcgccctgggggctcgatcgccttgccttgcccccacggcaggctctcttccgggaggcatccacgtcgcgagaggaactgggatgatggagcggcgcgccgtgagattgcccgtgaagaaggtatacacagtacgcacgcacgattgaagaaaagagagtgcgtaacgcgacggaccaccggttcatcagtccctcactccttccagatcagatccaggccttatccgctggagcagtgagggaagaggggcaacggaactagtagtagtactggtcagtggtcacatgcggctgcgagggaggaggggcagggcaactacccagcagccggctctgcacgtggttaccaatcagacccggcggccggcgcacaagtgttgagaggatgcacctgcccggctgcgagagaccgcgaccgacggtctgaacccgtcgtcgcagccgcaggtagtaaaaggcagcaggaagaaacgccggaaacagagcgaaaccccacgaccagagccgctcctacaagttcgttacaccttccttctcaggcacgggcgctgctggtatgcgggcgacgtggctttcgctcagaggctgccgcgccgcgcgcacagaagcaaacgcttacgcacgcggctatttccctccgccacccctcggtttccgcacgtgttccacgcccccgcgctgcccgtagaaatagaccttcccctcccggcctcccctcgccaccacagtgccagacgcacgcaagcacaccacacgccctcacaactcgcatccatcgggcctcttccactccacatcgggagccgcaagcagaagcagaaccaatgacgacgacgaccacggcgaagcagctccggcgcgtgcgcacgctcggccgcggcgcgtcgggcgccgtggtgtggctggcctccgacgaggcctcgggcgagctggtggcggtcaagtcggcgcgcgccgccggggccgcggcgcagctgcagcgcgagggccgcgtcctccggggcctctcgtcgccgcacatcgtgccctgcctcggctcccgcgccgcggcgggcggcgagtaccagctcctgctggagttcgcgccgggcgggtcgctggccgacgaggccgccaggagcggcgggggccgcctcgcggagcgcgccatcggcgcctacgccggggacgtggcgcgcgggctggcgtacctccacggccggtcgctcgtgcacggggacgtcaaggcccggaacgtggtcatcggcggcgacgggcgcgccaggctgaccgacttcgggtgcgcgaggccggccggcgggtcgacgcgccccgtcgggggcaccccggcgttcatggcgcccgaggtggcgcgcggccaggagcagggccccgccgccgacgtctgggcgctcgggtgcatggtcgtcgagctggccacgggccgcgcgccctggagcgacgtggagggcgacgacctcctcgccgcgctccaccggatcgggtacacggacgacgtgccggaggtgcccgcgtggctgtcgcccgaggccaaggacttcctggccggctgcttcgagcgccgcgccgccgcccggcccacggccgcgcagctcgcggcgcacccgttcgtcgtcgcctccgcctccgccgccgccgccatccgcggcccggcgaagcaggaggtggtcccgtcacccaagagcacgctgcacgacgcgttctgggactcggacgccgaggacgaagcggacgagatgtcgacgggcgcggcggccgagaggatcggggcattggcgtgcgccgcctccgcgctgcctgactgggacaccgaggaaggctggatcgacctccaggacgaccactcggccggaactgccgacgcaccgccggcgcccgtcgcggactacttcatcagctgggcggagccgtcagacgcagagctggaaccattcgtcgccgtcgccgccgccgcaggtctcccgcacgttgcaggagtggcattagcaggcgccaccgccgttaacctgcagggcagttattattattacccgcctatgcatctaggcgtccgcggaaacgagattccacgcccgttgttggatcatcatggcgacgggttagaaaaggggcagggatcccaccgcgtttgtaacagagaaacagaaaaggtaacaatgaaacgaatttcgttaaaaagaagagctgctttccttctcgaccagcatcacgtgcgatcgctggacaaactggaatatcgtccacgtcacgaccgaatgctgcgtcgacggcaatctatatatcggagcaatagcgtccttggttacgacgttagcaaaggtaggcaggtccgttggcgccgtgcggtttgcattgccgttgctgcctgatcgaatgctatgctatcgcgacatgctcgtgctccgctgctcgctccaggctgcattgcattgcatgtctggagtggacatcactggatcgactaggatgtcaacgccgagatcctcgatcttcggtggggagatccgatgcgttgcagcagccttcccctttttcgtgacggacggatggccacctcgccgtcgccggcccctgatgcctcacgcgcgatgtgatgtgacgctgagacgagagacacagcacacatgatatcagcgcctcctttgatatatatacggagtggtttgttaggctgccacgtcgagacgagcgtggttttccttcgcttggatagctggatctcctctgctttaaatcactggcacgttctgtccggctcagttcgattaatatctattccgtagtccccgtttccctaatttatggcccgttaggcaggctgaactgagccgtccggggaacgtacgtacgtacgttcggcgtgacggatctggcacatgcgttcggttacgcaaattgggcatgtgcgcacatttcgttgcctaaaataaaaacaggtccaaaagcgctaccgactcaaaaaagatccaagcgcgcgcgagctcgctcgtggctgaattattattaaccgagtccgggtctgcgattttgctcgctccccggcgacggccgacgctttcgctcgtggctgaatactggttgctgaggctggatgttgtcgtccctgtcaggaccttttcttcttctgcgtatattttactcttgtaaaaacagcacgggtttgttctccccattcttggtatctggcgacttttcagagaggtagccggggccggggcggcgtaagcactaacgccagcgccggtgcgcgcgggtggacgaacgacgaggcagcagtttggcacgccaaggcgacccctgacagtcagtgtctcttactcggcggcgtctgaacgcagctgagattttttttcttctccctttactcactcaacccacgctctcagtggccagtaggcaaagtagtttatcctccccccggacgcacatgctgacatgtcacatgcgtgcaccctgttaagatgtgtcctctacactagccgattaacagtaaccggggtagggttaatcctaactgtctaaccgcgcccctgatcggggggctatcctaaccgttggt

SEQ ID NO: 32206 - DNA, 594 bp, Zea Mays
ggcgggtcttcgctgcaagacgccgccgcaatgatggctaggaacaacaacggcggtatgttaacttatacccctcagcagaatagatctactcatcatcgaggtattttagacacggattggtgttctagggacttaggaatcgatcctaagcaccagtaatttctaacaatggtatcaaaagcgccacctaagaaccctagatctcctaatccgcatcgttttatgagatcagagaaaggtctaggatatatgtgatgaactcattttttttataatcattcatcacccctagaacagagattagaatagaaagaaatagttgatgctctcgggttagggttttccctaaccctaagatttagttttggccatgataagagacacagtgtctcggcctcaaaccagagagatcacataactgtctagggttagggtttatgacctaaccctaatcggtacatctgtcaacagagacaaaagagactcgtgattataaaccacggtcaagaacagataagaaaaagtcacagaataaaattacggttagaaccctaatttttttttaaaccgcgtgaatgtgcatagatgcac

SEQ ID NO: 32207 - DNA, 775 bp, Zea Mays
ctagagttcctacggctctggattctctatgggagccgattttccgagaaaagtggttctcctatttaaaatatgttttccagttgtttagtataaactctatatatacattagtttaaaataaaactcaagcttattatatttgcagatgtataatgctcatatgggatctccactacaagaaacttataaatgtctgcgccgtctcccctcccatgtcgttgacgtcagttcgctgaccacacactgacaatcgtttcttgatgctattattaatggcaactgttaggggaacaattggattcactgaccataaaagaacttcagcaactggagcaacaattggacagttctttgaagcatattagatcaagaaaagtgaattagttggggtcaaatttgttgttcggtgcacagctattttggttatttactaacgtcttagtctattattatattatagctttatttatttttttggcacagaatcagctcatgttcaattcaatttccgagcttcagaaaaagcaacaacaaagcttttgttagtggcgaaagcaggacaaaaaattaagtgggaccaaacaaaattgcaaagcaactagacaagatcgtgaaactgatctctggtggacgtggacgcactaaacatggaaatgactcactatgagtggcattttaccatgaaatagtgaaaaggataatgagaaagaaagcactcatgtcgaagtgtttgagcagactagttgtggagaaagcacttacagatcaaaat

SEQ ID NO: 32208 - DNA, 594 bp, Zea Mays
tggacagttctttgaagcatattagatcaagaaaagtgaattagttggggtcaaatttgttgttcggtgcacagctattttggttatttactaacgtcttagtctattattatattatagctttatttatttttttggcacagaatcagctcatgttcaattcaatttccgagcttcagaaaaaggtcaactacaatataggttcccttgtacttcgcattctgcatatgttacatgagtcactactcactagtgaaaattattgttgcgaggacacccagaatttgggggaatgagagcaaaaacgtttcagtctcgttatggcataattatacacatgtttcattgagattaatgtattttcactgtagtttaacaatcgcaatctgttgccactattcatcatgcagcaacaacaaagcttttgttagtggcgaaagcaggacaaaaaattaagtgggaccaaacaaaattgcaaagcaactagacaagatcgtgaaactgatctctggtggacgtggacgcactaaacatggaaatgactcactatgagtggcattttaccatgaaatagtgaaaaggataatgagaaag

SEQ ID NO: 32209 - DNA, 572 bp, Zea Mays
gccatctctaaccattactaggccaaacacaaattccactcaagatctacattgccgaatgatcatgacattggtgtagggtttagtgtacttaccatataggggagccgatgatcctcttggccataatcgtggcgccatctttcttcgccactcccaccaagcgaggaagtagtatgcttcctggggttggggcttcttcaacggatctccgcctcctctgatcgccgctatgtgtaccggccaccgtcgccagcgatgaagtcgaggagatgggcaacagaggaggaaatctttaatccgcaactgggacgcacccaggacctgcactggatgcgcgatttcgggggcggctgcaactggcgcagcgcttcacttcgttgctgcgaatctcaagcagcgactgcggcgggaggtcgcggccgtgggcgacgtgtggcggcgcctggcggctggtcagagtttggtgctttaaactcgcgcggcgtcagtaatcctccaatgccaagcatgacgatgttgggggcacgtgcaatagcctgcttctccccgttgaaggagacaacctgttt

SEQ ID NO: 32210 - DNA, 559 bp, Zea Mays
aagatctacattgccgaatgatcatgacattggtgtagggtttagtgtacttaccatataggggagccgatgatcctcttggccataatcgtggcgccatctttcttcgccactcccaccaagcgaggaagtagtatgcttcctggggttggggcttcttcaacggatctccgcctcctctgatcgccgctatgtgtaccggccaccgtcgccagcgatgaagtcgaggagatgggcaacagaggaggaaatctttaatccgcaactgggacgcacccaggacctgcactggatgcgcgatttcgggggcggctgcaactggcgcagcgcttcacttcgttgctgcgaatctcaagcagcgactgcggcgggaggtcgcggccgtgggcgacgtgtggcggcgcctggcggctggtcagagtttggtgctttaaactcgcgcggcgtcagtaatcctccaatgccaagcatgacgatgttgggggcacggatccggatagaaatctgagcagaaaatatactactgcaactgacaaacttgatagcgtgaattgtgtcc

SEQ ID NO: 32211 - DNA, 1768 bp, Zea Mays
acgggagggcgttgaggagaaagcaaggggcgaaggggagggcggctgtgatggaggcagtggcagatccaggattaatctaagagggggctactaaattaagactaacataaaaaaaatttaaaccaaacaaaaaatataattgatatttaatatgacacaagaaacaagttataatttaaacattgaagaaatatgtagcccaaaaattcatgagtcgatacaaattctagaaatacaataatcttgcacataccgttcatgaagatttaatcatacggtattatttactttatgtagtccaaatatatgcagtgacgtagacgagatgatgcgatcaaccaatcagacggataatatatagcatgaagattgatagtaatttgaaattcaggtcggattgccgcttgaatatcgtcctcgctcgttagatctgaggttcctcgattgcaccacagtttaatttgtgcctttaaataatgctcctgtgtatcatatgttcgtctatttgcttctcaagacaaatgtgtagatataccttggataaaatcaaaagatccttcttttggcaaggtggagggccgtacaaaaagtaaataataccgtatgattaaatggaccaagatatgtaaaagtaagaagaagaaaaagaggagtaggtatgtaggatatcaggaagacgaacatgagtctcctctcgtttgtaaatggaggtggaagttggaaagaagtaagccttttgtcaagaaattataaaatccgaataaccgagcgaggggatggatccatttgtactatgaaacacagataagcaggcttgatgccagtgaaaaccaaggcgatgcaacatccactacctcagattcatctgagcatggcatcagtgaggctatccatattgaaactagattggaacatggaagtgcaacaacatcatctgttattggatctggtgatgacagggataactcatctgatagatcctctgcaggaaaaaaatacggtgactctatctggtgatgataagggcaaggaaacaggtacaaccactgaagcgtcatattccaaagaagagaaatctgagaacaacagtgtctcaactgaagcagagaactcccgaggagattcttccagtggagtgaatggttcttcagaaacgtctaccaatggtggtgagcaggtggatcccaagactgaaactagcacatccaccagtaacgagcacaatgaatctcaaggggctgatggcagttctggatcaaataactgtaacggccctgaacaaaccattgatactgctgaagtacaattgtgcatatcgcaagatcgattgtctgctatgcttattgcttatgccatgatttctcgtcaagttgtatcagaacgagtcattatagctgtacggttaatgatgcaggcccataacacaggaaaatctggaaggggcaaagttctaggaaaaaatgaggaaaggcaccgtaccccagctttcctgcagcagtccacaggcacaggcacagaccggcacgctgagtcgctgacgctggtatgatgcacatgttctccctgcagatcctaacgaggcgtgtgggcgcttgagccaccaactttcctgccgaggttttacgggccggcggcgggcgtgccgcgtgcggcagccaagccagcaggcagcagcggccagcggtcgggcctggcgctggcggcctgggcggtcgcgcctggcggcctgggcgccggtggaagacctcgctgtgaggacgcgggt

SEQ ID NO: 32212 - DNA, 677 bp, Zea Mays
gttttcggacggtagaatgggaaaagcacgcggcgcggcggcgtagctatggaacggcggcggcgtgtcttcgctggtggggagcggaaaggaagcgagcagccagatatggtggccgcgccagtgggcaccgttaccgtcgtaacgtcaagtctaggctagcgtcggttggatcatgacgaccaaaggggacctcggcgcacgaaagatatttgagctcgcaaccgggagactgttgcaaaggataaaatgcttggaggtatgcacgcgagcataacaagggccagcatccagcctctaatgaatccgatgataaagccaccgacgaaggttgtcaaaagctgtatgtacttccctaccttaacatgagaagtcaagttttttagtgttgtacataaggcttttttcttaagttggttaggtggtcgtctgtcccacgctaaagcacaggcctaaggcccggcatcggttgcggtcgttctcacatgggcttcgatgccgctatgtatgggaagggtagaggttcgggggaggtgtgagaaagtatttttcttaatacaatactcgagggttgtcttatccctgcaggtcgagtttttatgttgtagacatgaaagaccctttaatggaaactaggcatacttttgtttcttttgtcaaaacaataatgaactgtt

SEQ ID NO: 32213 - DNA, 647 bp, Zea Mays
aaaagcacgcggcgcggcggcgtagctatggaacggcggcggcgtgtcttcgctggtggggagcggaaaggaagcgagcagccagatatggtggccgcgccagtgggcaccgttaccgtcgtaacgtcaagtctaggctagcgtcggttggatcatgacgaccaaaggggacctcggcgcacgaaagctcgcaaccgggagactgttgcaaaggataaaatgcttggaggtatgcacgcgagcataacaagggccagcatccagcctctaatgaatccgatgataaagccaccgacgaaggttgtcaaaagctgtatgtacttccctaccttaacatgagaagtcaagttttttagtgttgtacataaggcttttttcttaagttggttaggtggtcgtctgtcccacgctaaagcacaggcctaaggcccggcatcggttgcggtcgttctcacatgggcttcgatgccgctatgtatgggaagggtagaggttcgggggaggtgtgagaaagtatttttcttaatacaatactcgagggttgtcttatccctgcaggtcgagtttttatgttgtagacatgaaagaccctttaatggaaactaggcatacttttgtttcttttgtcaaaacaataatgaactgtt

SEQ ID NO: 32214 - DNA, 1135 bp, Zea Mays
atggcgtgcggggatggggcagaagaaaaatttagggaaccgctgcggctagcgtcagataccactcctggcgccgctgacttcctcaaccctatgcggccgacgccggcgctcgtcgccggtggacgcatggtaacaagcttcttatccgccactgaatggatgcttccgtctccggccacgcaagtccacaccatctccgtacttccctcccgtcgcgacttcgccttctccaacctcacgatgttgctcaggaatagcggcggcaacgagggagagagtggcagtactaagttccacgtagtacgggacgacctcctccacccgctcgccaacggcaacaaggcgcgcaagctcgacgccctcctgcccatcctccgccgctgcggcgttactgacatcgttacatgtgggggttgccagagcgcccatgccgcagctatcgcggttcactgtgccgaatggggaatcaggccacatatactgctgagaggcgagcaactggatgttcccacagggtataatctcatctcattgatgtttggcaatgtgacatatgtctctcggtctttgtatgcccaaagagacgagatgctttatgagcatgccataaaggttgcaggatatagtggcacagtgatgtgggcagatgaagttataggaaagggtttgggtgtagatgaggacaccactgatggaaatggttcaagaagagtgatgattgttaaggaaggggcaggtagtgttcaagcactgcttggtgtcatgcggctactgaagtatctttctggtttgacattatttagaaaggatgagaaagttcatatcgtggtagattctggaacaggaacaactgctgtggggttagctcttggagcggtatgtctaggactccagtggagggttactgctgttatgcttgctgacacacttgaaggatataaacagcgagagagatctcttttatctgattttgagaaggttttcccggaaatctaccatggaatggtggaagatgctactcatgacaatctagttcaatgggtggagcggttttcacctagaagtataaaggttgcttgttgatggcatgcttggtaattctgtaatttgtggataaaattcaggagtcagc

SEQ ID NO: 32215 - DNA, 1506 bp, Zea Mays
atggcgtgcggggatggggcagaagaaaaatttagggaaccgctgcggctagcgtcagataccactcctggcgccgctgacttcctcaaccctatgcggccgacgccggcgctcgtcgccggtggacgcatggtaacaagcttcttatccgccactgaatggatgcttccgtctccggccacgcaagtccacaccatctccgtacttccctcccgtcgcgacttcgccttctccaacctcacgatgttgctcaggaatagcggcggcaacgagggagagagtggcagtactaagttccacgtagtacgggacgacctcctccacccgctcgccaacggcaacaaggcgcgcaagctcgacgccctcctgcccatcctccgccgctgcggcgttactgacatcgttacatgtgggggttgccagagcgcccatgccgcagctatcgcggttcactgtgccgaatggggaatcaggccacatatactgctgagaggcgagcaactggatgttcccacagggtataatctcatctcattgatgtttggcaatgtgacatatgtctctcggtctttgtatgcccaaagagacgagatgctttatgagcatgccataaaggttgcaggatatagtggcacagtgatgtgggcagatgaagttataggaaagggtttgggtgtagatgaggacaccactgatggaaatggttcaagaagagtgatgattgttaaggaaggggcaggtagtgttcaagcactgcttgaaaggatgagaaagttcatatcgtggtagattctggaacaggaacaactgctgtggggttagctcttggagcgactccagtggagggttactgctgttatgcttgctgacacacttgaaggatataaacagcgagagagatctcttttatctgattttgagaaggttttcccggaaatctaccatggaatggtggaagatgctactcatgacaatctagttcaatgggtggagcggttttcacctagaagatttggcaaggtgctggatggtgaaatcgcaatgtgccgccaggtagctcaacagaccggtatcctgctggatcctatgtataccttggctgcctgggagcaagctgttgatatatgctgtggagacagtgaagccaaagtcttgatgatccatacgggtggcacccttggcctttttggattggcacaaaggtattcatcacagttcaacacaggcgaacaaccttaggcatgtgcaatgatgatgttcaaatgttacggtttgtgggtatggactatggaatgtgatctttgactttgaataatcaaaagtagaaagaggtggggctttgttaaaggaattggtctttatattgatttggaagctaacatcacgatgtgcgttgaaaatggccttctttgctcgtacatttagaggttgtttgggtttgggacacctccatcggtaagtgttgacgctttttcatagcgccaaatactcaagaagaaccggcgg

SEQ ID NO: 32216 - DNA, 1333 bp, Zea Mays
atggcgtgcggggatggggcagaagaaaaatttagggaaccgctgcggctagcgtcagataccactcctggcgccgctgacttcctcaaccctatgcggccgacgccggcgctcgtcgccggtggacgcatggaatagcggcggcaacgagggagagagtggcagtactaagttccacgtagtacgggacgacctcctccacccgctcgccaacggcaacaaggcgcgcaagctcgacgccctcctgcccatcctccgccgctgcggcgttactgacatcgttacatgtgggggttgccagagcgcccatgccgcagctatcgcggttcactgtgccgaatggggaatcaggccacatatactgctgagaggcgagcaactggatgttcccacagggttgcaggatatagtggcacagtgatgtgggcagatgaagttataggaaagggtttgggtgtagatgaggacaccactgatggaaatggttcaagaagagtgatgattgttaaggaaggggcaggtagtgttcaagcactgcttggtgtcatgcggctactgaagtatctttctggtttgacattatttagaaaggatgagaaagttcatatcgtggtagattctggaacaggaacaactgctgtggggttagctcttggagcgactccagtggagggttactgctgttatgcttgctgacacacttgaaggatataaacagcgagagagatctcttttatctgattttgagaaggttttcccggaaatctaccatggaatggtggaagatgctactcatgacaatctagttcaatgggtggagcggttttcacctagaagatttggcaaggtgctggatggtgaaatcgcaatgtgccgccaggtagctcaacagaccggtatcctgctggatcctatgtataccttggctgcctgggagcaagctgttgatatatgctgtggagacagtgaagccaaagtcttgatgatccatacgggtggcacccttggcctttttggattggcacaaaggtattcatcacagttcaacacaggcgaacaaccttaggcatgtgcaatgatgatgttcaaatgttacggtttgtgggtatggactatggaatgtgatctttgactttgaataatcaaaagtagaaagaggtggggctttgttaaaggaattggtctttatattgatttggaagctaacatcacgatgtgcgttgaaaatggccttctttgctcgtacatttagaggttgtttgggtttgggacacctccatcggtaagtgttgacgctttttcatagcgccaaatactcaagaagaaccggcgg

SEQ ID NO: 32217 - DNA, 1904 bp, Zea Mays
atggcgtgcggggatggggcagaagaaaaatttagggaaccgctgcggctagcgtcagataccactcctggcgccgctgacttcctcaaccctatgcggccgacgccggcgctcgtcgccggtggacgcatggtaacaagcttcttatccgccactgaatggatgcttccgtctccggccacgcaagtccacaccatctccgtacttccctcccgtcgcgacttcgccttctccaacctcacgatgttgctcaggaatagcggcggcaacgagggagagagtggcagtactaagttccacgtagtacgggacgacctcctccacccgctcgccaacggcaacaaggcgcgcaagctcgacgccctcctgcccatcctccgccgctgcggcgttactgacatcgttacatgtgggggttgccagagcgcccatgccgcagctatcgcggttcactgtgccgaatggggaatcaggccacatatactgctgagaggcgagcaactggatgttcccacagggtataatctcatctcattgatgtttggcaatgtgacatatgtctctcggtctttgtatgcccaaagagacgagatgctttatgagcatgccataaaggttgcaggatatagtggcacagtgatgtgggcagatgaagttataggaaagggtttgggtgtagatgaggacaccactgatggaaatggttcaagaagagtgatgattgttaaggaaggggcaggtgtcatgcggctactgaagtatctttctggtttgacattatttagaaaggatgagaaagttcatatcgtggtagattctggaacaggaacaactgctgtggggttagctcttggagcggtatgtctagggtgcgtttgatacaaatacctgcacattctgacaaaaattgtggaaactaaacaatcagtcataaataaatgtcccattccgttgtattggtaatttgaaactgtcagttatgattttcatcacataatcacctaatgttgttagtgctattctctccatgcatctttgctacctatcacatctcatctagttctcctacatgcagactccactcataaatttgaaaatgccccattctgttgtgttgggaatttgaaactgttagttatggttttcattaccatatcacctaatgttgttagtgctactctccatgcatctttgctacctaccacatctcatttaattctcttacatgcagactccagtggagggttactgctgttatgcttgctgacacacttgaaggatataaacagcgagagagatctcttttatctgattttgagaaggttttcccggaaatctaccatggaatggtggaagatgctactcatgacaatctagttcaatgggtggagcggttttcacctagaagatttggcaaggtgctggatggtgaaatcgcaatgtgccgccaggtagctcaacagaccggtatcctgctggatcctatgtataccttggctgcctgggagcaagctgttgatatatgctgtggagacagtgaagccaaagtcttgatgatccatacgggtggcacccttggcctttttggattggcacaaaggtattcatcacagttcaacacaggcgaacaaccttaggcatgtgcaatgatgatgttcaaatgttacggtttgtgggtatggactatggaatgtgatctttgactttgaataatcaaaagtagaaagaggtggggctttgttaaaggaattggtctttatattgatttggaagctaacatcacgatgtgcgttgaaaatggccttctttgctcgtacatttagaggttgtttgggtttgggacacctccatcggtaagtgttgacgctttttcatagcgccaaatactcaagaagaaccggcgg

SEQ ID NO: 32218 - DNA, 1542 bp, Zea Mays
atggcgtgcggggatggggcagaagaaaaatttagggaaccgctgcggctagcgtcagataccactcctggcgccgctgacttcctcaaccctatgcggccgacgccggcgctcgtcgccggtggacgcatggtaacaagcttcttatccgccactgaatggatgcttccgtctccggccacgcaagtccacaccatctccgtacttccctcccgtcgcgacttcgccttctccaacctcacgatgttgctcaggaatagcggcggcaacgagggagagagtggcagtactaagttccacgtagtacgggacgacctcctccacccgctcgccaacggcaacaaggcgcgcaagctcgacgccctcctgcccatcctccgccgctgcggcgttactgacatcgttacatgtgggggttgccagagcgcccatgccgcagctatcgcggttcactgtgccgaatggggaatcaggccacatatactgctgagaggcgagcaactggatgttcccacagggtataatctcatctcattgatgtttggcaatgtgacatatgtctctcggtctttgtatgcccaaagagacgagatgctttatgagcatgccataaaggttgcaggatatagtggcacagtgatgtgggcagatgaagttataggaaagggtttgggtgtagatgaggacaccactgatggaaatggttcaagaagagtgatgattgttaaggaaggggcaggtgtcatgcggctactgaagtatctttctggtttgacattatttagaaaggatgagaaagttcatatcgtggtagattctggaacaggaacaactgctgtggggttagctcttggagcggtatgtctaggactccagtggagggttactgctgttatgcttgctgacacacttgaaggatataaacagcgagagagatctcttttatctgattttgagaaggttttcccggaaatctaccatggaatggtggaagatgctactcatgacaatctagttcaatgggtggagcggttttcacctagaagatttggcaaggtgctggatggtgaaatcgcaatgtgccgccaggtagctcaacagaccggtatcctgctggatcctatgtataccttggctgcctgggagcaagctgttgatatatgctgtggagacagtgaagccaaagtcttgatgatccatacgggtggcacccttggcctttttggattggcacaaaggtattcatcacagttcaacacaggcgaacaaccttaggcatgtgcaatgatgatgttcaaatgttacggtttgtgggtatggactatggaatgtgatctttgactttgaataatcaaaagtagaaagaggtggggctttgttaaaggaattggtctttatattgatttggaagctaacatcacgatgtgcgttgaaaatggccttctttgctcgtacatttagaggttgtttgggtttgggacacctccatcggtaagtgttgacgctttttcatagcgccaaatactcaagaagaaccggcgg

SEQ ID NO: 32219 - DNA, 1784 bp, Zea Mays
atggcgtgcggggatggggcagaagaaaaatttagggaaccgctgcggctagcgtcagataccactcctggcgccgctgacttcctcaaccctatgcggccgacgccggcgctcgtcgccggtggacgcatggtaacaagcttcttatccgccactgaatggatgcttccgtctccggccacgcaagtccacaccatctccgtacttccctcccgtcgcgacttcgccttctccaacctcacgatgttgctcaggaatagcggcggcaacgagggagagagtggcagtactaagttccacgtagtacgggacgacctcctccacccgctcgccaacggcaacaaggcgcgcaagctcgacgccctcctgcccatcctccgccgctgcggcgttactgacatcgttacatgtgggggttgccagagcgcccatgccgcagctatcgcggttcactgtgccgaatggggaatcaggccacatatactgctgagaggcgagcaactggatgttcccacagggatatagtggcacagtgatgtgggcagatgaagttataggaaagggtttgggtgtagatgaggacaccactgatggaaatggttcaagaagagtgatgattgttaaggaaggggcaggtagtgttcaagcactgcttggtaaggagcgattctttttggctagtttccatttatcattcatgattacacatgatgtttgtactgccaataaaacaaaataaattgataggatcatattctagtccatgcagctttgactggtcactggtttcacttcatcatattcaagctgtatttcatcaggactgagaaattaaattctgagcattaagatcactattatcaagtactttgcaccagcatatgtttatttcttatatctgttctgagatttcagatttgtaaaaggaaaacttttactggagctcgataaagttattttgctacttttcacatgatttattctctcttcaggtgtcatgcggctactgaagtatctttctggtttgacattatttagaaaggatgagaaagttcatatcgtggtagattctggaacaggaacaactgctgtggggttagctcttggagcgactccagtggagggttactgctgttatgcttgctgacacacttgaaggatataaacagcgagagagatctcttttatctgattttgagaaggttttcccggaaatctaccatggaatggtggaagatgctactcatgacaatctagttcaatgggtggagcggttttcacctagaagatttggcaaggtgctggatggtgaaatcgcaatgtgccgccaggtagctcaacagaccggtatcctgctggatcctatgtataccttggctgcctgggagcaagctgttgatatatgctgtggagacagtgaagccaaagtcttgatgatccatacgggtggcacccttggcctttttggattggcacaaaggtattcatcacagttcaacacaggcgaacaaccttaggcatgtgcaatgatgatgttcaaatgttacggtttgtgggtatggactatggaatgtgatctttgactttgaataatcaaaagtagaaagaggtggggctttgttaaaggaattggtctttatattgatttggaagctaacatcacgatgtgcgttgaaaatggccttctttgctcgtacatttagaggttgtttgggtttgggacacctccatcggtaagtgttgacgctttttcatagcgccaaatactcaagaagaaccggcgg

SEQ ID NO: 32220 - DNA, 1466 bp, Zea Mays
atggcgtgcggggatggggcagaagaaaaatttagggaaccgctgcggctagcgtcagataccactcctggcgccgctgacttcctcaaccctatgcggccgacgccggcgctcgtcgccggtggacgcatggtaacaagcttcttatccgccactgaatggatgcttccgtctccggccacgcaagtccacaccatctccgtacttccctcccgtcgcgacttcgccttctccaacctcacgatgttgctcaggaatagcggcggcaacgagggagagagtggcagtactaagttccacgtagtacgggacgacctcctccacccgctcgccaacggcaacaaggcgcgcaagctcgacgccctcctgcccatcctccgccgctgcggcgttactgacatcgttacatgtgggggttgccagagcgcccatgccgcagctatcgcggttcactgtgccgaatggggaatcaggccacatatactgctgagaggcgagcaactggatgttcccacagggttgcaggatatagtggcacagtgatgtgggcagatgaagttataggaaagggtttgggtgtagatgaggacaccactgatggaaatggttcaagaagagtgatgattgttaaggaaggggcaggtagtgttcaagcactgcttggtgtcatgcggctactgaagtatctttctggtttgacattatttagaaaggatgagaaagttcatatcgtggtagattctggaacaggaacaactgctgtggggttagctcttggagcggtatgtctaggactccagtggagggttactgctgttatgcttgctgacacacttgaaggatataaacagcgagagagatctcttttatctgattttgagaaggttttcccggaaatctaccatggaatggtggaagatgctactcatgacaatctagttcaatgggtggagcggttttcacctagaagatttggcaaggtgctggatggtgaaatcgcaatgtgccgccaggtagctcaacagaccggtatcctgctggatcctatgtataccttggctgcctgggagcaagctgttgatatatgctgtggagacagtgaagccaaagtcttgatgatccatacgggtggcacccttggcctttttggattggcacaaaggtattcatcacagttcaacacaggcgaacaaccttaggcatgtgcaatgatgatgttcaaatgttacggtttgtgggtatggactatggaatgtgatctttgactttgaataatcaaaagtagaaagaggtggggctttgttaaaggaattggtctttatattgatttggaagctaacatcacgatgtgcgttgaaaatggccttctttgctcgtacatttagaggttgtttgggtttgggacacctccatcggtaagtgttgacgctttttcatagcgccaaatactcaagaagaaccggcgg

SEQ ID NO: 32221 - DNA, 1828 bp, Zea Mays
atggcgtgcggggatggggcagaagaaaaatttagggaaccgctgcggctagcgtcagataccactcctggcgccgctgacttcctcaaccctatgcggccgacgccggcgctcgtcgccggtggacgcatggtaacaagcttcttatccgccactgaatggatgcttccgtctccggccacgcaagtccacaccatctccgtacttccctcccgtcgcgacttcgccttctccaacctcacgatgttgctcaggaatagcggcggcaacgagggagagagtggcagtactaagttccacgtagtacgggacgacctcctccacccgctcgccaacggcaacaaggcgcgcaagctcgacgccctcctgcccatcctccgccgctgcggcgttactgacatcgttacatgtgggggttgccagagcgcccatgccgcagctatcgcggttcactgtgccgaatggggaatcaggccacatatactgctgagaggcgagcaactggatgttcccacagggttgcaggatatagtggcacagtgatgtgggcagatgaagttataggaaagggtttgggtgtagatgaggacaccactgatggaaatggttcaagaagagtgatgattgttaaggaaggggcaggtagtgttcaagcactgcttggtgtcatgcggctactgaagtatctttctggtttgacattatttagaaaggatgagaaagttcatatcgtggtagattctggaacaggaacaactgctgtggggttagctcttggagcggtatgtctagggtgcgtttgatacaaatacctgcacattctgacaaaaattgtggaaactaaacaatcagtcataaataaatgtcccattccgttgtattggtaatttgaaactgtcagttatgattttcatcacataatcacctaatgttgttagtgctattctctccatgcatctttgctacctatcacatctcatctagttctcctacatgcagactccactcataaatttgaaaatgccccattctgttgtgttgggaatttgaaactgttagttatggttttcattaccatatcacctaatgttgttagtgctactctccatgcatctttgctacctaccacatctcatttaattctcttacatgcagactccagtggagggttactgctgttatgcttgctgacacacttgaaggatataaacagcgagagagatctcttttatctgattttgagaaggttttcccggaaatctaccatggaatggtggaagatgctactcatgacaatctagttcaatgggtggagcggttttcacctagaagatttggcaaggtgctggatggtgaaatcgcaatgtgccgccaggtagctcaacagaccggtatcctgctggatcctatgtataccttggctgcctgggagcaagctgttgatatatgctgtggagacagtgaagccaaagtcttgatgatccatacgggtggcacccttggcctttttggattggcacaaaggtattcatcacagttcaacacaggcgaacaaccttaggcatgtgcaatgatgatgttcaaatgttacggtttgtgggtatggactatggaatgtgatctttgactttgaataatcaaaagtagaaagaggtggggctttgttaaaggaattggtctttatattgatttggaagctaacatcacgatgtgcgttgaaaatggccttctttgctcgtacatttagaggttgtttgggtttgggacacctccatcggtaagtgttgacgctttttcatagcgccaaatactcaagaagaaccggcgg

SEQ ID NO: 32222 - DNA, 1433 bp, Zea Mays
atggcgtgcggggatggggcagaagaaaaatttagggaaccgctgcggctagcgtcagataccactcctggcgccgctgacttcctcaaccctatgcggccgacgccggcgctcgtcgccggtggacgcatggtaacaagcttcttatccgccactgaatggatgcttccgtctccggccacgcaagtccacaccatctccgtacttccctcccgtcgcgacttcgccttctccaacctcacgatgttgctcaggaatagcggcggcaacgagggagagagtggcagtactaagttccacgtagtacgggacgacctcctccacccgctcgccaacggcaacaaggcgcgcaagctcgacgccctcctgcccatcctccgccgctgcggcgttactgacatcgttacatgtgggggttgccagagcgcccatgccgcagctatcgcggttcactgtgccgaatggggaatcaggccacatatactgctgagaggcgagcaactggatgttcccacagggtataatctcatctcattgatgtttggcaatgtgacatatgtctctcggtctttgtatgcccaaagagacgagatgctttatgagcatgccataaaggttgcaggatatagtggcacagtgatgtgggcagatgaagttataggaaagggtttgggtgtagatgaggacaccactgatggaaatggttcaagaagagtgatgattgttaaggaaggggcaggtagtgttcaagcactgcttgactccagtggagggttactgctgttatgcttgctgacacacttgaaggatataaacagcgagagagatctcttttatctgattttgagaaggttttcccggaaatctaccatggaatggtggaagatgctactcatgacaatctagttcaatgggtggagcggttttcacctagaagatttggcaaggtgctggatggtgaaatcgcaatgtgccgccaggtagctcaacagaccggtatcctgctggatcctatgtataccttggctgcctgggagcaagctgttgatatatgctgtggagacagtgaagccaaagtcttgatgatccatacgggtggcacccttggcctttttggattggcacaaaggtattcatcacagttcaacacaggcgaacaaccttaggcatgtgcaatgatgatgttcaaatgttacggtttgtgggtatggactatggaatgtgatctttgactttgaataatcaaaagtagaaagaggtggggctttgttaaaggaattggtctttatattgatttggaagctaacatcacgatgtgcgttgaaaatggccttctttgctcgtacatttagaggttgtttgggtttgggacacctccatcggtaagtgttgacgctttttcatagcgccaaatactcaagaagaaccggcgg

SEQ ID NO: 32223 - DNA, 1899 bp, Zea Mays
atggcgtgcggggatggggcagaagaaaaatttagggaaccgctgcggctagcgtcagataccactcctggcgccgctgacttcctcaaccctatgcggccgacgccggcgctcgtcgccggtggacgcatggtaacaagcttcttatccgccactgaatggatgcttccgtctccggccacgcaagtccacaccatctccgtacttccctcccgtcgcgacttcgccttctccaacctcacgatgttgctcaggaatagcggcggcaacgagggagagagtggcagtactaagttccacgtagtacgggacgacctcctccacccgctcgccaacggcaacaaggcgcgcaagctcgacgccctcctgcccatcctccgccgctgcggcgttactgacatcgttacatgtgggggttgccagagcgcccatgccgcagctatcgcggttcactgtgccgaatggggaatcaggccacatatactgctgagaggcgagcaactggatgttcccacagggtataatctcatctcattgatgtttggcaatgtgacatatgtctctcggtctttgtatgcccaaagagacgagatgctttatgagcatgccataaaggttgcaggatatagtggcacagtgatgtgggcagatgaagttataggaaagggtttgggtgtagatgaggacaccactgatggaaatggttcaagaagagtgatgattgttaaggaaggggcaggtagtgttcaagcactgcttggtaaggagcgattctttttggctagtttccatttatcattcatgattacacatgatgtttgtactgccaataaaacaaaataaattgataggatcatattctagtccatgcagctttgactggtcactggtttcacttcatcatattcaagctgtatttcatcaggactgagaaattaaattctgagcattaagatcactattatcaagtactttgcaccagcatatgtttatttcttatatctgttctgagatttcagatttgtaaaaggaaaacttttactggagctcgataaagttattttgctacttttcacatgatttattctctcttcaggtgtcatgcggctactgaagtatctttctggtttgacattatttagaaaggatgagaaagttcatatcgtggtagattctggaacaggaacaactgctgtggggttagctcttggagcggtatgtctaggactccagtggagggttactgctgttatgcttgctgacacacttgaaggatataaacagcgagagagatctcttttatctgattttgagaaggttttcccggaaatctaccatggaatggtggaagatgctactcatgacaatctagttcaatgggtggagcggttttcacctagaagatttggcaaggtgctggatggtgaaatcgcaatgtgccgccaggtagctcaacagaccggtatcctgctggatcctatgtataccttggctgcctgggagcaagctgttgatatatgctgtggagacagtgaagccaaagtcttgatgatccatacgggtggcacccttggcctttttggattggcacaaaggtattcatcacagttcaacacaggcgaacaaccttaggcatgtgcaatgatgatgttcaaatgttacggtttgtgggtatggactatggaatgtgatctttgactttgaataatcaaaagtagaaagaggtggggctttgttaaaggaattggtctttatattgatttggaagctaacatcacgatgtgcgttgaaaatggccttctttgctcgtacatttagaggttgtttgggtttgggacacctccatcggtaagtgttgacgctttttcatagcgccaaatactcaagaagaaccggcgg

SEQ ID NO: 32224 - DNA, 1531 bp, Zea Mays
atggcgtgcggggatggggcagaagaaaaatttagggaaccgctgcggctagcgtcagataccactcctggcgccgctgacttcctcaaccctatgcggccgacgccggcgctcgtcgccggtggacgcatggtaacaagcttcttatccgccactgaatggatgcttccgtctccggccacgcaagtccacaccatctccgtacttccctcccgtcgcgacttcgccttctccaacctcacgatgttgctcaggaatagcggcggcaacgagggagagagtggcagtactaagttccacgtagtacgggacgacctcctccacccgctcgccaacggcaacaaggcgcgcaagctcgacgccctcctgcccatcctccgccgctgcggcgttactgacatcgttacatgtgggggttgccagagcgcccatgccgcagctatcgcggttcactgtgccgaatggggaatcaggccacatatactgctgagaggcgagcaactggatgttcccacagggtataatctcatctcattgatgtttggcaatgtgacatatgtctctcggtctttgtatgcccaaagagacgagatgctttatgagcatgccataaaggttgcaggatatagtggcacagtgatgtgggcagatgaagttataggaaagggtttgggtgtagatgaggacaccactgatggaaatggttcaagaagagtgatgattgttaaggaaggggcaggtgtcatgcggctactgaagtatctttctggtttgacattatttagaaaggatgagaaagttcatatcgtggtagattctggaacaggaacaactgctgtggggttagctcttggagcgactccagtggagggttactgctgttatgcttgctgacacacttgaaggatataaacagcgagagagatctcttttatctgattttgagaaggttttcccggaaatctaccatggaatggtggaagatgctactcatgacaatctagttcaatgggtggagcggttttcacctagaagatttggcaaggtgctggatggtgaaatcgcaatgtgccgccaggtagctcaacagaccggtatcctgctggatcctatgtataccttggctgcctgggagcaagctgttgatatatgctgtggagacagtgaagccaaagtcttgatgatccatacgggtggcacccttggcctttttggattggcacaaaggtattcatcacagttcaacacaggcgaacaaccttaggcatgtgcaatgatgatgttcaaatgttacggtttgtgggtatggactatggaatgtgatctttgactttgaataatcaaaagtagaaagaggtggggctttgttaaaggaattggtctttatattgatttggaagctaacatcacgatgtgcgttgaaaatggccttctttgctcgtacatttagaggttgtttgggtttgggacacctccatcggtaagtgttgacgctttttcatagcgccaaatactcaagaagaaccggcgg

SEQ ID NO: 32225 - DNA, 1603 bp, Zea Mays
aacccagacgcggcgggctcggccgcggcgtgggctggtcctcagtcctcttccgttcttcctcctcgctcccgccccctcgcgcccctcgcctttcagttttggatgccacggaggcctgccagtggtgggccaccgccgtacgcgcgcgacgatgccggtgaagcgttcggcgtccgcgctggcgctcccgccggtcggccgccgcgcgcgggcccgcctctgcatccgcctcgccgcgccgctctccttcctgctcctcttcgtggcgctgttccacgcccagccgctcctgggcgttccgcccgctgcgcagccgccctccgcggggcccggtaaggtcgccttccttttcctcgtccgcgcgggggtgccgctcgacttcctctgggacgccttcttccgcaacggcgaggaggggaagttctcggtgtacgtgcactccgcgccggggttccagctcgaccgcaccaccacgggatccccatacttctatgggcggcaacttgcgaggagcgtcaaggtggtgtggggcgaggccaccatggtggaggcagagaggatgttgtttgccgccgcgcttcaggatcccgcgaaccagcgctttgttttgctctctgatagctgtgtcccactctacaatttcagctccatatatacttacctgatggcttcacctaaaagttttgtagacagctttgttgataagacggagaagcgttataatcaaaacatgtctcctgccattccaaaggataaatggaggaaaggatctcagatggtagtaaccaagagcttgtttagacgaaggccaaatgctagacaactggggttcacctttcggagaaagcagatactgaaaggagtagctcaacaggagcatgattgtattccggatgaacattatgtgcagacattattttctatcaaaggacttgaagatgaactggagagaagaactttgacctatacctcgtggaaccaatcatcaaatccgaaagacaaaatgacttggcatcctatgaaatttgagtatgatacatctagccctgagcatatcaatgctatcaagagaattgatcatgtcaactatcaaatggagcacaggacagagtggtgccaatgcaatgcggtagctacagagacatggagtatcagagtattgacagcgaccagaatgcgcttagacagctaaggacttgaagagagttgatgcacaaactacagagcctcggttttgaagtttgtcagctctatcagtatgcgatttccaggggacagatggtagtgaaggacagagtacacacaacccttaccctaacaggacaggaaagttataacaatagcttgattttccttataaatattcttccccttgtatgattaaagaatagatagttttttttacttgcatacaggttatcagacatagcgaatagggaaacatgcaagaagatacatgtgtccataggacctactgtttagaacattggtcacattggcaagaagataagctgccttttcatgatctgcagctacaacatagcaatctgggctccaccaattttgaatcgacgtctatataaactgccttttcatgacc

SEQ ID NO: 32226 - DNA, 1282 bp, Zea Mays
tcttgatggatttaacagtaagctttaaaagatgtttggtaatggtaattgacctagtcatatgcaattggacgtcctcctgttctgctgctgtgtcccactctacaatttcagctccatatatacttacctgatggcttcacctaaaagttttgtagacagctttgttgataagacggagaagcgttataatcaaaacatgtctcctgccattccaaaggataaatggaggaaaggatctcagatggtagtaaccaagagcttgtttagacgaaggccaaatgctagacaactggggttcacctttcggagaaagcagatactgaaaggagtagctcaacaggagcatgattgtattccggatgaacattatgtgcagacattattttctatcaaaggacttgaagatgaactggagagaagaactttgacctatacctcgtggaaccaatcatcaaatccgaaagacaaaatgacttggcatcctatgaaatttgagtatgatacatctagccctgagcatatcaatgctatcaagagaattgatcatgtcaactatcaaatggagcacaggacagagtggtgccaatgcaatggtacctcggccccatgttttttatttgccaggaagttctcctatagtgcggccatgcatcttttggaacaaggagccattggcacaccgaaatctgctcagctgatgattaacttttaacaaaattgtttacacaagtctgcgctcacttttttgatgggtcattataccgttcacaatttcaccagcctcaatgggagctgtacattagcagcggtagctacagagacatggagtatcagagtattgacagcgaccagaatgcgcttagacagctaaggacttgaagagagttgatgcacaaactacagagcctcggttttgaagtttgtcagctctatcagtatgcgatttccaggggacagatggtagtgaaggacagagtacacacaacccttaccctaacaggacaggaaagttataacaatagcttgattttccttataaatattcttccccttgtatgattaaagaatagatagttttttttacttgcatacaggttatcagacatagcgaatagggaaacatgcaagaagatacatgtgtccataggacctactgtttagaacattggtcacattggcaagaagataagctgccttttcatgatctgcagctacaacatagcaatctgggctccaccaattttgaatcgacgtctatataaactgccttttcatgacc

SEQ ID NO: 32227 - DNA, 4498 bp, Zea Mays
tctaggttaacaagtgcggaaaacttgaaacttggcttgaagacatgtgggcttgtatgaagcagttcaaagatgcagtctgtggtgtgatgaatgagccaggccctattgcaactaaactacttgctctaaagtttgtggaaacatggattttgtgttgcacacctcaagccaacagtgaccaagtacagccaactgagggtaccattttccagtttaaagttaacaagtgaatgggcaatatttttttgaaagagaatgactttcacattgacaagtacaccttacatacaggaaaaaactggagatttgatacttcacgatcatctcaatttcatcctagccttgatcctgctattttggaagctgatgcacatcgagctctcctcctcctcctggatattctgcgaacagcttatgcccatcgagggtccttcctagttggcaccatcaactctcttgcagcagttgtaaagatccgaccgatttactatgaccgcgtgttgccagttttgcttgattttgaccctggcttggagactgcaaagggggcacattcagcaagcctgcggtatgctgtaagagcagcttttttggggtttctacggagtccccaccaggcaatgattgagtctaaagacatattggtaaggcggctgcgtgttctcagccctggtgaggcaatggaacaaaatattaggcaggcagagaagatgtctagaaatatagagcgtgcttctcgtgctagcaaggatgagtctacatcatgggagatgccttatggagatataaatcggaagaaacctgctgttcgatcaagtgatacttttactacgtctgatggcatagctaagagagcaagatttgacatgtctgccacttcaaacctgccagttctgggattgtctgattattctgatatgcaggctgacaatgatgccagtgtgggtcattcatccgatccagctatattgaataatgaagtgtctcctgtcgagaagatgattgaaatgattggcgctttgcttgctgaaggagaaagaggagctgaatccttgggtattcttgtctcaacagtagaggcagatgtcatggccgacattgtgatagaaacaatgaaacatctaccggaagcttcatttcatttagcaacaaataacggtgtccagcaactgaattttaaatattcctctggtctcgtaacacaaaaccttccagccaattcagactccacactattcactgcacaatctacacccacagcagatggagtcagcatctcaccatctgatgcctttgttatgactagcgttcatgatgctaagcgtgatccaagaagggaccctcgtcgcctcgatccgcgtcggatagtttcatcttctgctgtaaattcgatacaggtgaagatggaaaccaatagtgtgcatcaaacagataatttgtcgaacacactctactccaattctcggaaggctgaaaactattcagactatcaaggagatttacacaaaaatgaaggtgaacagcagtcagcttctcaacctaatcaaacaattgccaaagacaagttggagcttctggatgttgtcactgaaccggagccaacatttgaagtcgaggcaccagtggatgtcaggattcattcttctgatgttgatgaagatatagtgaaacccatgtcttcagtggttaattcacttgacgaatccgatagcatggatttagaggttgacccctttttaccagctccaaaggcaccaacaccagacgacaccaatgatgacttgccaattattacatctcagttggaattaagtgaaaaagggaaaatctcaattaacaaactagccattggccggatacttgatgattacaagaaaaatagtttcaatgccagattttctttgcttgctcatttgatcgcgcagagtgctgctgatgataacattatggatttgattcagaggcacattatctttcactcacatgatcaggaggggtatgaactggcaatgcatgtgttgtatcagctgcagagtatcagtgttgctaattcaccagaaagctctacctccacctctaaacattacgagaagttctttatatcacttgcgaggtccttgattgattcactgcctgcttcagacaaatcttttagcaaacttttatgcgatgcaccatatctacctgagtctttgtttagattactggaggatctttgcatgtcagaagacaacagccaacaattaaaggatggagatggggaccgtgttacccaaggcctgggaactgtatggagccttatcttgggtcggcctccgcttcgccatgtttgcttggatattgctctgaagtgtgctgcccactctcaagatgaagtcaggggaaaagcagttagattggttgcaaaaaggctctatgatctaacatatgcaacagaaaaaatagagcagtttgccatagagagccttgtgggagttgctaatgagcatactgtggacacagatattaattcgaaatctttgaaagaatcgacagctgagattgaggtaggtagtcagggaacttcagtaagtggctcccagatcccagatactgagttctctgaaaatgggccattcaagacatcatcggtttctacaaaacagtcagcagtatctgtatctgaggcaaagcggcgtacttctttgttctttgcactttgcaccaagagatctagtcttcttcaacatctgttcaatgcttatggaaggtccccaaaagttgtcaagcagtgtatccattggcatatgcccaaccttataagaaatctggggccctcgtgtcctgaattgctgaacattattcataatccacctgaaggcagtgaacatcttattaccttgacactgcaaacattgactgaagattcaaatccctcagctgacctagttgctgctgttaaacaattatataataccaagctgaaggatgcatctattctgattcccttactgccttcatttccaaaggaggaggtattgcctatatttcctaggctagttgatctcccgcttgagagattccaagacgtacttgctcggatattgcagggaactgctcatactggtccagcattgactcctgctgaagttctcattgcaattcatgatattaaccctgaaaaagataaagttgccctaaaaaaggtcacggatgcttgcacggcttgctttgagcaacgcacggtatttactcagcaggttttggagaagtcacttaatcaattggttgacagaataccaattcctcttctttttatgagaacagttattcaagcgcttgatgcttttcctgctttggttgattttgtcatgggaatactctccaggctcatcgataaacagatatggaaaatgccgaagctctgggttgggtttttaaaattgtcattccagactcagccacgttcttttgatgtcttattacagctacctccaccacaacttgaatttatgttgaataaatatcccaatcttcggacacctctttcttcctttgttaatcagcggaatatgcataacaccttgcccagattttgaacattctgggtatttttagtgaaacacagcaggcaccgatggcatttgtgacagctacattacaaacagcggatgcaaccacctctcttcctggtgcaactctgatgtgaatatactgtggaagccatcagatgcaagaaaggtcgatgcacatacagatctttgtagacattagtacgcagaacagacagatctgtgtcaatgaagattgccgcccctctgatgtatactattttgcaatgacgggttgattataagctactccgcatggagaaagagatgttgacagaagccaccgaggtgattgtatggcgtgagatcctgtctgtcctggagattggagagtttgctccagcggaacggaagtcatccaacttgtatagtagctttactgctgtggcaaaatgtagtcccgtcgtcgtggtcctgggagtctggcccttgcaggcagagacgaagaagacgcaaggaggatgattacaggaaagtccatattaccccatcttaactgttttcctaagtcagattacagctgctgcattccttttatagggagcaggcatttgaccgatttagtctaaccattgttgtaacaacttctgtacattagttaattgagttttgctactagtgttagcaaacacataatcgctgtcgttagcaatttcctgcggtgacctggtaatcaaggaaaatattttacatcgggtcaatgcatcatatttgtttatttctttgatttcattttccggtaggtttcattggagtttgtaatgatccaaatgaccattagtaagttaataataagcattacgcgagctacatctactggacgtgaatagcatttaatgtgctgtttggtttatatatttgtaacgtaataagtaattgataatgttaaactatgtttgaagtcc

SEQ ID NO: 32228 - DNA, 4288 bp, Zea Mays
gttaacaagtgcggaaaacttgaaacttggcttgaagacatgtgggcttgtatgaagcagttcaaagatgcagtctgtggtgtgatgaatgagccaggccctattgcaactaaactacttgctctaaagtttgtggaaacatggattttgtgttgcacacctcaagccaacagtgaccaagtacagccaactgagggaaaaaactggagatttgatacttcacgatcatctcaatttcatcctagccttgatcctgctattttggaagctgatgcacatcgagctctcctcctcctcctggatattctgcgaacagcttatgcccatcgagggtccttcctagttggcaccatcaactctcttgcagcagttgtaaagatccgaccgatttactatgaccgcgtgttgccagttttgcttgattttgaccctggcttggagactgcaaagggggcacattcagcaagcctgcggtatgctgtaagagcagcttttttggggtttctacggagtccccaccaggcaatgattgagtctaaagacatattggtaaggcggctgcgtgttctcagccctggtgaggcaatggaacaaaatattaggcaggcagagaagatgtctagaaatatagagcgtgcttctcgtgctagcaaggatgagtctacatcatgggagatgccttatggagatataaatcggaagaaacctgctgttcgatcaagtgatacttttactacgtctgatggcatagctaagagagcaagatttgacatgtctgccacttcaaacctgccagttctgggattgtctgattattctgatatgcaggctgacaatgatgccagtgtgggtcattcatccgatccagctatattgaataatgaagtgtctcctgtcgagaagatgattgaaatgattggcgctttgcttgctgaaggagaaagaggagctgaatccttgggtattcttgtctcaacagtagaggcagatgtcatggccgacattgtgatagaaacaatgaaacatctaccggaagcttcatttcatttagcaacaaataacggtgtccagcaactgaattttaaatattcctctggtctcgtaacacaaaaccttccagccaattcagactccacactattcactgcacaatctacacccacagcagatggagtcagcatctcaccatctgatgcctttgttatgactagcgttcatgatgctaagcgtgatccaagaagggaccctcgtcgcctcgatccgcgtcggatagtttcatcttctgctgtaaattcgatacaggtgaagatggaaaccaatagtgtgcatcaaacagataatttgtcgaacacactctactccaattctcggaaggctgaaaactattcagactatcaaggagatttacacaaaaatgaaggtgaacagcagtcagcttctcaacctaatcaaacaattgccaaagacaagttggagcttctggatgttgtcactgaaccggagccaacatttgaagtcgaggcaccagtggatgtcaggattcattcttctgatgttgatgaagatatagtgaaacccatgtcttcagtggttaattcacttgacgaatccgatagcatggatttagaggttgacccctttttaccagctccaaaggcaccaacaccagacgacaccaatgatgacttgccaattattacatctcagttggaattaagtgaaaaagggaaaatctcaattaacaaactagccattggccggatacttgatgattacaagaaaaatagtttcaatgccagattttctttgcttgctcatttgatcgcgcagagtgctgctgatgataacattatggatttgattcagaggcacattatctttcactcacatgatcaggaggggtatgaactggcaatgcatgtgttgtatcagctgcagagtatcagtgttgctaattcaccagaaagctctacctccacctctaaacattacgagaagttctttatatcacttgcgaggtccttgattgattcactgcctgcttcagacaaatcttttagcaaacttttatgcgatgcaccatatctacctgagtctttgtttagattactggaggatctttgcatgtcagaagacaacagccaacaattaaaggatggagatggggaccgtgttacccaaggcctgggaactgtatggagccttatcttgggtcggcctccgcttcgccatgtttgcttggatattgctctgaagtgtgctgcccactctcaagatgaagtcaggggaaaagcagttagattggttgcaaaaaggctctatgatctaacatatgcaacagaaaaaatagagcagtttgccatagagagccttgtgggagttgctaatgagcatactgtggacacagatattaattcgaaatctttgaaagaatcgacagctgagattgaggtaggtagtcagggaacttcagtaagtggctcccagatcccagatactgagttctctgaaaatgggccattcaagacatcatcggtttctacaaaacagtcagcagtatctgtatctgaggcaaagcggcgtacttctttgttctttgcactttgcaccaagagatctagtcttcttcaacatctgttcaatgcttatggaaggtccccaaaagttgtcaagcagtgtatccattggcatatgcccaaccttataagaaatctggggccctcgtgtcctgaattgctgaacattattcataatccacctgaaggcagtgaacatcttattaccttgacactgcaaacattgactgaagattcaaatccctcagctgacctagttgctgctgttaaacaattatataataccaagctgaaggatgcatctattctgattcccttactgccttcatttccaaaggaggaggtattgcctatatttcctaggctagttgatctcccgcttgagagattccaagacgtacttgctcggatattgcagggaactgctcatactggtccagcattgactcctgctgaagttctcattgcaattcatgatattaaccctgaaaaagataaagttgccctaaaaaaggtcacggatgcttgcacggcttgctttgagcaacgcacggtatttactcagcaggttttggagaagtcacttaatcaattggttgacagaataccaattcctcttctttttatgagaacagttattcaagcgcttgatgcttttcctgctttggttgattttgtcatgggaatactctccaggctcatcgataaacagatatggaaaatgccgaagctctgggttgggtttttaaaattgtcattccagactcagccacgttcttttgatgtcttattacagctacctccaccacaacttgaatttatgttgaataaatatcccaatcttcggacacctctttcttcctttgttaatcagcggaatatgcataacaccttgcccagacagattttgaacattctgggtatttttagtgaaacacagcaggcaccgatggcatttgtgacagctacattacaaacagcggatgcaaccacctctcttcctggtgcaactctgatgtgaatatactgtggaagccatcagatgcaagaaagctactccgcatggagaaagagatgttgacagaagccaccgaggtgattgtatggcgtgagatcctgtctgtcctggagattggagagtttgctccagcggaacggaagtcatccaacttgtatagtagctttactgctgtggcaaaatgtagtcccgtcgtcgtggtcctgggagtctggcccttgcaggcagagacgaagaagacgcaaggaggatgattacaggaaagtccatattaccccatcttaactgttttcctaagtcagattacagctgctgcattccttttatagggagcaggcatttgaccgatttagtctaaccattgttgtaacaacttctgtacattagttaattgagttttgctactagtgttagcaaacacataatcgctgtcgttagcaatttcctgcggtgacctggtaatcaaggaaaatattttacatcgggtcaatgcatcatatttgtttatttctttgatttcattttccggtaggtttcattggagtttgtaatgatccaaatgaccattagtaagttaataataagcattacgcgagctacatctactggacgtgaatagcatttaatgtgctgtttggtttatatatttgtaacgtaataagtaattgataatgttaaactatgtttgaagtcc

SEQ ID NO: 32229 - DNA, 857 bp, Zea Mays
tcaggtagaagttaaataataaaatagaattaaaacaaatcatgtatcatttcaaaattacaagtaataagactaaagcaaaccatatatacgcacaaagaatttaataccttttagagttggtaccggatcccaagagggaggttcaccttccccaactataattggtgttgtagggatctatatataacaactcaaataaagagctagcatacatgatcataaaatatacacttaattctggaagaaaacacatgaatctagacacacaaatgaattgcttactacttgctactaaataccccgatggtgaaggcactggtcgtggttgccatcctgaatcacaggccgcaaactactgggataaacgacgaccgggctgcgtgttttattttcagttggccattctggatcgttcggcgctcaatggattcgctcaagcagggtaggagtattgctgtagcccggtcctgactcagatctcggcaattcatgtcgtaagtgtgtggtgtccaccgcggccgcacgagaactccgcggggtcggacgcagaagagctgccggcggcgaacagcctggcgaacagggaccacatggccgatgtggacttgcgccccagcgcggaggcggcagcggcggacgcctcgagatcgtggaggcgctcgcgcaggcacgcgacgcagaagtaacgcgtaacgcgaggataggaagagagggcagcgtcttaccagtgagaaggcaatggggagggtcgtcgtcggcgctgcgcgcggccgcttattcgcctcccgcgccgccagcattgcgctgtctcgcatcacagcagggttcaatccagaagggatgagaccaggatt

SEQ ID NO: 32230 - DNA, 1497 bp, Zea Mays
gtggctaactctggcagtggaactgtcatgggcaatatcttcgaaacctacttatatgtttgctaaattgaaattaattaatagcaacaatttgatagctgggctgtcggcccaacctgacctaaattcctaagctaataagcccagtatgacaatcccagcccgtcccgcggcatcccaaaggtccaaatcattctccgaggagctgcggcgctgcggcgacggcggcagcgacggcgatgcggttgccatctgccgcctcggcgtcccgccttccctcttcccttttcttacaaccccgcgcaaggacaagatgcgtcccatcctcctccctcgcctgtcgggcatcttcttcatcagccgcgggcgctggtgacggcggctcgcggaagccgtggctcttcgtagggctgggtaaccccggaaaggtgtaccagggaactcgccacaacgttggattcgagatgatcgatgttatagcagaagctgagggtatatctctgagcagtatgcagttcaaggcaatggttggaaaaggccgcattggtgatgcatctattatgcttgccaagccacaaacctttatgaatgcaagcggtcgggcagctggtttcatatttcaagataccacttagtcaagtcgttgtgatgtatgatgatctggatttaccctttgcaaaactgcgtctgctgccaaagggtggccatggtgggcataatgggatgagaagcatcgtcaaccatttgaaacagagccgtgattttccacgcctaagaattggcattggacgaccgcccgggaagatggatcctgccaatttcgttctccggccttttaacaagaaagagcagcaagagcttgattttgcgttgcataggggcttggaggcggtgcggataatggtgccggaaggattcaacaagagcgcgacttacgtgaacactgcacaatcatctgaaatgctgaataggtgatgggccaataaactgccatatgcgatttaaatcccataccaaagggatttaatcgaggaagcagtcgcagcttcgcttgatgcatcgtttgttcggtggccatcccccctctcctggcaagaaagttctgacagctgaattacttgttagatcatactgtatgatctgagcaacttagggggtgtttggtttgagaaatcattccatctaagatgagatggtgcatcacgaatcaattcctcaaatttggtggaatgacctcattcctcatgttattactaactaattaactataaagaatgaggtggtgattgatcaactcattccattatacaaactaaacaaaaaagtgaggaataagtgatggtggactagtttattcctcaaaacaaacatcctattaaatactgacaccattctacgcaccccacaccttaaaaatccggcacgctgcttagtgccttagtttcagcttccacgtacttattgtttttatccatgcttgcatattgtctgctctca

SEQ ID NO: 32231 - DNA, 1412 bp, Zea Mays
gtggctaactctggcagtggaactgtcatgggcaatatcttcgaaacctacttatatgtttgctaaattgaaattaattaatagcaacaatttgatagctgggctgtcggcccaacctgacctaaattcctaagctaataagcccagtatgacaatcccagcccgtcccgcggcatcccaaaggtccaaatcattctccgaggagctgcggcgctgcggcgacggcggcagcgacggcgatgcggttgccatctgccgcctcggcgtcccgccttccctcttcccttttcttacaaccccgcgcaaggacaagatgcgtcccatcctcctccctcgcctgtcgggcatcttcttcatcagccgcgggcgctggtgacggcggctcgcggaagccgtggctcttcgtagggctgggtaaccccggaaaggtgtaccagggaactcgccacaacgccgcattggtgatgcatctattatgcttgccaagccacaaacctttatgaatgcaagcggtcgggcagctggtttcatatttcaagataccacttagtcaagtcgttgtgatgtatgatgatctggatttaccctttgcaaaactgcgtctgctgccaaagggtggccatggtgggcataatgggatgagaagcatcgtcaaccatttgaaacagagccgtgattttccacgcctaagaattggcattggacgaccgcccgggaagatggatcctgccaatttcgttctccggccttttaacaagaaagagcagcaagagcttgattttgcgttgcataggggcttggaggcggtgcggataatggtgccggaaggattcaacaagagcgcgacttacgtgaacactgcacaatcatctgaaatgctgaataggtgatgggccaataaactgccatatgcgatttaaatcccataccaaagggatttaatcgaggaagcagtcgcagcttcgcttgatgcatcgtttgttcggtggccatcccccctctcctggcaagaaagttctgacagctgaattacttgttagatcatactgtatgatctgagcaacttagggggtgtttggtttgagaaatcattccatctaagatgagatggtgcatcacgaatcaattcctcaaatttggtggaatgacctcattcctcatgttattactaactaattaactataaagaatgaggtggtgattgatcaactcattccattatacaaactaaacaaaaaagtgaggaataagtgatggtggactagtttattcctcaaaacaaacatcctattaaatactgacaccattctacgcaccccacaccttaaaaatccggcacgctgcttagtgccttagtttcagcttccacgtacttattgtttttatccatgcttgcatattgtctgctctca

SEQ ID NO: 32232 - DNA, 1488 bp, Zea Mays
gtggctaactctggcagtggaactgtcatgggcaatatcttcgaaacctacttatatgtttgctaaattgaaattaattaatagcaacaatttgatagctgggctgtcggcccaacctgacctaaattcctaagctaataagcccagtatgacaatcccagcccgtcccgcggcatcccaaaggtccaaatcattctccgaggagctgcggcgctgcggcgacggcggcagcgacggcgatgcggttgccatctgccgcctcggcgtcccgccttccctcttcccttttcttacaaccccgcgcaaggacaagatgcgtcccatcctcctccctcgcctgtcgggcatcttcttcatcagccgcgggcgctggtgacggcggctcgcggaagccgtggctcttcgtagggctgggtaaccccggaaaggtgtaccagggaactcgccacaacgttggattcgagatgatcgatgttatagcagaagctgagggtatatctctgagcagtatgcagttcaaggcaatggttggaaaaggccgcattggtgatgcatctattatgcttgccaagccacaaacctttatgaatgcaagcgctggtttcatatttcaagataccacttagtcaagtcgttgtgatgtatgatgatctggatttaccctttgcaaaactgcgtctgctgccaaagggtggccatggtgggcataatgggatgagaagcatcgtcaaccatttgaaacagagccgtgattttccacgcctaagaattggcattggacgaccgcccgggaagatggatcctgccaatttcgttctccggccttttaacaagaaagagcagcaagagcttgattttgcgttgcataggggcttggaggcggtgcggataatggtgccggaaggattcaacaagagcgcgacttacgtgaacactgcacaatcatctgaaatgctgaataggtgatgggccaataaactgccatatgcgatttaaatcccataccaaagggatttaatcgaggaagcagtcgcagcttcgcttgatgcatcgtttgttcggtggccatcccccctctcctggcaagaaagttctgacagctgaattacttgttagatcatactgtatgatctgagcaacttagggggtgtttggtttgagaaatcattccatctaagatgagatggtgcatcacgaatcaattcctcaaatttggtggaatgacctcattcctcatgttattactaactaattaactataaagaatgaggtggtgattgatcaactcattccattatacaaactaaacaaaaaagtgaggaataagtgatggtggactagtttattcctcaaaacaaacatcctattaaatactgacaccattctacgcaccccacaccttaaaaatccggcacgctgcttagtgccttagtttcagcttccacgtacttattgtttttatccatgcttgcatattgtctgctctca

SEQ ID NO: 32233 - DNA, 1553 bp, Zea Mays
gtggctaactctggcagtggaactgtcatgggcaatatcttcgaaacctacttatatgtttgctaaattgaaattaattaatagcaacaatttgatagctgggctgtcggcccaacctgacctaaattcctaagctaataagcccagtatgacaatcccagcccgtcccgcggcatcccaaaggtccaaatcattctccgaggagctgcggcgctgcggcgacggcggcagcgacggcgatgcggttgccatctgccgcctcggcgtcccgccttccctcttcccttttcttacaaccccgcgcaaggacaagatgcgtcccatcctcctccctcgcctgtcgggcatcttcttcatcagccgcgggcgctggtgacggcggctcgcggaagccgtggctcttcgtagggctgggtaaccccggaaaggtgtaccagggaactcgccacaacgttggattcgagatgatcgatgttatagcagaagctgagggtatatctctgagcagtatgcagttcaaggcaatggttggaaaaggccgcattggtgatgcatctattatgcttgccaagccacaaacctttatgaatgcaagcggtcgggcagctggtttcatatttcaagataccacttagtcaagtcgttgtgatgtatgatgatctggatttaccctttgcaaaactgcgtctgctgccaaagggtggccatggtgggcataatgggagaacatgatgagttagctgatttagcttcagtccgacagggccccgaagaattggatgagaagcatcgtcaaccatttgaaacagagccgtgattttccacgcctaagaattggcattggacgaccgcccgggaagatggatcctgccaatttcgttctccggccttttaacaagaaagagcagcaagagcttgattttgcgttgcataggggcttggaggcggtgcggataatggtgccggaaggattcaacaagagcgcgacttacgtgaacactgcacaatcatctgaaatgctgaataggtgatgggccaataaactgccatatgcgatttaaatcccataccaaagggatttaatcgaggaagcagtcgcagcttcgcttgatgcatcgtttgttcggtggccatcccccctctcctggcaagaaagttctgacagctgaattacttgttagatcatactgtatgatctgagcaacttagggggtgtttggtttgagaaatcattccatctaagatgagatggtgcatcacgaatcaattcctcaaatttggtggaatgacctcattcctcatgttattactaactaattaactataaagaatgaggtggtgattgatcaactcattccattatacaaactaaacaaaaaagtgaggaataagtgatggtggactagtttattcctcaaaacaaacatcctattaaatactgacaccattctacgcaccccacaccttaaaaatccggcacgctgcttagtgccttagtttcagcttccacgtacttattgtttttatccatgcttgcatattgtctgctctca

SEQ ID NO: 32234 - DNA, 3053 bp, Zea Mays
tccagatcggctgacagacacgacaccgcctctccaaaaaaaagcctaaaccctcctcgacgtcaccagcgtccgcccctatcgccccccttcggccttccccactgtactctccaatctcgccgccaagcctcaccgcaccatggcgaccttcaccgcggcctcctccctctccctcctcttctcccacccgcactcccactcccgccaaccatccgcccaggggcccaccgccagctcccacctccacctgcatccgcgcgccagccgcgcgcgctgcgcctcttccgacacgacggccacgaagcaccgccgcccagcggaggagaacatccgcgaggaggcggcgcggctccgaggcccggcccagggtttctctgcgtggtacgagcccttcccgccggcgcccggcggcgacccgaacgagcgctactcgctggacgaggtcgtctaccgctccagctcggggggcctcctcgacgtgcgccacgacatggaggcgctggcccgctacccggggtcctactggcgtgacctcttcgactcccgcgtcggccgcaccgcctggccctacggctcgggcgtctggtccaagaaggagttcgtgctccccgagatcgactccgaccacatcgtctccctcttcgagggcaactccaacctcttctgggcggagcgcctcggccgcgagcacctcggcgggatgaacgacctctgggtcaagcactgtggcatctcccacacgggctccttcaaggacctcggcatgacggtgctcgtcagccaggtgaaccgcctccgccgcgcgccgctctcgcgccccatcgccggtgtcggctgcgcgtccacgggagacacctccgccgcgctctcggcctactgcgcagccgcgggaatccccgccatcgtgttcctgccagcggaccgcatctcgctgcagcagctcatccagccgatcgccaacggcgccaccgtgctctctctagacactgattttgatggctgcatgcggctcattcgcgaggtcactgcagagctgccaatctaccttgccaattcgctcaacccgctccgccttgaggggcagaagacagcggccatcgagatattgcagcagttcaattggcaggtgccagattgggtcattgttccaggaggcaatcttgggaatatctatgcattctacaaggggtttgagatgtgccgcgttcttggacttgttgatcgcgtgccacggcttgtctgcgcacaggctgcaaatgcaaatccattgtaccggtactacaagtcaggttggactgagtttgagccacaaactgccgagactacatttgcatctgcgatacagattggtgatcctgtatctgttgaccgtgcggtggtcgcgctgaaggccactgacggtattgtggaggaggctacagaggaggagctaatggatgcaacggcgcttgctgaccgcactgggatgtttgcttgcccacatactggggttgcacttgctgctttgtttaagcttcagggtcagcgtataattggccctaatgaccgcactgtggttgttagcacagctcatgggctgaagttcacgcagtcaaagattgactaccatgacaaaaacatcaaagacatggtttgccagtatgctaatccaccgatcagtgtgaaggctgactttggttctgtgatggatgttctccagaaaaatctcaatggtaagatataaagttatatgattaattaaccctccaaactgtttttttttgttttttcgttccaggaattttattcctgagtctttcaactttgtttggtgaacatggtatggtgctaaaatctagacctaataccttgtagtactagttctggaggctcttttggttgtaggtcgaagtggatagagctgttccttgtactttatctgtttcatgtaatatgaataataaattatggtctaaatatttgaataaaaaatcgtttggaatgacccacacaggattgtgccgttctgcaacttggtgttctcttctgtatagttttcattgaccttaggcgattcatactgccaatacttgaagtaaaagatggaatttaacatgcagtatcattatctgttttgctgctttctggagtcacaagttaattatggtctaaatccatcatagctcaaaatgtacctgatgtttttgtaacggaaaagttctagccaaataccaaaaatgttattgtgcctcatgatcttttctagctttgctggatcgtcttagaagccaattatgtagtgatctgcttgagttgtttgctctagcctttccattaagtccatagcattggactgcacattagatttactccctgtgcaatttgttttagttaatgaaattggcctttgagtgattacgatagtatagtggaacctttccatttagtccatagcattcgactgggtgttagattactcgtgtgcattttgctttagttattggaattggcctttgagtgattatgataatatagtcaagccttttcatttagtccatcgcactggaccgggcattagatttaggccccgtttggtttgagggactaaattagtccctccattttaatcatatttaatccctaaattaccaaacggttggactaaaaccgggactaaactgttttagtctctaatccttcaaggggtgactaaaagggactaaaccatataaattttactttttgtccctcttttatttcagtttcactaatggcgggagaatgctaaggggtattttggtccttttatgattcatttaatgtgttttgaatagttttagtttctagaaccaaacaggatagagactaaactttagtgttgttggggtcgtgcttcggtacgtcgaaggtctcacacgaagaagcagcttcggccaaagtcgtttctaagagatggccgaaggtcccttttcatggagcttcggcgttttaaaccgacatagaggcagaatgacctttttatacatgtatgtccgagtcaatgttgtaaacttccgcaaggggcataattg

SEQ ID NO: 32235 - DNA, 2000 bp, Zea Mays
accgcctctccaaaaaaaagcctaaaccctcctcgacgtcaccagcgtccgcccctatcgccccccttcggccttccccactgtactctccaatctcgccgccaagcctcaccgcaccatggcgaccttcaccgcggcctcctccctctccctcctcttctcccacccgcactcccactcccgccaaccatccgcccaggggcccaccgccagctcccacctccacctgcatccgcgcgccagccgcgcgcgctgcgcctcttccgacacgacggccacgaagcaccgccgcccagcggaggagaacatccgcgaggaggcggcgcggctccgaggcccggcccagggtttctctgcgtggtacgagcccttcccgccggcgcccggcggcgacccgaacgagcgctactcgctggacgaggtcgtctaccgctccagctcggggggcctcctcgacgtgcgccacgacatggaggcgctggcccgctacccggggtcctactggcgtgacctcttcgactcccgcgtcggccgcaccgcctggccctacggctcgggcgtctggtccaagaaggagttcgtgctccccgagatcgactccgaccacatcgtctccctcttcgagggcaactccaacctcttctgggcggagcgcctcggccgcgagcacctcggcgggatgaacgacctctgggtcaagcactgtggcatctcccacacgggctccttcaaggacctcggcatgacggtgctcgtcagccaggtgaaccgcctccgccgcgcgccgctctcgcgccccatcgccggtgtcggctgcgcgtccacgggagacacctccgccgcgctctcggcctactgcgcagccgcgggaatccccgccatcgtgttcctgccagcggaccgcatctcgctgcagcagctcatccagccgatcgccaacggcgccaccgtgctctctctagacactgattttgatggctgcatgcggctcattcgcgaggtcactgcagagctgccaatctaccttgccaattcgctcaacccgctccgccttgaggggcagaagacagcggccatcgagatattgcagcagttcaattggcaggtgccagattgggtcattgttccaggaggcaatcttgggaatatctatgcattctacaaggggtttgagatgtgccgcgttcttggacttgttgatcgcgtgccacggcttgtctgcgcacaggctgcaaatgcaaatccattgtaccggtactacaagtcaggttggactgagtttgagccacaaactgccgagactacatttgcatctgcgatacagattggtgatcctgtatctgttgaccgtgcggtggtcgcgctgaaggccactgacggtattgtggaggaggctacagaggaggagctaatggatgcaacggcgcttgctgaccgcactgggatgtttgcttgcccacatactggggttgcacttgctgctttgtttaagcttcagggtcagcgtataattggccctaatgaccgcactgtggttgttagcacagctcatgggctgaagttcacgcagtcaaagattgactaccatgacaaaaacatcaaagacatggtttgccagtatgctaatccaccgatcagtgtgaaggctgactttggttctgtgatggatgttctccagaaaaatctcaatgtttcactaatggcgggagaatgctaaggggtattttggtccttttatgattcatttaatgtgttttgaatagttttagtttctagaaccaaacaggatagagactaaactttagtgttgttggggtcgtgcttcggtacgtcgaaggtctcacacgaagaagcagcttcggccaaagtcgtttctaagagatggccgaaggtcccttttcatggagcttcggcgttttaaaccgacatagaggcagaatgacctttttatacatgtatgtccgagtcaatgttgtaaacttccgcaaggggcataattg

SEQ ID NO: 32236 - DNA, 1003 bp, Zea Mays
cttcgtcaccggtgggatcggcgccgacgtgtggtgcgcacccggcatacccttcgcggcggaggcgtcctccgtgaactgcgtggtggcgcgccaccagatggtggggaggggcggccgcggcgccgagggggacaggtcccacagagagaggccgtgcttgtcccggagggtgaccgtgcaggagcagatatcctcgtccttcatggactcgccgccgccgccgcacctcgatgcccccttattcggcgccgatctcatcccctccggccgcctccgccggatgcgcgggtggcgccactcccccggaggactcgaggaagagataaggatgtttcagacaagagtgttactgggaggaatgaacatgtatgaccgctaccaggattggcgccttgacgttgataacatgacatacgaggagttgctcgagcttggagacaaaattggatatgtcaacacagggttacgtgacgacgagattactcgcaaccttcggaaggtcaagcacccatccttcagttccttacggttcgcaacagaaatggaaagaaaatgcagcatttgccaagaagaatttgaaacaaatgaagagatgggaaggctagactgtggccatagctaccatgtgtactgcatcaagcagtggctctcgcagaagaacatttgcccagtttgcaagactgccgtcagcaagaattgaaatccaaactccagtcacgctgtctgtagatctcggtgaaaacagcaaattctgttgtcctgtacagtccgttatatatattattattgtatgaacacaatccatttgtttcatcttgcagaaagaaaatgccatgttttggtcatgttccagcaaactacagacttgataccctcttatcttagagtgattaggaaaaggttttgcagtaacagataggatgaacctctttcataatgtatctaggctctatttagattttgtggtctttaacctatttagattccatggtcttagcta

SEQ ID NO: 32237 - DNA, 930 bp, Zea Mays
gaactgcgtggtggcgcgccaccagatggtggggaggggcggccgcggcgccgagggggacaggtcccacagagagagaggccgtgcttgtcccggagggtgaccgtgcaggagcagatatcctcgtccttcatggactcgccgccgccgccgcacctcgatgcccccttattcggcgccgatctcatcccctccggccgcctccgccggatgcgcgggtggcgccactcccccggaggactcgaggaagagataaggatgtttcagacaagagtgttactgggaggaatgaacatgtatgaccgctaccaggattggcgccttgacgttgataacatgacatacgaggagttgctcgagcttggagacaaaattggatatgtcaacacagggttacgtgacgacgagattactcgcaaccttcggaaggtcaagcacccatccttcagttccttacggttcgcaacagaaatggaaagaaaatgcagcatttgccaagaagaatttgaaacaaatgaagagatgggaaggctagactgtggccatagctaccatgtgtactgcatcaagcagtggctctcgcagaagaacatttgcccagtttgcaagactgccgtcagcaagaattgaaatccaaactccagtcacgctgtctgtagatctcggtgaaaacagcaaattctgttgtcctgtacagtccgttatatatattattattgtatgaacacaatccatttgtttcatcttgcagaaagaaaatgccatgttttggtcatgttccagcaaactacagacttgataccctcttatcttagagtgattaggaaaaggttttgcagtaacagataggatgaacctctttcataatgtatctaggctctatttagattttgtggtctttaacctatttagattccatggtcttagcta

SEQ ID NO: 32238 - DNA, 1313 bp, Zea Mays
gctttttcatactgtcaaattcattactttggactccattccgtcgaatccacgaagaatccacgaatgtggtgttatggcaaatttctcgctactaatagtcaaacaaagcatcccagctgatcaacgccaccgccagacagcaacacactgcacacacacacattgcaatggcagcggctggaggcggggtaggagatagcgagctgcggctgctgggcaagtcgtcgagcccttgggtgttccgggtgagagtggcgctgggactcagggggctgagctacgagtacatagaggaggacctcggcaacaagagcgagctcctgctccggtccaacccggtgcacaagaaggtgccggtcctcatccacggcggccgcccggtgtgcgagtccctcgtgatcctccagtacgtcgacgagatctggcggggcaccggccctccgctccttccgtccgacccctacgaccgcgccacggcacggttctgggcggcctacgtcgacgacaaggtcgaggacggacgagcagagagcggaggcgctccagaacgccctcctcgtggcggagacgttggagcgggcgttcacggagtgctccagggggaagcttttggagcagtacagggcgtctcgggccaaatggactgccgctgctgattctagctgaactgatgaacacactggacgcctgctgcttgcattggctacttgtgctggacaccttcagtgatacggtctcgaaccgaaataaatacataaaggctagtttggaaacattagtccttctgcgattcttgaaaattgagtagaaaattattcaatttattactcaatctcaaagaatctcggaagggatttatgttttcaaactagtcctaagatcaactactttacctgacaattagttacgggggatttgtacttggagcagtattttgtgtcaggtgatcttcgattttgtctaatactaagacctatgaaacggtgagatgatcaatgccatcctgctttgaaatcgatacagtcgggttcgacgagagcaaatagcagcagagggggaatctaaatgggactccaatataggggtgtttggttctcttgactaaaatgtggttagtaagtatgaaatataatttaattataaagctaattatatagcggcagacactttgtttttgtttgggtaggcggagcagcggcaggctgcagcttcgatgtctccctgcagactgcagctcgcaaagcaagcgcccagcacttggggtatggaacctgaatgcaacgctgtgcctgtgcacagaaggattatgg

SEQ ID NO: 32239 - DNA, 2581 bp, Zea Mays
ggcacgcatacaaatggatcccaggtcccaacagacagcggcacatgatagaacaaagcaaacatctgcaaactgtaatggcggctccagtaggtgccaatgccataggagcgggcgacgagctgctcctgctgggcacatggtcgagcccatgggtgatccgagcgagggtggcgatggggctcaagggcctgagctacgagtacctcgaggaggacctcggcaacaagagcggcctcctgctccggtccaacccggtgcacaagaaggtgcccgtcctcatccacggcggccgcccattgtgcgagtcgctcgtgatcctgcagtacctcgacgaggcatggccgacggccggtcctccgctcctcccggccgacccctacgaccgcgccacggcacggttctgggcggcctacatcaacgacacgtttttcccggcgttcagggcgctgttcagatcgctgacggacgagcagagagcggaggcgctgcggaacgccctgcctgcggtggagacgttggagcgaacgctcgcggagtgctccgcggggaaggcgttcttcggcggcgacgccgtcgggatcgtggacgtcgcgctcgggagccacctggtctggatccgagtggtggatgaggttggaggcaccagccttctggacgcggccaaggtccccggcctggcggcgtgggcggagcggttcttggccgtggacgccgtgaagaaggtgatgccggacgcaacgaaggtcctggagcagtacaaggggtttcgggctaaatggattgcgggcgccggttgtacctgaaacgtacggtcgcggcttccgtattcgatggccccagcttcggtgcccgggctccggtgcccgtgatgctcctaggtcgatttgacgaggttcatgggttatacgcgcctcacacaagcatgcgctgaatttctcgctttgggtgtgtatggttttcccaggctgagctagagaaggtggataaaactaatttttttggaagatacttgaatgaataaataaggcgccagttcagattaaaaattccctgaatacagatactaggctagccgggccaaaagatgctcctgatcttgctagactcatacaagtaatgtctgcttcttgttgctattattctaggttttttcaccattcctcctattctttaaatttataaatttatagtttgtaaaatgtgcaaaggtcctttaaactatgtaattacatcttgtgatgagatggtgaatctgaagctatgcctttaaccttgaacgaatgggcgcacaagagggtaatcgtatattgaggtttaaatgcaagtatataataataatgcatttcccaaatcattaattctgcaagtgatgagttttttctttctattcccaattttctctgtgatgtgcagtttggacatttgaatgcacatcagtaactgtggttgcattaatggtccaatggagagcaatgatgtgaataacaagctgtcatttttgccctcttgttcaaagcttgaaatggaattgtgcacttattcgagcattaatcttgtaatacagaaactatgcactcatttgagcattctggatataacttactacatgtcaaaacattgacgcctaagttggttgctgtaagaactaagaaacgaaacattagttgatgaactaaaagaagctttagctgattgcgaacagaagccaaaaaatattcttggggagcaaggtgtcatagaagtaaggtgattctatcctatgtctgtgaataactaaaggtttgctccgaaaatttctctggtattcaacccttgaataataggtcgctcgacacctggatgcaattacagttgtcactgggatagtagggtgtgcagggatgaaggtaacaccccttctatttatcacatttctcttcgtgcttttcttatgttgggtgttccgagaacctaatgttgatatttataaaatgtttgtgtataaatgatatttatgtgcttgcaatggtgtgtctgtcggtttgaggcatggtttgctgcagatgcagatgaaatatctctgaagaattgggatcacattcgtgctatgcactggtgcaaagtgaaagccatgatctaaataatgctgtagatagaattattttcatgttatcaagtaattatatgcactgccagtatgaagtcttggtccactatctatttccatgtggtcaatattcaccataatgccaaaacatcaggaggcatttcatatccttagttgaaacaaaattatgcagtttaattccttccttcatgagctaatgctcttcactcactagaaattatctatatgaactttacatgcagggtgatacaacagtaacagagaccaaactcgaactccatagcagagtaaatgatcttgatctgcagctaaggagaaaggggaatgccataggtacttatacaattgggtctggaggctcgtcggcaaccggacaggaaaacagcaaggcagaagggcattgctcggtcgctggtccgatgagtggcactgtcagggagcgtgacaggggcgacaaatctagacctccac

SEQ ID NO: 32240 - DNA, 2032 bp, Zea Mays
ggcacgcatacaaatggatcccaggtcccaacagacagcggcacatgatagaacaaagcaaacatctgcaaactgtaatggcggctccagtaggtgccaatgccataggagcgggcgacgagctgctcctgctgggcacatggtcgagcccatgggtgatccgagcgagggtggcgatggggctcaagggcctgagctacgagtacctcgaggaggacctcggcaacaagagcggcctcctgctccggtccaacccggtgcacaagaaggtgcccgtcctcatccacggcggccgcccattgtgcgagtcgctcgtgatcctgcagtacctcgacgaggcatggccgacggccggtcctccgctcctcccggccgacccctacgaccgcgccacggcacggttctgggcggcctacatcaacgacacgtttttcccggcgttcagggcgctgttcagatcgctgacggacgagcagagagcggaggcgctgcggaacgccctgcctgcggtggagacgttggagcgaacgctcgcggagtgctccgcggggaaggcgttcttcggcggcgacgccgtcgggatcgtggacgtcgcgctcgggagccacctggtctggatccgagtggtggatgaggttggaggcaccagccttctggacgcggccaaggtccccggcctggcggcgtgggcggagcggttcttggccgtggacgccgtgaagaaggtgatgccggacgcaacgaaggtcctggagcagtacaaggggtttcgggctaaatggattgcgggcgccggttgtacctgaaacgtacggtcgcggcttccgtattcgatggccccagcttcggtgcccgggctccggtgcccgtgatgctcctaggtcgatttgacgaggttcatgggttatacgcgcctcacacaagcatgcgctgaatttctcgctttgggtgtgtatggttttcccaggctgagctagagaaggtggataaaactaatttttttggaagatacttgaatgaataaataaggcgccagttcagattaaaaattccctggtatgttcaacatgaactcttttttggagggcttttttctatttatattagagatctttgtcgaaactgatattgaaagttgccattgcgagctcttggtctcacagaatacagatactaggctagccgggccaaaagatgctcctgatcttgctagactcatacaagtcgctcgacacctggatgcaattacagttgtcactgggatagtagggtgtgcagggatgaaggtaacaccccttctatttatcacatttctcttcgtgcttttcttatgttgggtgttccgagaacctaatgttgatatttataaaatgtttgtgtataaatgatatttatgtgcttgcaatggtgtgtctgtcggtttgaggcatggtttgctgcagatgcagatgaaatatctctgaagaattgggatcacattcgtgctatgcactggtgcaaagtgaaagccatgatctaaataatgctgtagatagaattattttcatgttatcaagtaattatatgcactgccagtatgaagtcttggtccactatctatttccatgtggtcaatattcaccataatgccaaaacatcaggaggcatttcatatccttagttgaaacaaaattatgcagtttaattccttccttcatgagctaatgctcttcactcactagaaattatctatatgaactttacatgcagggtgatacaacagtaacagagaccaaactcgaactccatagcagagtaaatgatcttgatctgcagctaaggagaaaggggaatgccataggtacttatacaattgggtctggaggctcgtcggcaaccggacaggaaaacagcaaggcagaagggcattgctcggtcgctggtccgatgagtggcactgtcagggagcgtgacaggggcgacaaatctagacctccacttgtttgaagcccctcttgacgaaaaagaaatatcgctacgatatagctctgct

SEQ ID NO: 32241 - DNA, 2482 bp, Zea Mays
ggcacgcatacaaatggatcccaggtcccaacagacagcggcacatgatagaacaaagcaaacatctgcaaactgtaatggcggctccagtaggtgccaatgccataggagcgggcgacgagctgctcctgctgggcacatggtcgagcccatgggtgatccgagcgagggtggcgatggggctcaagggcctgagctacgagtacctcgaggaggacctcggcaacaagagcggcctcctgctccggtccaacccggtgcacaagaaggtgcccgtcctcatccacggcggccgcccattgtgcgagtcgctcgtgatcctgcagtacctcgacgaggcatggccgacggccggtcctccgctcctcccggccgacccctacgaccgcgccacggcacggttctgggcggcctacatcaacgacacgtttttcccggcgttcagggcgctgttcagatcgctgacggacgagcagagagcggaggcgctgcggaacgccctgcctgcggtggagacgttggagcgaacgctcgcggagtgctccgcggggaaggcgttcttcggcggcgacgccgtcgggatcgtggacgtcgcgctcgggagccacctggtctggatccgagtggtggatgaggttggaggcaccagccttctggacgcggccaaggtccccggcctggcggcgtgggcggagcggttcttggccgtggacgccgtgaagaaggtgatgccggacgcaacgaaggtcctggagcagtacaaggggtttcgggctaaatggattgcgggcgccggttgtacctgaaacgtacggctgagctagagaaggtggataaaactaatttttttggaagatacttgaatgaataaataaggcgccagttcagattaaaaattccctgaatacagatactaggctagccgggccaaaagatgctcctgatcttgctagactcatacaagtaatgtctgcttcttgttgctattattctaggttttttcaccattcctcctattctttaaatttataaatttatagtttgtaaaatgtgcaaaggtcctttaaactatgtaattacatcttgtgatgagatggtgaatctgaagctatgcctttaaccttgaacgaatgggcgcacaagagggtaatcgtatattgaggtttaaatgcaagtatataataataatgcatttcccaaatcattaattctgcaagtgatgagttttttctttctattcccaattttctctgtgatgtgcagtttggacatttgaatgcacatcagtaactgtggttgcattaatggtccaatggagagcaatgatgtgaataacaagctgtcatttttgccctcttgttcaaagcttgaaatggaattgtgcacttattcgagcattaatcttgtaatacagaaactatgcactcatttgagcattctggatataacttactacatgtcaaaacattgacgcctaagttggttgctgtaagaactaagaaacgaaacattagttgatgaactaaaagaagctttagctgattgcgaacagaagccaaaaaatattcttggggagcaaggtgtcatagaagtaaggtgattctatcctatgtctgtgaataactaaaggtttgctccgaaaatttctctggtattcaacccttgaataataggtcgctcgacacctggatgcaattacagttgtcactgggatagtagggtgtgcagggatgaaggtaacaccccttctatttatcacatttctcttcgtgcttttcttatgttgggtgttccgagaacctaatgttgatatttataaaatgtttgtgtataaatgatatttatgtgcttgcaatggtgtgtctgtcggtttgaggcatggtttgctgcagatgcagatgaaatatctctgaagaattgggatcacattcgtgctatgcactggtgcaaagtgaaagccatgatctaaataatgctgtagatagaattattttcatgttatcaagtaattatatgcactgccagtatgaagtcttggtccactatctatttccatgtggtcaatattcaccataatgccaaaacatcaggaggcatttcatatccttagttgaaacaaaattatgcagtttaattccttccttcatgagctaatgctcttcactcactagaaattatctatatgaactttacatgcagggtgatacaacagtaacagagaccaaactcgaactccatagcagagtaaatgatcttgatctgcagctaaggagaaaggggaatgccataggtacttatacaattgggtctggaggctcgtcggcaaccggacaggaaaacagcaaggcagaagggcattgctcggtcgctggtccgatgagtggcactgtcagggagcgtgacaggggcgacaaatctagacctccacttgtttgaagcccctcttgacgaaaaagaaatatcgctacgatatagctctgct

SEQ ID NO: 32242 - DNA, 686 bp, Zea Mays
ctcggatgaacttgatcccatcatctacctgaatgtcgattaggtgcgacccggccattggctaatatgcgctaccgttccacgtcgggacctctatcaccctcgatggagagcccgcccaaccatgtcgtccctgacgacacagcaaatgccaccggtgtagcctccctcgtcgggcgccgccacctgatttgtttcttcctctatcgtcgtgccatatcctccggtggcgatgagctacacttgctgcttatgaggtgccagaccaggtagagagctagagacgattgggcacttggattgttttggttaactgttgcagcggtacagatcaagagttgattccagtgttcggtgcgctggtgatgcacctctgcaccggctttggccccgaggcgctaccggttgggatacggtggaccatggacgagagggatccggggtgcttgtatggagatctggctgaactgccgtgctggggattcttcagtctcattgtacatccactgctaggcgaggcacgatgtcgacgtgctggcgtgctgctacggaaggtgttagatatatgcaacaatctgatattccatactaccttaaccatgtggagcttctcgaagcatatcatggccaaggtagccacatttggatttggaggaccaactaagctgcatgaaaactcttattga

SEQ ID NO: 32243 - DNA, 1330 bp, Zea Mays
gatgaacttgatcccatcatctacctgaatgtcgattaggtgcgacccggccattggctaatatgcgctaccgttccacgtcgggacctctatcaccctcgatggagagcccgcccaaccatgtcgtccctgacgacacagcaaatgccaccggtgtagcctccctcgtcgggcgccgccacctgatttgtttcttcctctatcgtcgtgccatatcctccggtggcgatgagctacacttgctgcttatgagcggtacagatcaagagttgattccagtgttcggtgcgctggtgatgcacctctgcaccggctttggccccgaggcgctaccggttgggatacggtggaccatggacgagagggatccggggtgcttgtatggagatctggctgaactgccgtgctggggattcttcagtctcattgtacatccactgctaggcgaggcacgatgtcgacgtgctggcgtgctgctacggaaggtgttagatatatgcaacaatctgatattccatactaccttaaccatgtggagcttctcgaagcatgtgagtttctatgtttattgttgagcatgatctctttgttttatatcaatgctaggttcctggtaacaaatagatctctaaacttcttattttttttacacagattttcttattttcttcatatctaaccgggagagcttgctatcctgcacttgaactgcttctgcatttttataaaatttattttagtgattcattgcatcaagaaaactattacttgtggacagcctggggacatatgagtccttttaagtagatgttgttatctgctcataccatgcaatacttttcctcaacaagtggtgttgttttaaatactagagtagaactacatccatgaaaactatcactgctcatatccacgacaaagcaccagtgaacgtgtgtgcgacaaggagggaccgcctgctgttctgagtccaaccaactagacctacaactgaaaggtatgctatatatataatatggtgctattttgacgtgatccagattgttattgtaggccacacacaaaacagggaccgataaaataaaaccataattacttctgattctgaattgaaagcattacatagcttcgaaggtatatacttccctttcgattctttgggcagttcaaccacattagctactccatccttagattctagaactgctcatcattctcttcatccaggtcaacacctttatcatctctaattgttttagcgtcttgatgtcattgtacttgtggacaggggctagctttctttgtgtcattgtacttgtgtacaggggct

SEQ ID NO: 32244 - DNA, 1057 bp, Zea Mays
ctcgcccagtcgccccttccgctcgacgcaaatcgtgaaacagtttagaatttccaacgaaagtcctacgagcctgcgagtgctaaactgctaactgctaagactgcaatggcggccggaggcgagctgcagctgctgagctcatggtacagcccctacgtgatccgcgccaaggtggcgctggggctgaaggggctcatctacgagttcatcgaggaggacctcttcagcaagagcgacctgctgctgaagctcaacccggtgcacaagaaggtgcccgtcctggtccacggcggccgccccgtgtgcgagtcgctcgtcatcgtgcagtacgtcgacgagacctgggcagcaggcaccgggacccctctccttcctgccgacgcccacgaccgcgccacggctcgcttctgggcagcctacgtcgacgacaagttctgcaaggagtggatcaaactgtacaggtcgacgacggcggagaaggcggcggaggcgctcggcggcgtggtccccgtggtggagacgctggagcaggcgttcagggagtgctccagggggaaacccttcttcggcggcgacgccgtcgggctcgtggacatcgcgctcgggagcttcgtggtgtggatcagggtggtggacgaggcggccggcgtaaaggtggtggacgaggcggccggcgtaaagcttctggacgaggccaagttcccggccttgacggcgtgggcggagcgcttcttggcggtggacgccgtgaaggaggtgatgccggacgccggaaggctgttggagcactacaaggggtttctggctaaacggtctccacctgctggttactgaacgctgtaactgtaagcctgtaacagcaagctcagtgttcgtgtacttttccgtgcgttaacgtgtactagagttcaggaaaggctttgattctgtccagagtccagacgaataaacgaatgttttttatacttcctccgttgcaatttatactttatttgacttttttacttaaagttttatcggtttgttttattaaaaaattctaatttattattaa

SEQ ID NO: 32245 - DNA, 726 bp, Zea Mays
ggtgcagggagcaagaagacaaggtttcaagatgctaaaggtttgctattttctcactagatgcactgcacttgtatattctcagtggtaatatcgatcaagttgaacatcataaattcataatcaacatatactagcaaccaattctgatcatgtgatcatatcaagatttattatcattctctaagacagtgctcatcttaagagttgatcatgttgtgggcaataagcagatacctgcagagtttctgcaaccatttagtcagacattcacgaacctgaaattccagaagaaagcatggaacaatttggtgaagatcaagagcttcagcaagttatcgatggggaagtttgcacgaaagtctaaggtctttgatgacttggacatcccagaagagctgagagaaatgttcatttccattccagataaaaagtttcgcatagacatttgacctattgaaataagaaagagccaaggagatttggggtgattctctatgactatagaaggtagaaatgagtctgaattctcctagcccaaatggagttacttttcacatttgtggggttgtgttcacccattctgttacagactatatggtaggtccatccatgcatccttcaaagggaactattgatgtatcctcagggagtgtattttatttaaattttgtcttgacacttgacagggcctcttggtatcttgttcagcaaattggaaccaat

SEQ ID NO: 32246 - DNA, 2555 bp, Zea Mays
atcctgtctgtcagggtctctccgatccctcggctccccccacaattcacacgcgcgatggctcccctgctcctgctcctccccgtcgtccagctcctcctggccgtagccgacgccgtccccgattcctgcgccaaagccacatgcgccggccatgagatacactaccctttccggctggactcctctatgcccgacgactgcgtggtgtaccccgtccccgggatcggcctcatctgccaggacaactccacgctgatcctcccctttgagtcgcacaggtacacagtgctgagcatcaactacaaggcgcacaccatcctagtctccgacgccgacatcggcgacgagtacgcggcggcggcggcgggcgccggctgcccgcgcctccacgtgaacctgaccatggacgccttctggctgcggctgtctccctccgactccaacatcaccttcctctacaactgcaagaggaacgtcaccctgccatccgccgtggagctgagcgggtgccaagatggcaacgacgacgacgacgacgacagcaggtcgccgtcgccgtcgtactcgtacgcgctgcgggacggcggggtcacgggcgctgaggcgcacgagctcgagtgccaggaggtggtggtggcgccggtgctggacgtgcacaagagggcgatcgtgggcgcgcccggcggcccgcctccgcctccgggggacgggtcgtcgccgttccgcgaggtgctgcagggcggcttcgagctgagctacgacacccactcccggcagtgcgaccggtgcgagcgctccggcggatggtgcgggtaccagcgcgctggagcgacgacgcccgccgccggcgcgagcgcgacgatgaccttcacctgtttctgcgagagcggcccggcctcggatcggtgcgggccaaaaagtaaaacagcagttattgccggtgtcgcggctggcgctggtgttgcaatacttgctgctgccatttttttgttcgtgaggcgcaagagaaagcagaagagagtggtcaactcgtcttcgaagctcctcaagtacagcggctctggcgggaccccgcgttcacgggtcggtgacatggagtccggcagcatcgaggacccgcctacgcatctcttcacctacgaggagcttgaggaggcgaccagttgcttcgacgaaaacagagagctcggtgacggtggcttcggcaccgtctacaaagggtacctcaaggacgggcgcgtggtggcggtgaaacggctgtacaacaacagctaccggcgcgtggagcagttccagaacgaggcggccatcctgtcggggctacgccaccccaacctcgtcatgttctacggctgcacgtccagccagagccgcgagctgctgctggtgtacgagttcgtggccaacggcacggtcgccgaccacctgcacgggcagcgggccgccgagcgcgccctcccgtggccgctccgcctcggcgtcgccgtggagtccgccgcggcgctcacctacctgcacgccatcgagccgcccgtggtgcaccgcgacgtcaagaccaccaacatcctcctggacgccgactaccacgtcaaggtcgccgacttcggcctctcccgcctcttccccctcgacgtcacgcacgtctccaccgctccccagggcacgccagggtatgtagatccagagtaccaccagtgctaccagctgacggacaagagcgacgtgtacagtttcggagtggtcctggtggagctcatctcgtccaagcccgccgtcgacgtcacccggcaccgcaacgagatcaacctggccggcatggccatcagcaagatccagaagtgccagctggaggagctcgtcgacatcgacctgggctacgagaccgacccggccaccaagaaggcgatgacggcggtcgccgagctggccttccgttgcctgcagcagaacggcgagatgcgcccgccgatcaaggaggtgctcgaggtgctcaggagcattcagggcgaataccagacggggaaggacggagacaaaaacaaggacggacccctctctcccaccacggttcatgctccgtgggagagcagggccacgacgcccaacaccagcagggactagaccagtcggtcagtgtcaaggactggagaccggagaagttgctgctgctgtgtgactgtgaggcatgccagattgcctgtcatttgttttcaggcttcgcggtccggttcctgctgatgtatatatttgttttgttgggtctgtcagagctgagggaatgtacatatatgtgaaagagtggtgaatgatatatataatacacatataaataaatgagtactagtaaatagatgtcacttgtgcctgccctgacctttcacccaacagtttccaattgatatgtggagcatgatccgcttgctgccgtgtcacagttgataagtggagcacgatccgtataataaggctggagtagatcagtatgcagagctcacatagccaaatggttccacaacgcatgtgggcccgatgctgatgcaccgaggataaac

SEQ ID NO: 32247 - DNA, 535 bp, Zea Mays
cggccatggaggccgcaagcccgcaagcaatcaggagccggggagatgtggagacgccggcgacgaggcgaagaagaaggaggcggcgcttgcatcaagcaggctcctcgacccggcgttcaagccctccaaactatcccaggaccggctcgacaagtttaaggaattacacaagaaacggttacagataactgaaaagccgaagtataaaagaaaactgaaaggaaccgctgggagaagtaccaaagtaaccagtgattacaaattcactaatacggatgcatctgctgatagttctccaagagatgtacatcatacgtcatcaattacaggaatccaagggccgaattgtctcctcccccggagccctttgagtcacaaacaaaccccaaagcaaaaagtgaagatgaaattattaagatggccgaagctattatggacaaagttgtacctcaactgctaaacgaagctgcggaagtagttctgaaagaagactagctattgttgtaaaaacattcggagtactgatgtaata

SEQ ID NO: 32248 - DNA, 526 bp, Zea Mays
cggccatggaggccgcaagcccgcaagcaatcaggagccggggagatgtggagacgccggcgacgaggcgaagaagaaggaggcggcgcttgcatcaagcaggctcctcgacccggcgttcaagccctccaaactatcccaggaccggctcgacaagtttaaggaattacacaagaaacggttacagataactgaaaagccgaagtataaaagaaaactgaaaggatcctgcatcaggcctgtcctcgaggaacaaaagaaagctacattgggggcttgatattaaaggacgatggggaaggaaggcaaacatgtaaaaatctgaagacccaaccgcaaaagcatatccacagttccacaccccacttgattcagatttgaaaggagaaggacagaggaaagtggcaggccttttccacggatcatcaggttgcttgtaaggttcatgtttgtgacagcaaccagaaacactggagcgtggacagcagtctcagaactaagcaaagagccagctacacaattctgc

SEQ ID NO: 32249 - DNA, 765 bp, Zea Mays
cggccatggaggccgcaagcccgcaagcaatcaggagccggggagatgtggagacgccggcgacgaggcgaagaagaaggaggcggcgcttgcatcaagcaggctcctcgacccggcgttcaagccctccaaactatcccaggaccggctcgacaagtttaaggaattacacaagaaacggttacagataactgaaaagccgaagtataaaagaaaactgaaaggaaccgctgggagaagtaccaaagtaaccagtgattacaaattcactaatacggatgcatctgctgatagttctccaagagatgtacatcatacgtcatcaattacaggaatccaaggggatcctgcatcaggcctgtcctcgaggaacaaaagaaagctacattgggggcttgatattaaaggacgatggggaaggaaggcaaacatgtaaaaatctgaagacccaaccgcaaaagcatatccacagttccacaccccacttgattcagatttgaaaggagaaggacagaggaaagtggcaggccttttccacggatcatcaggttgcttgtaaggttcatgtttgtgacagcaaccagaaacactggagcgtggacagcagtctcagaactaagcaaagagccagctacacaattctgcggcacgccaagaaattcgctggaaaccaaactattagagctagtttggaagtccaaaacctgaagaagattgttgatccaggaggggggaaaagaagctgcagtgccgtcttctgcggac

SEQ ID NO: 32250 - DNA, 4858 bp, Zea Mays
accacagcctccgctcaacggcaggagaatcacggcgagcgcgtgctcgtgggcacccctctccatcaactggggtgcgcgatcgatcgatcaaaaccccaatccagccttctatttccgatcgagacgcaaacgaagcaggtagaaggccaaggccagcgcagacacggatggcgatgggagcgacggttcgcgcagcggctgcagatgccatggtgacgttcttgtgggtgttgtgcgcctccgcgctcgatgtctccatagcagccgtcacgtcgtaccaggggttgcaggagggcaccggccactatgcgctcctcgtcaccacgtccctcctctcggtgctcctcttcaccttcgacctcctctacggtgtgctcggtggtgccagcttcaacttcactgactttgccacctcctattccgccggactcgatagcccctccctcttctctgttgcgctccacttcctggcacggactgtcgtggtggtgaagaggaccactttgcgcgtggctcggaaggatgcctatatggcagagttagatttgtttgctaaaggattgcatgaaaggctggttcctttcctgggtcactgtcttgataaagaagaagaaaaggttcatgtgtataggtttgtccaaaatggtgacttgtcaagtgcactacacaaaaagtcaagggaggaagatgaaggcttgcaatctttggactggataaagaggttgaagattgcaacgggggtagctgaggctctttgctatctgcatcatgaatgttctccaccgatggttcatagggatgtgcaagccagcagcatccttcttgatgataaatttgatgtacgccttggtagcttgagcgagcttcctgcaattgaatcagtcttgaatgctatgaagagcaatacaaatcagcgagtatctccaatatttgctcttgtcctatgccctacaagagagcttgctattcagcttacagctgaagcaaatgtcttgttaaagtaccatgaaggaattggtgttcaatctcttattggtggcactagattcaagcttgatcagagacgattagaatctgatccatgccagccagatcatctattagatgaaaccaaccgtgctggaagcaagattagggtggaaagggctgagcgaagctcctacacgtttcaatcacagttagatggcggtgcacagttctgtgtatcacaagaggcatctaggttgacctcgctcttcttagtgttcatgcccactgcgcaagacaacaccacaacgccgatggagttggaagatttcatcaggctcgactcgatctggatgagatggactctgctcgctgaggaccgaacaccgaagccaggcagccagccgaggaagccaggcgacaggcgacgccaagtcgagaacaccctaggtggtcgctcgcaggctgcgagtgagagccgtggcggagtcgccgtccttgcccacggaggaggacacagccgccggcgcagtgggatggcgacgccgacgcccatgcccggaagcgaggggacgctcgtggcggtgatgccgcggtccccgtccccgacgccggcggaggcggggacctcggcgaccgagacgcccgtgctaatattcctttacttccacaaggcgatccgcgcggagctcgaggcgctgcacggcgccgccgtgctcctggccaccgagcgcaccggcgatgtcgcggcgctcgccgagcgctgccgctttttcttcagcatctacaaacaccactgcgatgccgaggacgcggtcatctttccagcacttgacatccgagtaaagaatgttgcagggacctattccttagagcataaaggagaaagcgatctttttagccagttatttgatctcctggaattggacatacagaatgatgatgctcttcgtagggagcttgcgtcatgtacaggcttttctttccttcctctccctgcttctgttctgctgtttatcaggctggtctttccattgctgacaaagaaattttcatgtgaagaacaagctgatttagtgtggcaattcctctgcaacattcctgtcaatatggtagcagagttccttccatggctttcaacttctgtcacatctgatgagcaccaagacatccgtgactgcttatgtaaagtagttcctgatgagaaacttctccaacaggttgtattcacatggatggaggggaaagcagcaagagaagtggcagagagctttgccactgaatctaatggttctcaagccgacaggcatcctatagatgatattttatactggcacaacgctatccgcatggagttacatgatataaaaaaagaaacaagaagggtgcaacagtctgggaatttttctgatatatcagccttcaatgagaggcttcagttcattgcagatgtatgcatctaccacagtatcgctgaggatcaggttgtttttcctgcagtcgatagtgagctgtcctttgtgcaggagcatgctgaagaagaacacaggtttaacaatttcaggtgtttaattcagcaattccaaatagcaggagccaaatcaactgcactggacttctactcaaaactgtgttcacatgctgataaaatattggagacaatcgaaaaacacttcagcaatgaagaaaccaaggtgcttcctcaagctaggatgtttttctctcctgaaaagcaaagggaactttcgtacaaaagtctgtgtgttatgccattgaaattattggaacgtgttttaccatggttggtgtcaaagctgagtgatgagcaggcaacttcatttcttcagaatatacgattggcagcatcaccatctgaaactgcactggtcactcttatctctggttgggcatgcaaaggccgggacaaatccaaatctggagaatatttatgcttaacatcaggtacagcaagatgcctgtcagatgatgtagatgatcagggaaaatgccgatcattctgcccatgtgcttcacacaacagctcagatctttctctgcagctacaaactgaaaatggttctaggccaggcaagcgaggaaaagatgcagtatcttttcctggtactaatggaagctactgctctcaaactgctgacattgatgcaagtccatgtagcaaaaagccttgttgtattcctgggttgagagtaaagagtagcaaccttggtattggttccctggcttctgtgaagtcctttcgctctttaccatacaattctactgctccttcaatatattcgagcctcttctcatgggagacagatgcatcattgtcttgttcggatggcatttcaaggccaattgatacaatattcaaatttcataaggcaattcgcaaggatttagagtacttagatgttgaatctggaaggctcattgatggtgatgagtcttgccttcgccaattcattggaaggttccgtttgttatggggtctttacagggctcacagcaatgctgaggatgaaattgtgttcccagcattggaatccagagaaacattgcacaatgtgagccattcatatactcttgaccacaagcaggaagaacaattattcgaagatatctctgatgttctctttcagctttcacaactacatgatagccagggccatgcccagactaaagttaatgaagtaaagcaaagctgtttccattcatctaatgacgttgattttactaggaagtataatgagcttgccacaaaacttcaggccatgtgcaagtctatccgggtcgccttgactaatcatgtccatagagaagaacttgaattgtggccgttgtttgacaaacatttttctgtggaggagcaagataaacttgtaggtcgtataattggttcaacaggtgctgaggttctccaatctatggtaccctgggttacatcagctctcactcaagaggagcagaacaaaatgcttgatacctggaagcaagcaacaaaaaatacaatgtttggggaatggctaaacgagtggtggaagggagctggaacatctgattcttcagcagaggcaccctctgctccagaagatagtcatttacaagataagcttgaacaaaatgaccagatgtttaagcctggctggaaggacatatttcgaatgaaccagagtgaacttgaggctgaggtgcgaaaggtttcacgagatcctacacttgacccaaggcggaaggcctatctaattcaaaatctcatgacaagccgctggatagctgctcagcaaaagttaccggaaccaaattctgaagaatgtagtgatgatgctagtatacctggatgtgcgccttcatatcgagaccaggagaaagaaatttatggttgtgaacattacaaacggaactgcaaacttgttgctgcatgctgcaacaagctgttcacatgcagattttgccatgataaagttagtgaccatacaatggaaaggaaagcaacacaggaaatgatgtgcatggtgtgcctaaagattcaacccgttggtccgttctgccaaaccccatcttgtaacagactatcgatggcaaagtactactgcaacatctgcaaatttttcgatgacgaaagatttgcattcaaatctggaaaaatgacaagattggttgttgccggagcccaaatctatcatgtttgttattgcaattttattttggtgattggagatctggaaacttattttattgtttatttatgctgcatggtaatgtagtattttaacttggtaacaagtgaacagcatccgtattgtaattggagctctggaaacttattttattgtttatctatgctgcgtggtagcgtatagtatttcatgttagtaatagtaac

SEQ ID NO: 32251 - DNA, 5085 bp, Zea Mays
accacagcctccgctcaacggcaggagaatcacggcgagcgcgtgctcgtgggcacccctctccatcaactggggtgcgcgatcgatcgatcaaaaccccaatccagccttctatttccgatcgagacgcaaacgaagcaggtagaaggccaaggccagcgcagacacggatggcgatgggagcgacggttcgcgcagcggctgcagatgccatggtgacgttcttgtgggtgttgtgcgcctccgcgctcgatgtctccatagcagccgtcacgtcgtaccaggggttgcaggagggcaccggccactatgcgctcctcgtcaccacgtccctcctctcggtgctcctcttcaccttcgacctcctctacggtgtgctcggtggtgccagcttcaacttcactgactttgccacctcctattccgccggactcgatagcccctccctcttctctgttgcgctccacttcctggcacggactgtcgtggtggtgaagaggaccactttgcgcgtggctcggaaggatgcctatatggcagagttagatttgtttgctaaaggattgcatgaaaggctggttcctttcctgggtcactgtcttgataaagaagaagaaaaggttcatgtgtataggtttgtccaaaatggtgacttgtcaagtgcactacacaaaaagtcaagggaggaagatgaaggcttgcaatctttggactggataaagaggttgaagattgcaacgggggtagctgaggctctttgctatctgcatcatgaatgttctccaccgatggttcatagggatgtgcaagccagcagcatccttcttgatgataaatttgatgtacgccttggtagcttgagcgagcttcctgcaattgaatcagtcttgaatgctatgaagagcaatacaaatcagcgagtatctccaatatttgctcttgtcctatgccctacaagagagcttgctattcagcttacagctgaagcaaatgtcttgttaaagtaccatgaaggaattggtgttcaatctcttattggtggcactagattcaagcttgatcagagacgattagaatctgatccatgccagccagatcatctattagatgaaaccaaccgtgctggaagcaagattagggtggaaagggctgagcgaagctcctacacgtttcaatcacagttagatggcggtgcacagttctgtgtatcacaagaggcatctaggttgacctcgctcttcttagtgttcatgcccactgcgcaagacaacaccacaacgccgatggagttggaagatttcatcaggctcgactcgatctggatgagatggactctgctcgctgaggaccgaacaccgaagccaggcagccagccgaggaagccaggcgacaggcgacgccaagtcgagaacaccctaggtggtcgctcgcaggctgcgagtgagagccgtggcggagtcgccgtccttgcccacggaggaggacacagccgccggcgcagtgggatggcgacgccgacgcccatgcccggaagcgaggggacgctcgtggcggtgatgccgcggtccccgtccccgacgccggcggaggcggggacctcggcgaccgagacgcccgtgctaatattcctttacttccacaaggcgatccgcgcggagctcgaggcgctgcacggcgccgccgtgctcctggccaccgagcgcaccggcgatgtcgcggcgctcgccgagcgctgccgctttttcttcagcatctacaaacaccactgcgatgccgaggacgcggtcatctttccagcacttgacatccgagtaaagaatgttgcagggacctattccttagagcataaaggagaaagcgatctttttagccagttatttgatctcctggaattggacatacagaatgatgatgctcttcgtagggagcttgcgtcatgtacaggcttttctttccttcctctccctgcttctgttctgctgtttatcaggctggtctttccattgctgacaaagaaattttcatgtgaagaacaagctgatttagtgtggcaattcctctgcaacattcctgtcaatatggtagcagagttccttccatggctttcaacttctgtcacatctgatgagcaccaagacatccgtgactgcttatgtaaagtagttcctgatgagaaacttctccaacaggttgtattcacatggatggaggggaaagcagcaagagaagtggcagagagctttgccactggtaatttagtaagaaatcatagtgctgaggatgtctcagaccatggggagatttatgtttgttcacagcaagaatctaaacttgggagtaaaaactgtgcagaatctaatggttctcaagccgacaggcatcctatagatgatattttatactggcacaacgctatccgcatggagttacatgatataaaaaaagaaacaagaagggtgcaacagtctgggaatttttctgatatatcagccttcaatgagaggcttcagttcattgcagatgtatgcatctaccacagtatcgctgaggatcaggttgtttttcctgcagtcgatagtgagctgtcctttgtgcaggagcatgctgaagaagaacacaggtttaacaatttcaggtgtttaattcagcaattccaaatagcaggagccaaatcaactgcactggacttctactcaaaactgtgttcacatgctgataaaatattggagacaatcgaaaaacacttcagcaatgaagaaaccaaggtgcttcctcaagctaggatgtttttctctcctgaaaagcaaagggaactttcgtacaaaagtctgtgtgttatgccattgaaattattggaacgtgttttaccatggttggtgtcaaagctgagtgatgagcaggcaacttcatttcttcagaatatacgattggcagcatcaccatctgaaactgcactggtcactcttatctctggttgggcatgcaaaggccgggacaaatccaaatctggagaatatttatgcttaacatcaggtacagcaagatgcctgtcagatgatgtagatgatcagggaaaatgccgatcattctgcccatgtgcttcacacaacagctcagatctttctctgcagctacaaactgaaaatggttctaggccaggcaagcgaggaaaagatgcagtatcttttcctggtactaatggaagctactgctctcaaactgctgacattgatgcaagtccatgtagcaaaaagccttgttgtattcctgggttgagagtaaagagtagcaaccttggtattggttccctggcttctgtgaagtcctttcgctctttaccatacaattctactgctccttcaatatattcgagcctcttctcatgggagacagatgcatcattgtcttgttcggatggcatttcaaggccaattgatacaatattcaaatttcataaggcaattcgcaaggatttagagtacttagatgttgaatctggaaggctcattgatggtgatgagtcttgccttcgccaattcattggaaggttccgtttgttatggggtctttacagggctcacagcaatgctgaggatgaaattgtgttcccagcattggaatccagagaaacattgcacaatgtgagccattcatatactcttgaccacaagcaggaagaacaattattcgaagatatctctgatgttctctttcagctttcacaactacatgatagccagggccatgcccagactaaagttaatgaagtaaagcaaagctgtttccattcatctaatgacgttgattttactaggaagtataatgagcttgccacaaaacttcaggccatgtgcaagtctatccgggtcgccttgactaatcatgtccatagagaagaacttgaattgtggccgttgtttgacaaacatttttctgtggaggagcaagataaacttgtaggtcgtataattggttcaacaggtgctgaggttctccaatctatggtaccctgggttacatcagctctcactcaagaggagcagaacaaaatgcttgatacctggaagcaagcaacaaaaaatacaatgtttggggaatggctaaacgagtggtggaagggagctggaacatctgattcttcagcagaggcaccctctgctccagaagatagtcatttacaagataagcttgaacaaaatgaccagatgtttaagcctggctggaaggacatatttcgaatgaaccagagtgaacttgaggctgaggtgcgaaaggtttcacgagatcctacacttgacccaaggcggaaggcctatctaattcaaaatctcatgacaagccgctggatagctgctcagcaaaagttaccggaaccaaattctgaagaatgtagtgatgatgctagtatacctggatgtgcgccttcatatcgagaccaggagaaagaaatttatggttgtgaacattacaaacggaactgcaaacttgttgctgcatgctgcaacaagctgttcacatgcagattttgccatgataaagttagtgaccatacaatggaaaggaaagcaacacaggaaatgatgtgcatggtgtgcctaaagattcaacccgttggtccgttctgccaaaccccatcttgtaacagactatcgatggcaaagtactactgcaacatctgcaaatttttcgatgacgaaaggactgtgtaccactgcccgttttgtaatttgtgtcgtcttgggaaaggtcttggtgttgatttctttcattgcatgaaatgcaactgctgtcttggaatgaaattaactgagcacaaatgtcgggaaaaagggctagagacaaattgtccaatatgctgtgacttcctgtttacatcaagtgccgcagtcagagccctcccttgcggccacttcatgcattcagcttgctttcaggcatacacttgtagccactacacttgtcctatctgctgcaaatctctgggagatatggcgttcttttttgactcgtgagcggaaaacctgccaatcatcttgcttcaatgcctcagaatagcaatgtagcatcagtttatcggaagtgaaa

SEQ ID NO: 32252 - DNA, 5085 bp, Zea Mays
accacagcctccgctcaacggcaggagaatcacggcgagcgcgtgctcgtgggcacccctctccatcaactggggtgcgcgatcgatcgatcaaaaccccaatccagccttctatttccgatcgagacgcaaacgaagcaggtagaaggccaaggccagcgcagacacggatggcgatgggagcgacggttcgcgcagcggctgcagatgccatggtgacgttcttgtgggtgttgtgcgcctccgcgctcgatgtctccatagcagccgtcacgtcgtaccaggggttgcaggagggcaccggccactatgcgctcctcgtcaccacgtccctcctctcggtgctcctcttcaccttcgacctcctctacggtgtgctcggtggtgccagcttcaacttcactgactttgccacctcctattccgccggactcgatagcccctccctcttctctgttgcgctccacttcctggcacggactgtcgtggtggtgaagaggaccactttgcgcgtggctcggaaggatgcctatatggcagagttagatttgtttgctaaaggattgcatgaaaggctggttcctttcctgggtcactgtcttgataaagaagaagaaaaggttcatgtgtataggtttgtccaaaatggtgacttgtcaagtgcactacacaaaaagtcaagggaggaagatgaaggcttgcaatctttggactggataaagaggttgaagattgcaacgggggtagctgaggctctttgctatctgcatcatgaatgttctccaccgatggttcatagggatgtgcaagccagcagcatccttcttgatgataaatttgatgtacgccttggtagcttgagcgagcttcctgcaattgaatcagtcttgaatgctatgaagagcaatacaaatcagcgagtatctccaatatttgctcttgtcctatgccctacaagagagcttgctattcagcttacagctgaagcaaatgtcttgttaaagtaccatgaaggaattggtgttcaatctcttattggtggcactagattcaagcttgatcagagacgattagaatctgatccatgccagccagatcatctattagatgaaaccaaccgtgctggaagcaagattagggtggaaagggctgagcgaagctcctacacgtttcaatcacagttagatggcggtgcacagttctgtgtatcacaagaggcatctaggttgacctcgctcttcttagtgttcatgcccactgcgcaagacaacaccacaacgccgatggagttggaagatttcatcaggctcgactcgatctggatgagatggactctgctcgctgaggaccgaacaccgaagccaggcagccagccgaggaagccaggcgacaggcgacgccaagtcgagaacaccctaggtggtcgctcgcaggctgcgagtgagagccgtggcggagtcgccgtccttgcccacggaggaggacacagccgccggcgcagtgggatggcgacgccgacgcccatgcccggaagcgaggggacgctcgtggcggtgatgccgcggtccccgtccccgacgccggcggaggcggggacctcggcgaccgagacgcccgtgctaatattcctttacttccacaaggcgatccgcgcggagctcgaggcgctgcacggcgccgccgtgctcctggccaccgagcgcaccggcgatgtcgcggcgctcgccgagcgctgccgctttttcttcagcatctacaaacaccactgcgatgccgaggacgcggtcatctttccagcacttgacatccgagtaaagaatgttgcagggacctattccttagagcataaaggagaaagcgatctttttagccagttatttgatctcctggaattggacatacagaatgatgatgctcttcgtagggagcttgcgtcatgtacaggcgcgatacaaacgtgtctcagccaacatatgtccaaggaggaagaacaggtctttccattgctgacaaagaaattttcatgtgaagaacaagctgatttagtgtggcaattcctctgcaacattcctgtcaatatggtagcagagttccttccatggctttcaacttctgtcacatctgatgagcaccaagacatccgtgactgcttatgtaaagtagttcctgatgagaaacttctccaacaggttgtattcacatggatggaggggaaagcagcaagagaagtggcagagagctttgccactggtaatttagtaagaaatcatagtgctgaggatgtctcagaccatggggagatttatgtttgttcacagcaagaatctaaacttgggagtaaaaactgtgcagaatctaatggttctcaagccgacaggcatcctatagatgatattttatactggcacaacgctatccgcatggagttacatgatataaaaaaagaaacaagaagggtgcaacagtctgggaatttttctgatatatcagccttcaatgagaggcttcagttcattgcagatgtatgcatctaccacagtatcgctgaggatcaggttgtttttcctgcagtcgatagtgagctgtcctttgtgcaggagcatgctgaagaagaacacaggtttaacaatttcaggtgtttaattcagcaattccaaatagcaggagccaaatcaactgcactggacttctactcaaaactgtgttcacatgctgataaaatattggagacaatcgaaaaacacttcagcaatgaagaaaccaaggtgcttcctcaagctaggatgtttttctctcctgaaaagcaaagggaactttcgtacaaaagtctgtgtgttatgccattgaaattattggaacgtgttttaccatggttggtgtcaaagctgagtgatgagcaggcaacttcatttcttcagaatatacgattggcagcatcaccatctgaaactgcactggtcactcttatctctggttgggcatgcaaaggccgggacaaatccaaatctggagaatatttatgcttaacatcaggtacagcaagatgcctgtcagatgatgtagatgatcagggaaaatgccgatcattctgcccatgtgcttcacacaacagctcagatctttctctgcagctacaaactgaaaatggttctaggccaggcaagcgaggaaaagatgcagtatcttttcctggtactaatggaagctactgctctcaaactgctgacattgatgcaagtccatgtagcaaaaagccttgttgtattcctgggttgagagtaaagagtagcaaccttggtattggttccctggcttctgtgaagtcctttcgctctttaccatacaattctactgctccttcaatatattcgagcctcttctcatgggagacagatgcatcattgtcttgttcggatggcatttcaaggccaattgatacaatattcaaatttcataaggcaattcgcaaggatttagagtacttagatgttgaatctggaaggctcattgatggtgatgagtcttgccttcgccaattcattggaaggttccgtttgttatggggtctttacagggctcacagcaatgctgaggatgaaattgtgttcccagcattggaatccagagaaacattgcacaatgtgagccattcatatactcttgaccacaagcaggaagaacaattattcgaagatatctctgatgttctctttcagctttcacaactacatgatagccagggccatgcccagactaaagttaatgaagtaaagcaaagctgtttccattcatctaatgacgttgattttactaggaagtataatgagcttgccacaaaacttcaggccatgtgcaagtctatccgggtcgccttgactaatcatgtccatagagaagaacttgaattgtggccgttgtttgacaaacatttttctgtggaggagcaagataaacttgtaggtcgtataattggttcaacaggtgctgaggttctccaatctatggtaccctgggttacatcagctctcactcaagaggagcagaacaaaatgcttgatacctggaagcaagcaacaaaaaatacaatgtttggggaatggctaaacgagtggtggaagggagctggaacatctgattcttcagcagaggcaccctctgctccagaagatagtcatttacaagataagcttgaacaaaatgaccagatgtttaagcctggctggaaggacatatttcgaatgaaccagagtgaacttgaggctgaggtgcgaaaggtttcacgagatcctacacttgacccaaggcggaaggcctatctaattcaaaatctcatgacaagccgctggatagctgctcagcaaaagttaccggaaccaaattctgaagaatgtagtgatgatgctagtatacctggatgtgcgccttcatatcgagaccaggagaaagaaatttatggttgtgaacattacaaacggaactgcaaacttgttgctgcatgctgcaacaagctgttcacatgcagattttgccatgataaagttagtgaccatacaatggaaaggaaagcaacacaggaaatgatgtgcatggtgtgcctaaagattcaacccgttggtccgttctgccaaaccccatcttgtaacagactatcgatggcaaagtactactgcaacatctgcaaatttttcgatgacgaaaggactgtgtaccactgcccgttttgtaatttgtgtcgtcttgggaaaggtcttggtgttgatttctttcattgcatgaaatgcaactgctgtcttggaatgaaattaactgagcacaaatgtcgggaaaaagggctagagacaaattgtccaatatgctgtgacttcctgtttacatcaagtgccgcagtcagagccctcccttgcggccacttcatgcattcagcttgctttcaggcatacacttgtagccactacacttgtcctatctgctgcaaatctctgggagatatggcgttcttttttgactcgtgagcggaaaacctgccaatcatcttgcttcaatgcctcagaatagcaatgtagcatcagtttatcggaagtgaaa

SEQ ID NO: 32253 - DNA, 5382 bp, Zea Mays
accacagcctccgctcaacggcaggagaatcacggcgagcgcgtgctcgtgggcacccctctccatcaactggggtgcgcgatcgatcgatcaaaaccccaatccagccttctatttccgatcgagacgcaaacgaagcaggtagaaggccaaggccagcgcagacacggatggcgatgggagcgacggttcgcgcagcggctgcagatgccatggtgacgttcttgtgggtgttgtgcgcctccgcgctcgatgtctccatagcagccgtcacgtcgtaccaggggttgcaggagggcaccggccactatgcgctcctcgtcaccacgtccctcctctcggtgctcctcttcaccttcgacctcctctacggtgtgctcggtggtgccagcttcaacttcactgactttgccacctcctattccgccggactcgatagcccctccctcttctctgttgcgctccacttcctggcacggactgtcgtggtggtgaagaggaccactttgcgcgtggctcggaaggatgcctatatggcagagttagatttgtttgctaaaggattgcatgaaaggctggttcctttcctgggtcactgtcttgataaagaagaagaaaaggttcatgtgtataggtttgtccaaaatggtgacttgtcaagtgcactacacaaaaagtcaagggaggaagatgaaggcttgcaatctttggactggataaagaggttgaagattgcaacgggggtagctgaggctctttgctatctgcatcatgaatgttctccaccgatggttcatagggatgtgcaagccagcagcatccttcttgatgataaatttgatgtacgccttggtagcttgagcgagcttcctgcaattgaatcagtcttgaatgctatgaagagcaatacaaatcagcgagtatctccaatatttgctcttgtcctatgccctacaagagagcttgctattcagcttacagctgaagcaaatgtcttgttaaagtaccatgaaggaattggtgttcaatctcttattggtggcactagattcaagcttgatcagagacgattagaatctgatccatgccagccagatcatctattagatgaaaccaaccgtgctggaagcaagattagggtggaaagggctgagcgaagctcctacacgtttcaatcacagttagatggcggtgcacagttctgtgtatcacaagaggcatctaggttgacctcgctcttcttagtgttcatgcccactgcgcaagacaacaccacaacgccgatggagttggaagatttcatcaggctcgactcgatctggatgagatggactctgctcgctgaggaccgaacaccgaagccaggcagccagccgaggaagccaggcgacaggcgacgccaagtcgagaacaccctaggtggtcgctcgcaggctgcgagtgagagccgtggcggagtcgccgtccttgcccacggaggaggacacagccgccggcgcagtgggatggcgacgccgacgcccatgcccggaagcgaggggacgctcgtggcggtgatgccgcggtccccgtccccgacgccggcggaggcggggacctcggcgaccgagacgcccgtgctaatattcctttacttccacaaggcgatccgcgcggagctcgaggcgctgcacggcgccgccgtgctcctggccaccgagcgcaccggcgatgtcgcggcgctcgccgagcgctgccgctttttcttcagcatctacaaacaccactgcgatgccgaggacgcggtcatctttccagcacttgacatccgagtaaagaatgttgcagggacctattccttagagcataaaggagaaagcgatctttttagccagttatttgatctcctggaattggacatacagaatgatgatgctcttcgtagggagcttgcgtcatgtacaggcttttctttccttcctctccctgcttctgttctgctgtttatcaggctggtctttccattgctgacaaagaaattttcatgtgaagaacaagctgatttagtgtggcaattcctctgcaacattcctgtcaatatggtagcagagttccttccatggctttcaacttctgtcacatctgatgagcaccaagacatccgtgactgcttatgtaaagtagttcctgatgagaaacttctccaacaggttgtattcacatggatggaggggaaagcagcaagagaagtggcagagagctttgccactgaatctaatggttctcaagccgacaggcatcctatagatgatattttatactggcacaacgctatccgcatggagttacatgatataaaaaaagaaacaagaagggtgcaacagtctgggaatttttctgatatatcagccttcaatgagaggcttcagttcattgcagatgtatgcatctaccacagtatcgctgaggatcaggttgtttttcctgcagtcgatagtgagctgtcctttgtgcaggagcatgctgaagaagaacacaggtttaacaatttcaggtgtttaattcagcaattccaaatagcaggagccaaatcaactgcactggacttctactcaaaactgtgttcacatgctgataaaatattggagacaatcgaaaaacacttcagcaatgaagaaaccaaggtgcttcctcaagctaggatgtttttctctcctgaaaagcaaagggaactttcgtacaaaagtctgtgtgttatgccattgaaattattggaacgtgttttaccatggttggtgtcaaagctgagtgatgagcaggcaacttcatttcttcagaatatacgattggcagcatcaccatctgaaactgcactggtcactcttatctctggttgggcatgcaaaggccgggacaaatccaaatctggagaatatttatgcttaacatcaggtacagcaagatgcctgtcagatgatgtagatgatcagggaaaatgccgatcattctgcccatgtgcttcacacaacagctcagatctttctctgcagctacaaactgaaaatggttctaggccaggcaagcgaggaaaagatgcagtatcttttcctggtactaatggaagctactgctctcaaactgctgacattgatgcaagtccatgtagcaaaaagccttgttgtattcctgggttgagagtaaagagtagcaaccttggtattggttccctggcttctgtgaagtcctttcgctctttaccatacaattctactgctccttcaatatattcgagcctcttctcatgggagacagatgcatcattgtcttgttcggatggcatttcaaggccaattgatacaatattcaaatttcataaggcaattcgcaaggatttagagtacttagatgttgaatctggaaggctcattgatggtgatgagtcttgccttcgccaattcattggaaggttccgtttgttatggggtctttacagggctcacagcaatgctgaggatgaaattgtgttcccagcattggaatccagagaaacattgcacaatgtgagccattcatatactcttgaccacaagcaggaagaacaattattcgaagatatctctgatgttctctttcagctttcacaactacatgatagccagggccatgcccagactaaagttaatgaagtaaagcaaagctgtttccattcatctaatgacgttgattttactaggaagtataatgagcttgccacaaaacttcaggccatgtgcaagtctatccgggtcgccttgactaatcatgtccatagagaagaacttgaattgtggccgttgtttgacaaacatttttctgtggaggagcaagataaacttgtaggtcgtataattggttcaacaggtgctgaggttctccaatctatggtaccctgggttacatcagctctcactcaagaggagcagaacaaaatgcttgatacctggaagcaagcaacaaaaaatacaatgtttggggaatggctaaacgagtggtggaagggagctggaacatctgattcttcagcagaggcaccctctgctccagaagatagtcatttacaagataagcttgaacaaaatgaccagatgtttaagcctggctggaaggacatatttcgaatgaaccagagtgaacttgaggctgaggtgcgaaaggtttcacgagatcctacacttgacccaaggcggaaggcctatctaattcaaaatctcatgacaagccgctggatagctgctcagcaaaagttaccggaaccaaattctgaagaatgtagtgatgatgctagtatacctggatgtgcgccttcatatcgagaccaggagaaagaaatttatggttgtgaacattacaaacggaactgcaaacttgttgctgcatgctgcaacaagctgttcacatgcagattttgccatgataaagttagtgaccatacaatggaaaggaaagcaacacaggaaatgatgtgcatggtgtgcctaaagattcaacccgttggtccgttctgccaaaccccatcttgtaacagactatcgatggcaaagtactactgcaacatctgcaaatttttcgatgacgaaaggactgtgtaccactgcccgttttgtaatttgtgtcgtcttgggaaaggtcttggtgttgatttctttcattgcatgaaatgcaactgctgtcttggaatgaaattaactgagcacaaatgtcgggaaaaagggctagagacaaattgtccaatatgctgtgacttcctgtttacatcaagtgccgcagtcagagccctcccttgcggccacttcatgcattcagcttgctttcaggcatacacttgtagccactacacttgtcctatctgctgcaaatctctgggagatatggcggtgtattttggcatgcttgatgccttgttggctgctgaagagcttccggaggaataccgtgataggtgtcaggatatactgtgcaatgactgtgagaggaaaggcagatgtcgatttcactggctataccacaaatgcggctcctgtgggtcgtacaatacccgagttatcaagactgacactgcagattgctccacaccaaattagctggagggaacatttgtgcttatttgtagcctttttttttctcttatgtaaatatcttctagcgggaaggaaaaaagagatgtcctgtaggatagttaacataatttcattcgtagcgatatcagttttgtaagtgtagcagtttacaatttactaggtctagtgcgttgtactgccaaaatggacggttctgctggacaaaggacataatccgagaaaataggctagttagaacaattgctcgcgtgcatgttctacatatttcgcggttcacgtatagcag

SEQ ID NO: 32254 - DNA, 5382 bp, Zea Mays
accacagcctccgctcaacggcaggagaatcacggcgagcgcgtgctcgtgggcacccctctccatcaactggggtgcgcgatcgatcgatcaaaaccccaatccagccttctatttccgatcgagacgcaaacgaagcaggtagaaggccaaggccagcgcagacacggatggcgatgggagcgacggttcgcgcagcggctgcagatgccatggtgacgttcttgtgggtgttgtgcgcctccgcgctcgatgtctccatagcagccgtcacgtcgtaccaggggttgcaggagggcaccggccactatgcgctcctcgtcaccacgtccctcctctcggtgctcctcttcaccttcgacctcctctacggtgtgctcggtggtgccagcttcaacttcactgactttgccacctcctattccgccggactcgatagcccctccctcttctctgttgcgctccacttcctggcacggactgtcgtggtggtgaagaggaccactttgcgcgtggctcggaaggatgcctatatggcagagttagatttgtttgctaaaggattgcatgaaaggctggttcctttcctgggtcactgtcttgataaagaagaagaaaaggttcatgtgtataggtttgtccaaaatggtgacttgtcaagtgcactacacaaaaagtcaagggaggaagatgaaggcttgcaatctttggactggataaagaggttgaagattgcaacgggggtagctgaggctctttgctatctgcatcatgaatgttctccaccgatggttcatagggatgtgcaagccagcagcatccttcttgatgataaatttgatgtacgccttggtagcttgagcgagcttcctgcaattgaatcagtcttgaatgctatgaagagcaatacaaatcagcgagtatctccaatatttgctcttgtcctatgccctacaagagagcttgctattcagcttacagctgaagcaaatgtcttgttaaagtaccatgaaggaattggtgttcaatctcttattggtggcactagattcaagcttgatcagagacgattagaatctgatccatgccagccagatcatctattagatgaaaccaaccgtgctggaagcaagattagggtggaaagggctgagcgaagctcctacacgtttcaatcacagttagatggcggtgcacagttctgtgtatcacaagaggcatctaggttgacctcgctcttcttagtgttcatgcccactgcgcaagacaacaccacaacgccgatggagttggaagatttcatcaggctcgactcgatctggatgagatggactctgctcgctgaggaccgaacaccgaagccaggcagccagccgaggaagccaggcgacaggcgacgccaagtcgagaacaccctaggtggtcgctcgcaggctgcgagtgagagccgtggcggagtcgccgtccttgcccacggaggaggacacagccgccggcgcagtgggatggcgacgccgacgcccatgcccggaagcgaggggacgctcgtggcggtgatgccgcggtccccgtccccgacgccggcggaggcggggacctcggcgaccgagacgcccgtgctaatattcctttacttccacaaggcgatccgcgcggagctcgaggcgctgcacggcgccgccgtgctcctggccaccgagcgcaccggcgatgtcgcggcgctcgccgagcgctgccgctttttcttcagcatctacaaacaccactgcgatgccgaggacgcggtcatctttccagcacttgacatccgagtaaagaatgttgcagggacctattccttagagcataaaggagaaagcgatctttttagccagttatttgatctcctggaattggacatacagaatgatgatgctcttcgtagggagcttgcgtcatgtacaggcgcgatacaaacgtgtctcagccaacatatgtccaaggaggaagaacaggtctttccattgctgacaaagaaattttcatgtgaagaacaagctgatttagtgtggcaattcctctgcaacattcctgtcaatatggtagcagagttccttccatggctttcaacttctgtcacatctgatgagcaccaagacatccgtgactgcttatgtaaagtagttcctgatgagaaacttctccaacaggttgtattcacatggatggaggggaaagcagcaagagaagtggcagagagctttgccactgaatctaatggttctcaagccgacaggcatcctatagatgatattttatactggcacaacgctatccgcatggagttacatgatataaaaaaagaaacaagaagggtgcaacagtctgggaatttttctgatatatcagccttcaatgagaggcttcagttcattgcagatgtatgcatctaccacagtatcgctgaggatcaggttgtttttcctgcagtcgatagtgagctgtcctttgtgcaggagcatgctgaagaagaacacaggtttaacaatttcaggtgtttaattcagcaattccaaatagcaggagccaaatcaactgcactggacttctactcaaaactgtgttcacatgctgataaaatattggagacaatcgaaaaacacttcagcaatgaagaaaccaaggtgcttcctcaagctaggatgtttttctctcctgaaaagcaaagggaactttcgtacaaaagtctgtgtgttatgccattgaaattattggaacgtgttttaccatggttggtgtcaaagctgagtgatgagcaggcaacttcatttcttcagaatatacgattggcagcatcaccatctgaaactgcactggtcactcttatctctggttgggcatgcaaaggccgggacaaatccaaatctggagaatatttatgcttaacatcaggtacagcaagatgcctgtcagatgatgtagatgatcagggaaaatgccgatcattctgcccatgtgcttcacacaacagctcagatctttctctgcagctacaaactgaaaatggttctaggccaggcaagcgaggaaaagatgcagtatcttttcctggtactaatggaagctactgctctcaaactgctgacattgatgcaagtccatgtagcaaaaagccttgttgtattcctgggttgagagtaaagagtagcaaccttggtattggttccctggcttctgtgaagtcctttcgctctttaccatacaattctactgctccttcaatatattcgagcctcttctcatgggagacagatgcatcattgtcttgttcggatggcatttcaaggccaattgatacaatattcaaatttcataaggcaattcgcaaggatttagagtacttagatgttgaatctggaaggctcattgatggtgatgagtcttgccttcgccaattcattggaaggttccgtttgttatggggtctttacagggctcacagcaatgctgaggatgaaattgtgttcccagcattggaatccagagaaacattgcacaatgtgagccattcatatactcttgaccacaagcaggaagaacaattattcgaagatatctctgatgttctctttcagctttcacaactacatgatagccagggccatgcccagactaaagttaatgaagtaaagcaaagctgtttccattcatctaatgacgttgattttactaggaagtataatgagcttgccacaaaacttcaggccatgtgcaagtctatccgggtcgccttgactaatcatgtccatagagaagaacttgaattgtggccgttgtttgacaaacatttttctgtggaggagcaagataaacttgtaggtcgtataattggttcaacaggtgctgaggttctccaatctatggtaccctgggttacatcagctctcactcaagaggagcagaacaaaatgcttgatacctggaagcaagcaacaaaaaatacaatgtttggggaatggctaaacgagtggtggaagggagctggaacatctgattcttcagcagaggcaccctctgctccagaagatagtcatttacaagataagcttgaacaaaatgaccagatgtttaagcctggctggaaggacatatttcgaatgaaccagagtgaacttgaggctgaggtgcgaaaggtttcacgagatcctacacttgacccaaggcggaaggcctatctaattcaaaatctcatgacaagccgctggatagctgctcagcaaaagttaccggaaccaaattctgaagaatgtagtgatgatgctagtatacctggatgtgcgccttcatatcgagaccaggagaaagaaatttatggttgtgaacattacaaacggaactgcaaacttgttgctgcatgctgcaacaagctgttcacatgcagattttgccatgataaagttagtgaccatacaatggaaaggaaagcaacacaggaaatgatgtgcatggtgtgcctaaagattcaacccgttggtccgttctgccaaaccccatcttgtaacagactatcgatggcaaagtactactgcaacatctgcaaatttttcgatgacgaaaggactgtgtaccactgcccgttttgtaatttgtgtcgtcttgggaaaggtcttggtgttgatttctttcattgcatgaaatgcaactgctgtcttggaatgaaattaactgagcacaaatgtcgggaaaaagggctagagacaaattgtccaatatgctgtgacttcctgtttacatcaagtgccgcagtcagagccctcccttgcggccacttcatgcattcagcttgctttcaggcatacacttgtagccactacacttgtcctatctgctgcaaatctctgggagatatggcggtgtattttggcatgcttgatgccttgttggctgctgaagagcttccggaggaataccgtgataggtgtcaggatatactgtgcaatgactgtgagaggaaaggcagatgtcgatttcactggctataccacaaatgcggctcctgtgggtcgtacaatacccgagttatcaagactgacactgcagattgctccacaccaaattagctggagggaacatttgtgcttatttgtagcctttttttttctcttatgtaaatatcttctagcgggaaggaaaaaagagatgtcctgtaggatagttaacataatttcattcgtagcgatatcagttttgtaagtgtagcagtttacaatttactaggtctagtgcgttgtactgccaaaatggacggttctgctggacaaaggacataatccgagaaaataggctagttagaacaattgctcgcgtgcatgttctacatatttcgcggttcacgtatagcag

SEQ ID NO: 32255 - DNA, 5480 bp, Zea Mays
accacagcctccgctcaacggcaggagaatcacggcgagcgcgtgctcgtgggcacccctctccatcaactggggtgcgcgatcgatcgatcaaaaccccaatccagccttctatttccgatcgagacgcaaacgaagcaggtagaaggccaaggccagcgcagacacggatggcgatgggagcgacggttcgcgcagcggctgcagatgccatggtgacgttcttgtgggtgttgtgcgcctccgcgctcgatgtctccatagcagccgtcacgtcgtaccaggggttgcaggagggcaccggccactatgcgctcctcgtcaccacgtccctcctctcggtgctcctcttcaccttcgacctcctctacggtgtgctcggtggtgccagcttcaacttcactgactttgccacctcctattccgccggactcgatagcccctccctcttctctgttgcgctccacttcctggcacggactgtcgtggtggtgaagaggaccactttgcgcgtggctcggaaggatgcctatatggcagagttagatttgtttgctaaaggattgcatgaaaggctggttcctttcctgggtcactgtcttgataaagaagaagaaaaggttcatgtgtataggtttgtccaaaatggtgacttgtcaagtgcactacacaaaaagtcaagggaggaagatgaaggcttgcaatctttggactggataaagaggttgaagattgcaacgggggtagctgaggctctttgctatctgcatcatgaatgttctccaccgatggttcatagggatgtgcaagccagcagcatccttcttgatgataaatttgatgtacgccttggtagcttgagcgagcttcctgcaattgaatcagtcttgaatgctatgaagagcaatacaaatcagcgagtatctccaatatttgctcttgtcctatgccctacaagagagcttgctattcagcttacagctgaagcaaatgtcttgttaaagtaccatgaaggaattggtgttcaatctcttattggtggcactagattcaagcttgatcagagacgattagaatctgatccatgccagccagatcatctattagatgaaaccaaccgtgctggaagcaagattagggtggaaagggctgagcgaagctcctacacgtttcaatcacagttagatggcggtgcacagttctgtgtatcacaagaggcatctaggttgacctcgctcttcttagtgttcatgcccactgcgcaagacaacaccacaacgccgatggagttggaagatttcatcaggctcgactcgatctggatgagatggactctgctcgctgaggaccgaacaccgaagccaggcagccagccgaggaagccaggcgacaggcgacgccaagtcgagaacaccctaggtggtcgctcgcaggctgcgagtgagagccgtggcggagtcgccgtccttgcccacggaggaggacacagccgccggcgcagtgggatggcgacgccgacgcccatgcccggaagcgaggggacgctcgtggcggtgatgccgcggtccccgtccccgacgccggcggaggcggggacctcggcgaccgagacgcccgtgctaatattcctttacttccacaaggcgatccgcgcggagctcgaggcgctgcacggcgccgccgtgctcctggccaccgagcgcaccggcgatgtcgcggcgctcgccgagcgctgccgctttttcttcagcatctacaaacaccactgcgatgccgaggacgcggtcatctttccagcacttgacatccgagtaaagaatgttgcagggacctattccttagagcataaaggagaaagcgatctttttagccagttatttgatctcctggaattggacatacagaatgatgatgctcttcgtagggagcttgcgtcatgtacaggcgcgatacaaacgtgtctcagccaacatatgtccaaggaggaagaacaggtctttccattgctgacaaagaaattttcatgtgaagaacaagctgatttagtgtggcaattcctctgcaacattcctgtcaatatggtagcagagttccttccatggctttcaacttctgtcacatctgatgagcaccaagacatccgtgactgcttatgtaaagtagttcctgatgagaaacttctccaacaggttgtattcacatggatggaggggaaagcagcaagagaagtggcagagagctttgccactggtaatttagtaagaaatcatagtgctgaggatgtctcagaccatggggagatttatgtttgttcacagcaagaatctaaacttgggagtaaaaactgtgcagaatctaatggttctcaagccgacaggcatcctatagatgatattttatactggcacaacgctatccgcatggagttacatgatataaaaaaagaaacaagaagggtgcaacagtctgggaatttttctgatatatcagccttcaatgagaggcttcagttcattgcagatgtatgcatctaccacagtatcgctgaggatcaggttgtttttcctgcagtcgatagtgagctgtcctttgtgcaggagcatgctgaagaagaacacaggtttaacaatttcaggtgtttaattcagcaattccaaatagcaggagccaaatcaactgcactggacttctactcaaaactgtgttcacatgctgataaaatattggagacaatcgaaaaacacttcagcaatgaagaaaccaaggtgcttcctcaagctaggatgtttttctctcctgaaaagcaaagggaactttcgtacaaaagtctgtgtgttatgccattgaaattattggaacgtgttttaccatggttggtgtcaaagctgagtgatgagcaggcaacttcatttcttcagaatatacgattggcagcatcaccatctgaaactgcactggtcactcttatctctggttgggcatgcaaaggccgggacaaatccaaatctggagaatatttatgcttaacatcaggtacagcaagatgcctgtcagatgatgtagatgatcagggaaaatgccgatcattctgcccatgtgcttcacacaacagctcagatctttctctgcagctacaaactgaaaatggttctaggccaggcaagcgaggaaaagatgcagtatcttttcctggtactaatggaagctactgctctcaaactgctgacattgatgcaagtccatgtagcaaaaagccttgttgtattcctgggttgagagtaaagagtagcaaccttggtattggttccctggcttctgtgaagtcctttcgctctttaccatacaattctactgctccttcaatatattcgagcctcttctcatgggagacagatgcatcattgtcttgttcggatggcatttcaaggccaattgatacaatattcaaatttcataaggcaattcgcaaggatttagagtacttagatgttgaatctggaaggctcattgatggtgatgagtcttgccttcgccaattcattggaaggttccgtttgttatggggtctttacagggctcacagcaatgctgaggatgaaattgtgttcccagcattggaatccagagaaacattgcacaatgtgagccattcatatactcttgaccacaagcaggaagaacaattattcgaagatatctctgatgttctctttcagctttcacaactacatgatagccagggccatgcccagactaaagttaatgaagtaaagcaaagctgtttccattcatctaatgacgttgattttactaggaagtataatgagcttgccacaaaacttcaggccatgtgcaagtctatccgggtcgccttgactaatcatgtccatagagaagaacttgaattgtggccgttgtttgacaaacatttttctgtggaggagcaagataaacttgtaggtcgtataattggttcaacaggtgctgaggttctccaatctatggtaccctgggttacatcagctctcactcaagaggagcagaacaaaatgcttgatacctggaagcaagcaacaaaaaatacaatgtttggggaatggctaaacgagtggtggaagggagctggaacatctgattcttcagcagaggcaccctctgctccagaagtcatttacaagataagcttgaacaaaatgaccagatgtttaagcctggctggaaggacatatttcgaatgaaccagagtgaacttgaggctgaggtgcgaaaggtttcacgagatcctacacttgacccaaggcggaaggcctatctaattcaaaatctcatgacaagccgctggatagctgctcagcaaaagttaccggaaccaaattctgaagaatgtagtgatgatgctagtatacctggatgtgcgccttcatatcgagaccaggagaaagaaatttatggttgtgaacattacaaacggaactgcaaacttgttgctgcatgctgcaacaagctgttcacatgcagattttgccatgataaagttagtgaccatacaatggaaaggaaagcaacacaggaaatgatgtgcatggtgtgcctaaagattcaacccgttggtccgttctgccaaaccccatcttgtaacagactatcgatggcaaagtactactgcaacatctgcaaatttttcgatgacgaaaggactgtgtaccactgcccgttttgtaatttgtgtcgtcttgggaaaggtcttggtgttgatttctttcattgcatgaaatgcaactgctgtcttggaatgaaattaactgagcacaaatgtcgggaaaaagggctagagacaaattgtccaatatgctgtgacttcctgtttacatcaagtgccgcagtcagagccctcccttgcggccacttcatgcattcagcttgctttcaggcatacacttgtagccactacacttgtcctatctgctgcaaatctctgggagatatggcggtgtattttggcatgcttgatgccttgttggctgctgaagagcttccggaggaataccgtgataggtgtcaggatatactgtgcaatgactgtgagaggaaaggcagatgtcgatttcactggctataccacaaatgcggctcctgtgggtcgtacaatacccgagttatcaagactgacactgcagattgctccacaccaaattagctggagggaacatttgtgcttatttgtagcctttttttttctcttatgtaaatatcttctagcgggaaggaaaaaagagatgtcctgtaggatagttaacataatttcattcgtagcgatatcagttttgtaagtgtagcagtttacaatttactaggtctagtgcgttgtactgccaaaatggacggttctgctggacaaaggacataatccgagaaaataggctagttagaacaattgctcgcgtgcatgttctacatatttcgcggttcacgtatagcag

SEQ ID NO: 32256 - DNA, 5353 bp, Zea Mays
accacagcctccgctcaacggcaggagaatcacggcgagcgcgtgctcgtgggcacccctctccatcaactggggtgcgcgatcgatcgatcaaaaccccaatccagccttctatttccgatcgagacgcaaacgaagcaggtagaaggccaaggccagcgcagacacggatggcgatgggagcgacggttcgcgcagcggctgcagatgccatggtgacgttcttgtgggtgttgtgcgcctccgcgctcgatgtctccatagcagccgtcacgtcgtaccaggggttgcaggagggcaccggccactatgcgctcctcgtcaccacgtccctcctctcggtgctcctcttcaccttcgacctcctctacggtgtgctcggtggtgccagcttcaacttcactgactttgccacctcctattccgccggactcgatagcccctccctcttctctgttgcgctccacttcctggcacggactgtcgtggtggtgaagaggaccactttgcgcgtggctcggaaggatgcctatatggcagagttagatttgtttgctaaaggattgcatgaaaggctggttcctttcctgggtcactgtcttgataaagaagaagaaaaggttcatgtgtataggtttgtccaaaatggtgacttgtcaagtgcactacacaaaaagtcaagggaggaagatgaaggcttgcaatctttggactggataaagaggttgaagattgcaacgggggtagctgaggctctttgctatctgcatcatgaatgttctccaccgatggttcatagggatgtgcaagccagcagcatccttcttgatgataaatttgatgtacgccttggtagcttgagcgagcttcctgcaattgaatcagtcttgaatgctatgaagagcaatacaaatcagcgagtatctccaatatttgctcttgtcctatgccctacaagagagcttgctattcagcttacagctgaagcaaatgtcttgttaaagtaccatgaaggaattggtgttcaatctcttattggtggcactagattcaagcttgatcagagacgattagaatctgatccatgccagccagatcatctattagatgaaaccaaccgtgctggaagcaagattagggtggaaagggctgagcgaagctcctacacgtttcaatcacagttagatggcggtgcacagttctgtgtatcacaagaggcatctaggttgacctcgctcttcttagtgttcatgcccactgcgcaagacaacaccacaacgccgatggagttggaagatttcatcaggctcgactcgatctggatgagatggactctgctcgctgaggaccgaacaccgaagccaggcagccagccgaggaagccaggcgacaggcgacgccaagtcgagaacaccctaggtggtcgctcgcaggctgcgagtgagagccgtggcggagtcgccgtccttgcccacggaggaggacacagccgccggcgcagtgggatggcgacgccgacgcccatgcccggaagcgaggggacgctcgtggcggtgatgccgcggtccccgtccccgacgccggcggaggcggggacctcggcgaccgagacgcccgtgctaatattcctttacttccacaaggcgatccgcgcggagctcgaggcgctgcacggcgccgccgtgctcctggccaccgagcgcaccggcgatgtcgcggcgctcgccgagcgctgccgctttttcttcagcatctacaaacaccactgcgatgccgaggacgcggtcatctttccagcacttgacatccgagtaaagaatgttgcagggacctattccttagagcataaaggagaaagcgatctttttagccagttatttgatctcctggaattggacatacagaatgatgatgctcttcgtagggagcttgcgtcatgtacaggcgcgatacaaacgtgtctcagccaacatatgtccaaggaggaagaacaggtctttccattgctgacaaagaaattttcatgtgaagaacaagctgatttagtgtggcaattcctctgcaacattcctgtcaatatggtagcagagttccttccatggctttcaacttctgtcacatctgatgagcaccaagacatccgtgactgcttatgtaaagtagttcctgatgagaaacttctccaacaggttgtattcacatggatggaggggaaagcagcaagagaagtggcagagagctttgccactggtaatttagtaagaaatcatagtgctgaggatgtctcagaccatggggagatttatgtttgttcacagcaagaatctaaacttgggagtaaaaactgtgcagaatctaatggttctcaagccgacaggcatcctatagatgatattttatactggcacaacgctatccgcatggagttacatgatataaaaaaagaaacaagaagggtgcaacagtctgggaatttttctgatatatcagccttcaatgagaggcttcagttcattgcagatgtatgcatctaccacagtatcgctgaggatcaggttgtttttcctgcagtcgatagtgagctgtcctttgtgcaggagcatgctgaagaagaacacaggtttaacaatttcaggtgtttaattcagcaattccaaatagcaggagccaaatcaactgcactggacttctactcaaaactgtgttcacatgctgataaaatattggagacaatcgaaaaacacttcagcaatgaagaaaccaaggtgcttcctcaagctaggatgtttttctctcctgaaaagcaaagggaactttcgtacaaaagtctgtgtgttatgccattgaaattattggaacgtgttttaccatggttggtgtcaaagctgagtgatgagcaggcaacttcatttcttcagaatatacgattggcagcatcaccatctgaaactgcactggtcactcttatctctggttgggcatgcaaaggccgggacaaatccaaatctggagaatatttatgcttaacatcaggtacagcaagatgcctgtcagatgatgtagatgatcagggaaaatgccgatcattctgcccatgtgcttcacacaacagctcagatctttctctgcagctacaaactgaaaatggttctaggccaggcaagcgaggaaaagatgcagtatcttttcctggtactaatggaagctactgctctcaaactgctgacattgatgcaagtccatgtagcaaaaagccttgttgtattcctgggttgagagtaaagagtagcaaccttggtattggttccctggcttctgtgaagtcctttcgctctttaccatacaattctactgctccttcaatatattcgagcctcttctcatgggagacagatgcatcattgtcttgttcggatggcatttcaaggccaattgatacaatattcaaatttcataaggcaattcgcaaggatttagagtacttagatgttgaatctggaaggctcattgatggtgatgagtcttgccttcgccaattcattggaaggttccgtttgttatggggtctttacagggctcacagcaatgctgaggatgaaattgtgttcccagcattggaatccagagaaacattgcacaatgtgagccattcatatactcttgaccacaagcaggaagaacaattattcgaagatatctctgatgttctctttcagctttcacaactacatgatagccagggccatgcccagactaaagttaatgaagtaaagcaaagctgtttccattcatctaatgacgttgattttactaggaagtataatgagcttgccacaaaacttcaggccatgtgcaagtctatccgggtcgccttgactaatcatgtccatagagaagaacttgaattgtggccgttgtttgacaaacatttttctgtggaggagcaagataaacttgtaggtcgtataattggttcaacaggtgctgaggttctccaatctatggtaccctgggttacatcagctctcactcaagaggagcagaacaaaatgcttgatacctggaagcaagcaacaaaaaatacaatgtttggggaatggctaaacgagtggtggaagggagctggaacatctgattcttcagcagaggcaccctctgctccagaagatagtcatttacaagataagcttgaacaaaatgaccagatgtttaagcctggctggaaggacatatttcgaatgaaccagagtgaacttgaggctgaggtgcgaaaggtttcacgagatcctacacttgacccaaggcggaaggcctatctaattcaaaatctcatgacaagccgctggatagctgctcagcaaaagttaccggaaccaaattctgaagaatgtagtgatgatgctagtatacctggatgtgcgccttcatatcgagaccaggagaaagaaatttatggttgtgaacattacaaacggaactgcaaacttgttgctgcatgctgcaacaagctgttcacatgcagattttgccatgataaagttagtgaccatacaatggaaaggaaagcaacacaggaaatgatgtgcatggtgtgcctaaagattcaacccgttggtccgttctgccaaaccccatcttgtaacagactatcgatggcaaagtactactgcaacatctgcaaatttttcgatgacgaaagggctagagacaaattgtccaatatgctgtgacttcctgtttacatcaagtgccgcagtcagagccctcccttgcggccacttcatgcattcagcttgctttcaggcatacacttgtagccactacacttgtcctatctgctgcaaatctctgggagatatggcggtgtattttggcatgcttgatgccttgttggctgctgaagagcttccggaggaataccgtgataggtgtcaggatatactgtgcaatgactgtgagaggaaaggcagatgtcgatttcactggctataccacaaatgcggctcctgtgggtcgtacaatacccgagttatcaagactgacactgcagattgctccacaccaaattagctggagggaacatttgtgcttatttgtagcctttttttttctcttatgtaaatatcttctagcgggaaggaaaaaagagatgtcctgtaggatagttaacataatttcattcgtagcgatatcagttttgtaagtgtagcagtttacaatttactaggtctagtgcgttgtactgccaaaatggacggttctgctggacaaaggacataatccgagaaaataggctagttagaacaattgctcgcgtgcatgttctacatatttcgcggttcacgtatagcag

SEQ ID NO: 32257 - DNA, 5353 bp, Zea Mays
accacagcctccgctcaacggcaggagaatcacggcgagcgcgtgctcgtgggcacccctctccatcaactggggtgcgcgatcgatcgatcaaaaccccaatccagccttctatttccgatcgagacgcaaacgaagcaggtagaaggccaaggccagcgcagacacggatggcgatgggagcgacggttcgcgcagcggctgcagatgccatggtgacgttcttgtgggtgttgtgcgcctccgcgctcgatgtctccatagcagccgtcacgtcgtaccaggggttgcaggagggcaccggccactatgcgctcctcgtcaccacgtccctcctctcggtgctcctcttcaccttcgacctcctctacggtgtgctcggtggtgccagcttcaacttcactgactttgccacctcctattccgccggactcgatagcccctccctcttctctgttgcgctccacttcctggcacggactgtcgtggtggtgaagaggaccactttgcgcgtggctcggaaggatgcctatatggcagagttagatttgtttgctaaaggattgcatgaaaggctggttcctttcctgggtcactgtcttgataaagaagaagaaaaggttcatgtgtataggtttgtccaaaatggtgacttgtcaagtgcactacacaaaaagtcaagggaggaagatgaaggcttgcaatctttggactggataaagaggttgaagattgcaacgggggtagctgaggctctttgctatctgcatcatgaatgttctccaccgatggttcatagggatgtgcaagccagcagcatccttcttgatgataaatttgatgtacgccttggtagcttgagcgagcttcctgcaattgaatcagtcttgaatgctatgaagagcaatacaaatcagcgagtatctccaatatttgctcttgtcctatgccctacaagagagcttgctattcagcttacagctgaagcaaatgtcttgttaaagtaccatgaaggaattggtgttcaatctcttattggtggcactagattcaagcttgatcagagacgattagaatctgatccatgccagccagatcatctattagatgaaaccaaccgtgctggaagcaagattagggtggaaagggctgagcgaagctcctacacgtttcaatcacagttagatggcggtgcacagttctgtgtatcacaagaggcatctaggttgacctcgctcttcttagtgttcatgcccactgcgcaagacaacaccacaacgccgatggagttggaagatttcatcaggctcgactcgatctggatgagatggactctgctcgctgaggaccgaacaccgaagccaggcagccagccgaggaagccaggcgacaggcgacgccaagtcgagaacaccctaggtggtcgctcgcaggctgcgagtgagagccgtggcggagtcgccgtccttgcccacggaggaggacacagccgccggcgcagtgggatggcgacgccgacgcccatgcccggaagcgaggggacgctcgtggcggtgatgccgcggtccccgtccccgacgccggcggaggcggggacctcggcgaccgagacgcccgtgctaatattcctttacttccacaaggcgatccgcgcggagctcgaggcgctgcacggcgccgccgtgctcctggccaccgagcgcaccggcgatgtcgcggcgctcgccgagcgctgccgctttttcttcagcatctacaaacaccactgcgatgccgaggacgcggtcatctttccagcacttgacatccgagtaaagaatgttgcagggacctattccttagagcataaaggagaaagcgatctttttagccagttatttgatctcctggaattggacatacagaatgatgatgctcttcgtagggagcttgcgtcatgtacaggcttttctttccttcctctccctgcttctgttctgctgtttatcaggctggtctttccattgctgacaaagaaattttcatgtgaagaacaagctgatttagtgtggcaattcctctgcaacattcctgtcaatatggtagcagagttccttccatggctttcaacttctgtcacatctgatgagcaccaagacatccgtgactgcttatgtaaagtagttcctgatgagaaacttctccaacaggttgtattcacatggatggaggggaaagcagcaagagaagtggcagagagctttgccactggtaatttagtaagaaatcatagtgctgaggatgtctcagaccatggggagatttatgtttgttcacagcaagaatctaaacttgggagtaaaaactgtgcagaatctaatggttctcaagccgacaggcatcctatagatgatattttatactggcacaacgctatccgcatggagttacatgatataaaaaaagaaacaagaagggtgcaacagtctgggaatttttctgatatatcagccttcaatgagaggcttcagttcattgcagatgtatgcatctaccacagtatcgctgaggatcaggttgtttttcctgcagtcgatagtgagctgtcctttgtgcaggagcatgctgaagaagaacacaggtttaacaatttcaggtgtttaattcagcaattccaaatagcaggagccaaatcaactgcactggacttctactcaaaactgtgttcacatgctgataaaatattggagacaatcgaaaaacacttcagcaatgaagaaaccaaggtgcttcctcaagctaggatgtttttctctcctgaaaagcaaagggaactttcgtacaaaagtctgtgtgttatgccattgaaattattggaacgtgttttaccatggttggtgtcaaagctgagtgatgagcaggcaacttcatttcttcagaatatacgattggcagcatcaccatctgaaactgcactggtcactcttatctctggttgggcatgcaaaggccgggacaaatccaaatctggagaatatttatgcttaacatcaggtacagcaagatgcctgtcagatgatgtagatgatcagggaaaatgccgatcattctgcccatgtgcttcacacaacagctcagatctttctctgcagctacaaactgaaaatggttctaggccaggcaagcgaggaaaagatgcagtatcttttcctggtactaatggaagctactgctctcaaactgctgacattgatgcaagtccatgtagcaaaaagccttgttgtattcctgggttgagagtaaagagtagcaaccttggtattggttccctggcttctgtgaagtcctttcgctctttaccatacaattctactgctccttcaatatattcgagcctcttctcatgggagacagatgcatcattgtcttgttcggatggcatttcaaggccaattgatacaatattcaaatttcataaggcaattcgcaaggatttagagtacttagatgttgaatctggaaggctcattgatggtgatgagtcttgccttcgccaattcattggaaggttccgtttgttatggggtctttacagggctcacagcaatgctgaggatgaaattgtgttcccagcattggaatccagagaaacattgcacaatgtgagccattcatatactcttgaccacaagcaggaagaacaattattcgaagatatctctgatgttctctttcagctttcacaactacatgatagccagggccatgcccagactaaagttaatgaagtaaagcaaagctgtttccattcatctaatgacgttgattttactaggaagtataatgagcttgccacaaaacttcaggccatgtgcaagtctatccgggtcgccttgactaatcatgtccatagagaagaacttgaattgtggccgttgtttgacaaacatttttctgtggaggagcaagataaacttgtaggtcgtataattggttcaacaggtgctgaggttctccaatctatggtaccctgggttacatcagctctcactcaagaggagcagaacaaaatgcttgatacctggaagcaagcaacaaaaaatacaatgtttggggaatggctaaacgagtggtggaagggagctggaacatctgattcttcagcagaggcaccctctgctccagaagatagtcatttacaagataagcttgaacaaaatgaccagatgtttaagcctggctggaaggacatatttcgaatgaaccagagtgaacttgaggctgaggtgcgaaaggtttcacgagatcctacacttgacccaaggcggaaggcctatctaattcaaaatctcatgacaagccgctggatagctgctcagcaaaagttaccggaaccaaattctgaagaatgtagtgatgatgctagtatacctggatgtgcgccttcatatcgagaccaggagaaagaaatttatggttgtgaacattacaaacggaactgcaaacttgttgctgcatgctgcaacaagctgttcacatgcagattttgccatgataaagttagtgaccatacaatggaaaggaaagcaacacaggaaatgatgtgcatggtgtgcctaaagattcaacccgttggtccgttctgccaaaccccatcttgtaacagactatcgatggcaaagtactactgcaacatctgcaaatttttcgatgacgaaagggctagagacaaattgtccaatatgctgtgacttcctgtttacatcaagtgccgcagtcagagccctcccttgcggccacttcatgcattcagcttgctttcaggcatacacttgtagccactacacttgtcctatctgctgcaaatctctgggagatatggcggtgtattttggcatgcttgatgccttgttggctgctgaagagcttccggaggaataccgtgataggtgtcaggatatactgtgcaatgactgtgagaggaaaggcagatgtcgatttcactggctataccacaaatgcggctcctgtgggtcgtacaatacccgagttatcaagactgacactgcagattgctccacaccaaattagctggagggaacatttgtgcttatttgtagcctttttttttctcttatgtaaatatcttctagcgggaaggaaaaaagagatgtcctgtaggatagttaacataatttcattcgtagcgatatcagttttgtaagtgtagcagtttacaatttactaggtctagtgcgttgtactgccaaaatggacggttctgctggacaaaggacataatccgagaaaataggctagttagaacaattgctcgcgtgcatgttctacatatttcgcggttcacgtatagcag

SEQ ID NO: 32258 - DNA, 1993 bp, Zea Mays
gtaagaaaagagagagagagagaagtaacgcgcgcggagaagcaaactgaaaacagcacccgctcatgcgttcgcgctgcacacctgtttgctgtttttcttctcccgttcacctcgcgtgcgcgacaactagggcgaccgccgacgctctacgtccagctgcccatgtcttcgtcgggctctttgccggcgacaggaacccacaacaccaggtcaacaccatttcatgtaattcatattttgggaaacttcatgaggatttggtctgtttactccttgtatagctccttatccaacagtggagattcaatagttggctttatcttcagttgtcttgtacccagttcaatcatattcttggtcttacagaaaccttggagaggccggcctttgcccaactcacaggttgttcctacagttgtcaatggaggaatcatggcattctactttgtcttatggggtaaaggacttcttgcttgtggcccactagttgctctactggcagagtatgcaggtgctgttcttggagttctctctgctgctttatatggaaggaaagttaacatctggaaaaagattggtggacttgctgctatgttagtagcatattatctattgtcaattggatggtctacaagaacacattctcctttatatagctttggaagtgaaccaattgagaaggcaagacaaacatttggagtgaaagaaatggtggtgccaattaccgctgggatcttatctgctctgaggagagtattagctcggcgtgtctctctcaagaatcaacttaaaaggcggctccatgctataactattgcttctgctacttgttttctttttccgtttgccatgtgggatacaatcctaggctcagcgtccgacagcatagttaaatttcagctaccaaattgggcatacttgagtactgttttgttcggaatggtgcttatattctatgtcgacaatgttactgaagaaaagttgcatctggtcttctcttctccaaggcacttaatggtttcaacagggtgcatcatcgtgttggagatagtgtaccaaatggatttctccctttttggatttctggtctgttctgttattttgggattaggtatttttgaaacaacctccttggaacgctcaaagaaaagccctttggagacccatgaactatcgaatggggtgttccacaatcaattgccaattacagaacttccaagctgaagaatatatgacctgggtgagtgagatgcattgaaaaaaatttgtgtttgcttaagtatgatttttgaatgatttatctgttaggtcgagattgtggtgcaagttaatattagatagcatgtttcaatggtggactgttacggtttgagcattagtatcgattgcggaagaatttcttcctgacatgtttatatagcccctcaaccaatagactttaagccccttttccctattcttgtaccccagctgccacatggtgaatggccgcggttgcacacctcaaaatcagtggctcgattctttgtgcgaaggtttagaaccacagacagaaagcacggatatttttgacctgcaaatttgtctttgtgatcttccattcttgttggccacctgcatcctgtacatgccaactactcccagccccagtagatgtgtatcggtatcccccttggagatattgcaattgtcacagcatcctgtctcccgacttgggtagttgcgaaattttgcttttctcgcttggagacgcagatggttaaaaggcggctgttttgactgctgtagcttgcattgatacatgtaagtatgtgacccgtccatgatatgattaacatgccgactttatctttgacctgtccgtgactgcaatcagcgagtctcctgcatgctcgacagaatgcacatgtaggcataccattatgggaaatggtttgaaccccttgattaataataaggtgtttgatttgaggagtgagttcatcatcta

SEQ ID NO: 32259 - DNA, 1770 bp, Zea Mays
gtaagaaaagagagagagagagaagtaacgcgcgcggagaagcaaactgaaaacagcacccgctcatgcgttcgcgctgcacacctgtttgctgtttttcttctcccgttcacctcgcgtgcgcgacaactagggcgaccgccgacgctctacgtccagctgcccatgtcttcgtcgggctctttgccggcgacaggaacccacaacaccagttgtcttgtacccagttcaatcatattcttggtcttacagaaaccttggagaggccggcctttgcccaactcacaggttgttcctacagttgtcaatggaggaatcatggcattctactttgtcttatgggtgctctactggcagagtatgcaggtgctgttcttggagttctctctgctgctttatatggaaggaaagttaacatctggaaaaagatagctttggaagtgaaccaattgagaaggcaagacaaacatttggagtgaaagaaatggtggtgccaattaccgctgggatcttatctgctctgaggagagtattagctcggcgtgtctctctcaagaatcaacttaaaaggcggctccatgctataactattgcttctgctacttgttttctttttccgtttgccatgtgggatacaatcctaggctcagcgtccgacagcatagttaaatttcagctaccaaattgggcatacttgagtactgttttgttcggaatggtgcttatattctatgtcgacaatgttactgaagaaaagttgcatctggtcttctcttctccaaggcacttaatggtttcaacagggtgcatcatcgtgttggagatagtgtaccaaatggatttctccctttttggatttctggtctgttctgttattttgggattaggtatttttgaaacaacctccttggaacgctcaaagaaaagccctttggagacccatgaactatcgaatggggtgttccacaatcaattgccaattacagaacttccaagctgaagaatatatgacctgggtcgagattgtggtgcaagttaatattagatagcatgtttcaatggtggactgttacggtttgagcattagtatcgattgcggaagaatttcttcctgacatgtttatatagcccctcaaccaatagactttaagccccttttccctattcttgtaccccagctgccacatggtgaatggccgcggttgcacacctcaaaatcagtggctcgattctttgtgcgaaggtttagaaccacagacagaaagcacggatatttttgacctgcaaatttgtctttgtgatcttccattcttgttggccacctgcatcctgtacatgccaactactcccagccccagtagatgtgtatcggtatcccccttggagatattgcaattgtcacagcatcctgtctcccgacttgggtagttgcgaaattttgcttttctcgcttggagacgcagatggttaaaaggcggctgttttgactgctgtagctgtggtgcaatccacaggaataaaatattgtagaagtagtagaagccggtatggattaaagttgtgaccgaagtgcattgatacatgtaagtatgtgacccgtccatgatatgattaacatgccgactttatctttgacctgtccgtgactgcaatcagcgagtctcctgcatgctcgacagaatgcacatgtaggcataccattatgggaaatggtttgaaccccttgattaataataaggtgtttgatttgaggagtgagttcatcatcta

SEQ ID NO: 32260 - DNA, 1790 bp, Zea Mays
gtaagaaaagagagagagagagaagtaacgcgcgcggagaagcaaactgaaaacagcacccgctcatgcgttcgcgctgcacacctgtttgctgtttttcttctcccgttcacctcgcgtgcgcgacaactagggcgaccgccgacgctctacgtccagctgcccatgtcttcgtcgggctctttgccggcgacaggaacccacaacaccaggtcaacaccatttcatgtaattcatattttgggaaacttcatgaggatttggtctgtttactccttgtatagctccttatccaacagtggagattcaatagttggctttatcttcagttgtcttgtacccagttcaatcatattcttggtcttacagaaaccttggagaggccggcctttgcccaactcacaggttgttcctacagttgtcaatggaggaatcatggcattctactttgtcttatgggagtatgcaggtgctgttcttggagttctctctgctgctttatatggaaggaaagttaacatctggaaaaagattggtggacttgctgctatgttagtagcatattatctattgtcaattggatggtctacaagaacacattctcctttatatagctttggaagtgaaccaattgagaaggcaagacaaacatttggagtgaaagaaatggtggtgccaattaccgctgggatcttatctgctctgaggagagtattagctcggcgtgtctctctcaagaatcaacttaaaaggcggctccatgctataactattgcttctgctacttgttttctttttccgtttgccatgtgggatacaatcctaggctcagcgtccgacagcatagttaaatttcagctaccaaattgggcatacttgagtactgttttgttcggaatggtgcttatattctatgtcgacaatgttactgaagaaaagttgcatctggtcttctcttctccaaggcacttaatggtttcaacagggtgcatcatcgtgttggagatagtgtaccaaatggatttctccctttttggatttctggtctgttctgttattttgggattaggtatttttgaaacaacctccttggaacgctcaaagaaaagccctttggagacccatgaactatcgaatggggtgttccacaatcaattgccaattacagaacttccaagctgaagaatatatgacctggctgccacatggtgaatggccgcggttgcacacctcaaaatcagtggctcgattctttgtgcgaaggtttagaaccacagacagaaagcacggatatttttgacctgcaaatttgtctttgtgatcttccattcttgttggccacctgcatcctgtacatgccaactactcccagccccagtagatgtgtatcggtatcccccttggagatattgcaattgtcacagcatcctgtctcccgacttgggtagttgcgaaattttgcttttctcgcttggagacgcagatggttaaaaggcggctgttttgactgctgtagctgtggtgcaatccacaggaataaaatattgtagaagtagtagaagccggtatggattaaagttgtgaccgaagtgcattgatacatgtaagtatgtgacccgtccatgatatgattaacatgccgactttatctttgacctgtccgtgactgcaatcagcgagtctcctgcatgctcgacagaatgcacatgtaggcataccattatgggaaatggtttgaaccccttgattaataataaggtgtttgatttgaggagtgagttcatcatcta

SEQ ID NO: 32261 - DNA, 1845 bp, Zea Mays
gtaagaaaagagagagagagagaagtaacgcgcgcggagaagcaaactgaaaacagcacccgctcatgcgttcgcgctgcacacctgtttgctgtttttcttctcccgttcacctcgcgtgcgcgacaactagggcgaccgccgacgctctacgtccagctgcccatgtcttcgtcgggctctttgccggcgacaggaacccacaacaccagttgtcttgtacccagttcaatcatattcttggtcttacagaaaccttggagaggccggcctttgcccaactcacaggttgttcctacagttgtcaatggaggaatcatggcattctactttgtcttatgggtgctctactggcagagtatgcaggtgctgttcttggagttctctctgctgctttatatggaaggaaagttaacatctggaaaaagattggtggacttgctgctatgttagtagcatattatctattgtcaattggatggtctacaagaacacattctcctttatatagctttggaagtgaaccaattgagaaggcaagacaaacatttggagtgaaagaaatggtggtgccaattaccgctgggatcttatctgctctgaggagagtattagctcggcgtgtctctctcaagaatcaacttaaaaggcggctccatgctataactattgcttctgctacttgttttctttttccgtttgccatgtgggatacaatcctaggctcagcgtccgacagcatagttaaatttcagctaccaaattgggcatacttgagtactgttttgttcggaatggtgcttatattctatgtcgacaatgttactgaagaaaagttgcatctggtcttctcttctccaaggcacttaatggtttcaacagggtgcatcatcgtgttggagatagtgtaccaaatggatttctccctttttggatttctggtctgttctgttattttgggattaggtatttttgaaacaacctccttggaacgctcaaagaaaagccctttggagacccatgaactatcgaatggggtgttccacaatcaattgccaattacagaacttccaagctgaagaatatatgacctgggtgagtgagatgcattgaaaaaaatttgtgtttgcttaagtatgatttttgaatgatttatctgttaggtcgagattgtggtgcaagttaatattagatagcatgtttcaatggtggactgttacggtttgagcattagtatcgattgcggaagaatttcttcctgacatgtttatatagcccctcaaccaatagactttaagccccttttccctattcttgtaccccagctgccacatggtgaatggccgcggttgcacacctcaaaatcagtggctcgattctttgtgcgaaggtttagaaccacagacagaaagcacggatatttttgacctgcaaatttgtctttgtgatcttccattcttgttggccacctgcatcctgtacatgccaactactcccagccccagtagatgtgtatcggtatcccccttggagatattgcaattgtcacagcatcctgtctcccgacttgggtagttgcgaaattttgcttttctcgcttggagacgcagatggttaaaaggcggctgttttgactgctgtagcttgcattgatacatgtaagtatgtgacccgtccatgatatgattaacatgccgactttatctttgacctgtccgtgactgcaatcagcgagtctcctgcatgctcgacagaatgcacatgtaggcataccattatgggaaatggtttgaaccccttgattaataataaggtgtttgatttgaggagtgagttcatcatcta

SEQ ID NO: 32262 - DNA, 1943 bp, Zea Mays
gtaagaaaagagagagagagagaagtaacgcgcgcggagaagcaaactgaaaacagcacccgctcatgcgttcgcgctgcacacctgtttgctgtttttcttctcccgttcacctcgcgtgcgcgacaactagggcgaccgccgacgctctacgtccagctgcccatgtcttcgtcgggctctttgccggcgacaggaacccacaacaccagttgtcttgtacccagttcaatcatattcttggtcttacagaaaccttggagaggccggcctttgcccaactcacaggttgttcctacagttgtcaatggaggaatcatggcattctactttgtcttatggggtaaaggacttcttgcttgtggcccactagtgtatgtatccagttctcttagcaccatgattttttcacgtagctgcatggtctatggtgccgtgcatttatgccagggaatatctagttcaatcaccacatatgtgcaatgtttaaaccttgctgcgagctagtggtcatcagatcattgtggaaacaatttacacttgatggacatcaactgtaggacatttctctggcgtccttacctgttgacctaacacattgctctactggcagagtatgcaggtgctgttcttggagttctctctgctgctttatatggaaggaaagttaacatctggaaaaagattggtggacttgctgctatgttagtagcatattatctattgtcaattggatggtctacaagaacacattctcctttatatagctttggaagtgaaccaattgagaaggcaagacaaacatttggagtgaaagaaatggtggtgccaattaccgctgggatcttatctgctctgaggagagtattagctcggcgtgtctctctcaagaatcaacttaaaaggcggctccatgctataactattgcttctgctacttgttttctttttccgtttgccatgtgggatacaatcctaggctcagcgtccgacagcatagttaaatttcagctaccaaattgggcatacttgagtactgttttgttcggaatggtgcttatattctatgtcgacaatgttactgaagaaaagttgcatctggtcttctcttctccaaggcacttaatggtttcaacagggtgcatcatcgtgttggagatagtgtaccaaatggatttctccctttttggatttctggtctgttctgttattttgggattaggtatttttgaaacaacctccttggaacgctcaaagaaaagccctttggagacccatgaactatcgaatggggtgttccacaatcaattgccaattacagaacttccaagctgaagaatatatgacctggctgccacatggtgaatggccgcggttgcacacctcaaaatcagtggctcgattctttgtgcgaaggtttagaaccacagacagaaagcacggatatttttgacctgcaaatttgtctttgtgatcttccattcttgttggccacctgcatcctgtacatgccaactactcccagccccagtagatgtgtatcggtatcccccttggagatattgcaattgtcacagcatcctgtctcccgacttgggtagttgcgaaattttgcttttctcgcttggagacgcagatggttaaaaggcggctgttttgactgctgtagctgtggtgcaatccacaggaataaaatattgtagaagtagtagaagccggtatggattaaagttgtgaccgaagtgcattgatacatgtaagtatgtgacccgtccatgatatgattaacatgccgactttatctttgacctgtccgtgactgcaatcagcgagtctcctgcatgctcgacagaatgcacatgtaggcataccattatgggaaatggtttgaaccccttgattaataataaggtgtttgatttgaggagtgagttcatcatcta

SEQ ID NO: 32263 - DNA, 2117 bp, Zea Mays
gtaagaaaagagagagagagagaagtaacgcgcgcggagaagcaaactgaaaacagcacccgctcatgcgttcgcgctgcacacctgtttgctgtttttcttctcccgttcacctcgcgtgcgcgacaactagggcgaccgccgacgctctacgtccagctgcccatgtcttcgtcgggctctttgccggcgacaggaacccacaacaccagttcccggagctctggtcttttgcctcggtcaaagagattaacatccatcaaactcgattagcttccccaaatgaaatgtttcatacccccttctgctgaagcgttcgagcaacttcttcaacttcaagacacccttggtcaacaccatttcatgtaattcatattttgggaaacttcatgaggatttggtctgtttactccttgtatagctccttatccaacagtggagattcaatagttggctttatcttcagttgtcttgtacccagttcaatcatattcttggtcttacagaaaccttggagaggccggcctttgcccaactcacaggttgttcctacagttgtcaatggaggaatcatggcattctactttgtcttatgggtgctctactggcagagtatgcaggtgctgttcttggagttctctctgctgctttatatggaaggaaagttaacatctggaaaaagattggtggacttgctgctatgttagtagcatattatctattgtcaattggatggtctacaagaacacattctcctttatgtatcctactacatagagatagctttggaagtgaaccaattgagaaggcaagacaaacatttggagtgaaagaaatggtggtgccaattaccgctgggatcttatctgctctgaggagagtattagctcggcgtgtctctctcaagaatcaacttaaaaggcggctccatgctataactattgcttctgctacttgttttctttttccgtttgccatgtgggatacaatcctaggctcagcgtccgacagcatagttaaatttcagctaccaaattgggcatacttgagtactgttttgttcggaatggtgcttatattctatgtcgacaatgttactgaagaaaagttgcatctggtcttctcttctccaaggcacttaatggtttcaacagggtgcatcatcgtgttggagatagtgtaccaaatggatttctccctttttggatttctggtctgttctgttattttgggattaggtatttttgaaacaacctccttggaacgctcaaagaaaagccctttggagacccatgaactatcgaatggggtgttccacaatcaattgccaattacagaacttccaagctgaagaatatatgacctgggtgagtgagatgcattgaaaaaaatttgtgtttgcttaagtatgatttttgaatgatttatctgttaggtcgagattgtggtgcaagttaatattagatagcatgtttcaatggtggactgttacggtttgagcattagtatcgattgcggaagaatttcttcctgacatgtttatatagcccctcaaccaatagactttaagccccttttccctattcttgtaccccagctgccacatggtgaatggccgcggttgcacacctcaaaatcagtggctcgattctttgtgcgaaggtttagaaccacagacagaaagcacggatatttttgacctgcaaatttgtctttgtgatcttccattcttgttggccacctgcatcctgtacatgccaactactcccagccccagtagatgtgtatcggtatcccccttggagatattgcaattgtcacagcatcctgtctcccgacttgggtagttgcgaaattttgcttttctcgcttggagacgcagatggttaaaaggcggctgttttgactgctgtagcttgcattgatacatgtaagtatgtgacccgtccatgatatgattaacatgccgactttatctttgacctgtccgtgactgcaatcagcgagtctcctgcatgctcgacagaatgcacatgtaggcataccattatgggaaatggtttgaaccccttgattaataataaggtgtttgatttgaggagtgagttcatcatcta

SEQ ID NO: 32264 - DNA, 1876 bp, Zea Mays
gtaagaaaagagagagagagagaagtaacgcgcgcggagaagcaaactgaaaacagcacccgctcatgcgttcgcgctgcacacctgtttgctgtttttcttctcccgttcacctcgcgtgcgcgacaactagggcgaccgccgacgctctacgtccagctgcccatgtcttcgtcgggctctttgccggcgacaggaacccacaacaccagttgtcttgtacccagttcaatcatattcttggtcttacagaaaccttggagaggccggcctttgcccaactcacaggttgttcctacagttgtcaatggaggaatcatggcattctactttgtcttatggggtaaaggacttcttgcttgtggcccactagttgctctactggcagagtatgcaggtgctgttcttggagttctctctgctgctttatatggaaggaaagttaacatctggaaaaagattggtggacttgctgctatgttagtagcatattatctattgtcaattggatggtctacaagaacacattctcctttatatagctttggaagtgaaccaattgagaaggcaagacaaacatttggagtgaaagaaatggtggtgccaattaccgctgggatcttatctgctctgaggagagtattagctcggcgtgtctctctcaagaatcaacttaaaaggcggctccatgctataactattgcttctgctacttgttttctttttccgtttgccatgtgggatacaatcctaggctcagcgtccgacagcatagttaaatttcagctaccaaattgggcatacttgagtactgttttgttcggaatggtgcttatattctatgtcgacaatgttactgaagaaaagttgcatctggtcttctcttctccaaggcacttaatggtttcaacagggtgcatcatcgtgttggagatagtgtaccaaatggatttctccctttttggatttctggtctgttctgttattttgggattaggtatttttgaaacaacctccttggaacgctcaaagaaaagccctttggagacccatgaactatcgaatggggtgttccacaatcaattgccaattacagaacttccaagctgaagaatatatgacctgggtgagtgagatgcattgaaaaaaatttgtgtttgcttaagtatgatttttgaatgatttatctgttaggtcgagattgtggtgcaagttaatattagatagcatgtttcaatggtggactgttacggtttgagcattagtatcgattgcggaagaatttcttcctgacatgtttatatagcccctcaaccaatagactttaagccccttttccctattcttgtaccccagctgccacatggtgaatggccgcggttgcacacctcaaaatcagtggctcgattctttgtgcgaaggtttagaaccacagacagaaagcacggatatttttgacctgcaaatttgtctttgtgatcttccattcttgttggccacctgcatcctgtacatgccaactactcccagccccagtagatgtgtatcggtatcccccttggagatattgcaattgtcacagcatcctgtctcccgacttgggtagttgcgaaattttgcttttctcgcttggagacgcagatggttaaaaggcggctgttttgactgctgtagcttgcattgatacatgtaagtatgtgacccgtccatgatatgattaacatgccgactttatctttgacctgtccgtgactgcaatcagcgagtctcctgcatgctcgacagaatgcacatgtaggcataccattatgggaaatggtttgaaccccttgattaataataaggtgtttgatttgaggagtgagttcatcatcta

SEQ ID NO: 32265 - DNA, 5540 bp, Zea Mays
gcattccattctcaactacctcccaaatactaggatgaagagagaaaaggtgactacacattttgtgactccaaaaagcgtagtcctctccatcaaagtgtggaggtttaccaagaggaataaaagcaaatgggcattggaattatacggaatacgagaataatcaaatgaaaattttgagttaaccgatttctttttatcgtcgtagtcatcgtctcttggggaagaagaagactcgtcgctgtcgtagtagatgatcttcttgatgcgcctcttcttcttcccgtccttcttcttgtgactcgagccagagtcagtgggcttgtcgtctcttggctcgttgaagatggactccttctccttatcgttgaccaccatcccctttcccttaggatccatctcttcgggcgattagtccctttcatgaagagaacagctctgataccaattgagagcacctagagggggggtgaataggtgatcctataaaaatcaaatacttgtagccacaaaacttggttaagagttagtgcaataggaccaagtggctaaggaccgagcttttgtgaaacacaatgatcacaaagtaagacaacacaaaagacacggtgatttatcccgtggttcggccaagtataacacttgcctactccacgttgtggcatcccaatggatgagggttgcactcaacccctttcaagtgatccaatgatcaacttgaataccacggtgttttcctttcttatactttttcccgtttgcgaggaatctccacaacttggagcctctcgcccttacaattgatgatcacaaagaagcatggaagtaagggaggggagagcaacacacaagactcaaaacaagagcacaatcacgcacacaaagccacaacttgagctcacaacacaactcgaagagttctctactcaaacggggctcaagtcactgtctcaaagaatcgaatgcgcgagaatggagccttggtgattaggaatgatcaaggaatgcttgggtgactcctccatgcgcctaggggtcccttttatagccccaaggcaactaggagtcgttggaacccaacaaggaaggcaattcttgccttctgtcgggtggcgcaccggacagtccggtgcaccaccggacagccactgtagcatgtccggtgcggatctccttccattcctggcgcagccgaccgttggatcttcggcctggttggcgcaccggacactgtccggtgcacaccggacagtccggtgcccctgccgaccgttggagcgggtcacgcgtcgcccgcggatttggcggccgaccgttgcgctggcggccgttggctcaccggatagtccggtgaattatagtcgtacgccgccacagtttcccgagagtggccagttcaccggagaccagtctggcgcaccggacactgtccggtgtgccagactgagaagagtcttggctgcttcgagccaagttcttctcttctttttttctctgattcttgcacttggacaaatatattagtacacaaaaaccaatgtactaagtctagaatcataccttcttgttgatttgcacttcattcatcatttggcatataataatccacttaatatgacttggacacttaatcaccaaaatatactagaaatggcccaagggcacatttccctttcagcaactcaaaagccacaatggtacttcttgccatctcgttccttaggtgaatgggttggaaagcaccaaggaggtttatgatacacttaagacggtgcacgaaggtgacaagatcattaagttggaggacctagaaggggatctaggaaggtttgccatgaacaagagagaagggccacaagaaatgtataaccagcttaagtccttggtgaatcaagtctgcaattacagggtacgagaagatgatcctagaggaggtgcttgggaagtttcctagccatgagatgatggttaaagactcaaaggacattgaagtttaactcaaggcaactttgccatcatcggccagaaccaatcgccttgaaggccacaagtgtaaagaaggaggagcctccaagcaacgaggaaactatcgatgttttcgaactcgatggtcgaggaaatgaccctaaccatcaaaagcttccgacaaatcctaaggaacaagaatggcaaggactacaagccccttggtaagagggcttgctacaaatgtggtaagactggccattccatcgctaattgtccatatgcaaaagatgatgatgataaggaagagaacaagaagggaaagaaaaaagtttgagaagaagaaattcttcgtcaacaaaaagaagggaggtgaagcccacatcgggaaggagtgggactcggacgaggactcctccgacgataaaggacttgccacacccgccttcaacaaaagcgccctcttccccaagatcgaccacacatacctgatgacaaaggagagtaagaaaaaggtacaatctagaacctctcgtaagtcactttctcaaatgatgaatcagtgatgaggaagatatgaacaaaaattttaagggtcttaaaagagatcaagttgctaaagcaaatgaatttattaagatatcaatgagaaggatgaagtccaagaatcagttttcacagtttcacagttgtcatgtatcacccttcctcttctttttctcgctttatgcaaaaataaggtaaaattatgcataaataagggtttaaatcttggttgttggctctacattcacacccacctaaccaacaaaacgcacatatatttgtgttttgttaaaacaaagtctactcatatgatatacaaaaaacgtagcaatacacatgcatgtgactagtataatcaatttgacaagagtgaatcgatgtatcagtctagaccaaccatgtacatccaaacttcttaccatcctagactcccatttggccgtggcactatgggtgcgtttggttcagaaaagcaaaagctaaaccaaaagggttcagcttttctgctgctactttaaaaagcgagttttgtaatacaaatttgaaagcagctttgaccctactttttcacgttttccaagttcgatatattaattaaaacactactatgaataaagttaaataaaatgcatataaatagtatatagtttgttcacagtagataactcaacagtttgatccaaacaccttttatcttttttatagcagacaactcaaagtagttttttcacatcaaacattttacaatagcttttttatagctcacatgtgaaccacacacaccctttgactgttgtttgtattcaaattatctaattagtaagaacaaatggcagagtcaagagtcaatgaccaggtatccctcttattttcacttaagttgtctgcagtagatcgtataaaatagaaaatttgtactgtagagtaaagcttgaaatagaggatgatatatcgaatgagatagcatagctgttggagacaaccttacaatgtttccttagagaggtggaaaccattgtttcgaaatgcatgccttcaggttctcggcattgaggaaaccttttttgcgagtgcaagtaggaaacacttttgttatcttggtcctttttgcacaacagtgattgtgttctataaaagtttctatacatactctcacaatagacaaaaccgtttctccggaaaaccacccatctttaatgtaattaatgatttctctattttaaaacatgagaaggtttagctttttagatatattatttttattacgtatctaaacctagtgtatacctaattgtataaaaactaaaaaaatcaaaacttcttatacttagaatgggagaggaacaaaagtgattagtggtgttaaactatgaacacactagtataatgcctgtgcattgcaacatcacatcaataatatataatgatatagtgtttgcaggacatgagagtgtagtggcaagccagttttataggcgctccaaaaaaataaattaaagtggactcttctcacaaaaaaaataatattaaagtggacatatggcccacatgacagatattaaaatgcagatactgcactttatcttagccaaaaggtcaagaaagttatgtattgaaaaggagacctacttttttatagctagcttggtcactcgtcatccttcaactggcgagatgatattatatgggagcattgcgctgcctgcggtttcgtgtcgtgttagacttaaatgttttctcatggcgcatctagagataatgatgctttataagagtagagatgtttggaccacatgttagattagaaagaactataatgactttttgcaaaaagaacgattttgtaaatcaaggaaattggtgccgtaggagtagagatatttaaaaatcccattaataaaataccgtaaaaagaatgaagaaaaccggggagcaaataaaatgaattatatatatagaaaagaaaaattgggcatgcgtagtatacatgaaacaataaatcacatcaatcgggacccaatattcggaatgataaaggcagccataagagcatctccaataatgttttaaattagtgtctcgaattaaaatacagggctatatacaggaaaactacttcaacagttcctcattttgtaaaatttggtaaaaaaaattataagacaccctatcaattacctcaaatatactacattgtaatgtattgccctataacttagatttgaggctttactattaaagcgtaatgttttgttggtgctctaaattctataaaacatatttatttttaaattatagggtatttttataggttgcgttgttagagatgctataaagggctttatctttcatctcctgaaacaaaagaggcgatttatttgccgtggatagaattaggaatatggttaggaagccagagttcagggttggttgagacggcctttttgtttttgctacgaaaagctgaagcccatttgcacagaaagtatcatatctttttttcgctaccatgcattggtgcatgtgcatcaagtacccgaccacaacgacagaatctcttattatcaacccgtcttcataagcttttggtacctctgttgctgttggtagtgagttacgtgtggttgccacactcacagggtactgagcatacatacacaatctgtgctgtgctaccaggacaaagcagcagcgccattgaccaaattttgattcaagtcaaacatgggataaaataataaggatggatgagaacttttcatgttttgtctcaagttttgagagctgaatgcccgttaaaccactactgcacaatataggtttgcatggttcattagtacacaaaatctctataaagaccgtttgtaatatattttcacagacgttttcagaaccgcctgtgctggggccagtagaaatcgattttttcactggtggttgtgttaagacaaccgcagtggtattcccttttccactagtggttttctaaaattagttatcagtggtagtttttccgtcttttatcaaat

SEQ ID NO: 32266 - DNA, 1720 bp, Zea Mays
tctacaatgagttatctagagctacagcatagggtactggaaaaaaaaatctcatcgactctctcctgagtcctgactcctgacatctccgatcgtcaccgtccccgtccccggcgccgtccctctcgctcttgtcctcggtgccgcacctcctacatctctgtctcaccgctttagcacggccaccacgcccgcctgcgctagatcccatctgaagccggcggccatcatacccgtgagcgctagctgggctgcatctctcacctccacagccagcaagcgagcgtggttagcgccgcagtggtttcaccgaccttagatcgggccgtaagctcgaggactgaccttaatttcttgagcttaaggtctcagtgggtttaatcccgtagtgtatgaggttgacctttaaaggccttacggcccccttgtttcgcacgctacagatatcgagctgttgacatctgcgggtgcatctgcggacagccttgacgaggctgccgacgatgtcgtctctcaactcgctcttcaaccgctccaccttcggcacaaaatgaatcaagctgctgcgcaacaggagggagttacaactaataaatatgcgcaaagaaatggttcaatatcttcagactggccaggaatcaatcgcgaggattcgagtggagcacattattcgggagcaaaatatattggctgcctatgagatcgttgagcttttctgtgaatttgttctggcaagagtccctattgttgaggtccaaaaggaatgccccttagaactgcgtgaagccattgctagtataatctttgcatcaggaaggtgttcagacttgcctgagctaatgcatctccgtaatttgtttaccaccaagtatggaaaggagtttgttgctggtgctatggaattgcgccccgacagcagtgtcaaccgcacaataattgaaaagctctcggtgaaggctccatcaggtgattcaaagctaaaagtcttgaaagctattgcccaagagtacaatattgaatgggattcatctaatactgaagcagaattcaacaagaaatatgaagatctactggacggctcgggatcttcggtccaccagatccagacacctatcattgagggctcagtgagctcaccagttgtttctgctccaagagataagacgccagcattgaattcacctgtcattgatgccgaaaaacaccaagttcgcgaatctccgacttcaccagctggaggtgcaagagctggtgttgtcactaagggcaatgtggtaaccatgggccatcactcccccgctgaggagatgccctccaccagcccaagttcatcagacgcgctggagaaagcccgagctgctattgcagctgccacccgcgcatctgctgctgctcgcgccgcagctgaacttgcaaaagttaaaattacaaatcaatgacacctccagttcgggcaaggcgtgtcaggaagtttaatctggcaactgatcaccaggacagactgaaatgtatttcattgaataaattgttactgtatattccctttgtgagcacttggcacatcatataaggagcgtggctcctcgcctttcttcgaatgtactcaaagagaactatctggaatgcataatgttgcatttactgttcactagttagttattgtatcattacggtttttttacaatacaaaccaatctaaattgcagtggttagagacgaa

SEQ ID NO: 32267 - DNA, 2423 bp, Zea Mays
tctacaatgagttatctagagctacagcatagggtactggaaaaaaaaatctcatcgactctctcctgagtcctgactcctgacatctccgatcgtcaccgtccccgtccccggcgccgtccctctcgctcttgtcctcggtgccgcacctcctacatctctgtctcaccgctttagcacggccaccacgcccgcctgcgctagatcccatctgaagccggcggccatcatacccgtgagcgctagctgggctgcatctctcacctccacagccagcaagcgagcgtggttagcgccgcagtggtttcaccgaccttagatcgggccgtaagctcgaggactgaccttaatttcttgagcttaaggtctcagtgggtttaatcccgtagtgtatgaggttgacctttaaaggccttacggcccccttgtttcgcacgctacagatatcgagctgttgacatctgcgggtgcatctgcggacagccttgacgaggctgccgacgatgtcgtctctcaactcgctcttcaaccgctccaccttcggcacaaaatgcaaaacatgtttaaatcttgtcatttcaagaatcaagctgctgcgcaacaggagggagttacaactaataaatatgcgcaaagaaatggttcaatatcttcagactggccaggaatcaatcgcgaggattcgagtggagcacattattcgggagcaaaatatattggctgcctatgagatcgttgagcttttctgtgaatttgttctggcaagagtccctattgttgaggtccaaaaggaatgccccttagaactgcgtgaagccattgctagtataatctttgcatcaggaaggtgttcagacttgcctgagctaatgcatctccgtaatttgtttaccaccaagtatggaaaggagtttgttgctggtgctatggaattgcgccccgacagcagtgtcaaccgcacaataattgaaaagctctcggtgaaggctccatcaggtgattcaaagctaaaagtcttgaaagctattgcccaagagtacaatattgaatgggattcatctaatactgaagcagaattcaacaagaaatatgaagatctactggtagcatttgctaactcattacttattccctgattattagacaggaatgcatatgaaaggtgtttcatgtgacatcttcaaagcaggtgtttgcattactgctttatttagtgaataaaaactatatgataataattgaagaactgcacgtttgatattctatgttgggcttaacataggccattcagtgttcagttgaaggaattcagtgtacctttacgcccatcctgagaaaccattagctcacaagacactgttttctctatctaatattcagctaggaatcttcgaccgtcctttgcatattccatatgcgatgtcacattagggttgtgtcccacatttctagtccagtttatagactatagagttctccccccttttttggacttgtggatctggtctaatcttatgtcaccacaattaggatgtcaaacaatctggtaatgtagaaggtttgttggctgtttactgtgaatcggggcctaatgattttgtaaacatgatgcagttaattaaggaatttagaagagaatgagaaccaactaactgcaagaatatatatgcctccacaagaccacaactccatcttgaactaaatgtgcagctaagtttgaaatgagagtaatctagaaatcacttcatttattatgtgctggtatgatgtatgcaggacggctcgggatcttcggtccaccagatccagacacctatcattgagggctcagtgagctcaccagttgtttctgctccaagagataagacgccagcattgaattcacctgtcattgatgccgaaaaacaccaagttcgcgaatctccgacttcaccagctggaggtgcaagagctggtgttgtcactaagggcaatgtggtaaccatgggccatcactcccccgctgaggagatgccctccaccagcccaagttcatcagacgcgctggagaaagcccgagctgctattgcagctgccacccgcgcatctgctgctgctcgcgccgcagctgaacttgcaaaagttaaaattacaaatcaatgacacctccagttcgggcaaggcgtgtcaggaagtttaatctggcaactgatcaccaggacagactgaaatgtatttcattgaataaattgttactgtatattccctttgtgagcacttggcacatcatataaggagcgtggctcctcgcctttcttcgaatgtactcaaagagaactatctggaatgcataatgttgcatttactgttcactagttagttattgtatcattacggtttttttacaatacaaaccaatctaaattgcagtggttagagacgaa

SEQ ID NO: 32268 - DNA, 1595 bp, Zea Mays
tctacaatgagttatctagagctacagcatagggtactggaaaaaaaaatctcatcgactctctcctgagtcctgactcctgacatctccgatcgtcaccgtccccgtccccggcgccgtccctctcgctcttgtcctcggtgccgcacctcctacatctctgtctcaccgctttagcacggccaccacgcccgcctgcgctagatcccatctgaagccggcggccatcatacccgtgagcgctagctgggctgcatctctcacctccacagccagcaagcgagcgtgatatcgagctgttgacatctgcgggtgcatctgcggacagccttgacgaggctgccgacgatgtcgtctctcaactcgctcttcaaccgctccaccttcggcacaaaatgcaaaacatgtttaaatcttgtcatttcaagaatcaagctgctgcgcaacaggagggagttacaactaataaatatgcgcaaagaaatggttcaatatcttcagactggccaggaatcaatcgcgaggattcgagtggagcacattattcgggagcaaaatatattggctgcctatgagatcgttgagcttttctgtgaatttgttctggcaagagtccctattgttgaggtccaaaaggaatgccccttagaactgcgtgaagccattgctagtataatctttgcatcaggaaggtgttcagacttgcctgagctaatgcatctccgtaatttgtttaccaccaagtatggaaaggagtttgttgctggtgctatggaattgcgccccgacagcagtgtcaaccgcacaataattgaaaagctctcggtgaaggctccatcaggtgattcaaagctaaaagtcttgaaagctattgcccaagagtacaatattgaatgggattcatctaatactgaagcagaattcaacaagaaatatgaagatctactggacggctcgggatcttcggtccaccagatccagacacctatcattgagggctcagtgagctcaccagttgtttctgctccaagagataagacgccagcattgaattcacctgtcattgatgccgaaaaacaccaagttcgcgaatctccgacttcaccagctggaggtgcaagagctggtgttgtcactaagggcaatgtggtaaccatgggccatcactcccccgctgaggagatgccctccaccagcccaagttcatcagacgcgctggagaaagcccgagctgctattgcagctgccacccgcgcatctgctgctgctcgcgccgcagctgaacttgcaaaagttaaaattacaaatcaatgacacctccagttcgggcaaggcgtgtcaggaagtttaatctggcaactgatcaccaggacagactgaaatgtatttcattgaataaattgttactgtatattccctttgtgagcacttggcacatcatataaggagcgtggctcctcgcctttcttcgaatgtactcaaagagaactatctggaatgcataatgttgcatttactgttcactagttagttattgtatcattacggtttttttacaatacaaaccaatctaaattgcagtggttagagacgaa

SEQ ID NO: 32269 - DNA, 1672 bp, Zea Mays
tctacaatgagttatctagagctacagcatagggtactggaaaaaaaaatctcatcgactctctcctgagtcctgactcctgacatctccgatcgtcaccgtccccgtccccggcgccgtccctctcgctcttgtcctcggtgccgcacctcctacatctctgtctcaccgctttagcacggccaccacgcccgcctgcgctagatcccatctgaagccggcggccatcatacccgtgagcgctagctgggctgcatctctcacctccacagccagcaagcgagcgtggttagcgccgcagtggtttcaccgaccttagatcgggccgtaagctcgaggactgaccttaatttcttgagcttaagatatcgagctgttgacatctgcgggtgcatctgcggacagccttgacgaggctgccgacgatgtcgtctctcaactcgctcttcaaccgctccaccttcggcacaaaatgcaaaacatgtttaaatcttgtcatttcaagaatcaagctgctgcgcaacaggagggagttacaactaataaatatgcgcaaagaaatggttcaatatcttcagactggccaggaatcaatcgcgaggattcgagtggagcacattattcgggagcaaaatatattggctgcctatgagatcgttgagcttttctgtgaatttgttctggcaagagtccctattgttgaggtccaaaaggaatgccccttagaactgcgtgaagccattgctagtataatctttgcatcaggaaggtgttcagacttgcctgagctaatgcatctccgtaatttgtttaccaccaagtatggaaaggagtttgttgctggtgctatggaattgcgccccgacagcagtgtcaaccgcacaataattgaaaagctctcggtgaaggctccatcaggtgattcaaagctaaaagtcttgaaagctattgcccaagagtacaatattgaatgggattcatctaatactgaagcagaattcaacaagaaatatgaagatctactggacggctcgggatcttcggtccaccagatccagacacctatcattgagggctcagtgagctcaccagttgtttctgctccaagagataagacgccagcattgaattcacctgtcattgatgccgaaaaacaccaagttcgcgaatctccgacttcaccagctggaggtgcaagagctggtgttgtcactaagggcaatgtggtaaccatgggccatcactcccccgctgaggagatgccctccaccagcccaagttcatcagacgcgctggagaaagcccgagctgctattgcagctgccacccgcgcatctgctgctgctcgcgccgcagctgaacttgcaaaagttaaaattacaaatcaatgacacctccagttcgggcaaggcgtgtcaggaagtttaatctggcaactgatcaccaggacagactgaaatgtatttcattgaataaattgttactgtatattccctttgtgagcacttggcacatcatataaggagcgtggctcctcgcctttcttcgaatgtactcaaagagaactatctggaatgcataatgttgcatttactgttcactagttagttattgtatcattacggtttttttacaatacaaaccaatctaaattgcagtggttagagacgaa

SEQ ID NO: 32270 - DNA, 1542 bp, Zea Mays
tctacaatgagttatctagagctacagcatagggtactggaaaaaaaaatctcatcgactctctcctgagtcctgactcctgacatctccgatcgtcaccgtccccgtccccggcgccgtccctctcgctcttgtcctcggtgccgcacctcctacatctctgtctcaccgctttagcacggccaccacgcccgcctgcgctagatcccatctgaagccggcggccatcatacccatatcgagctgttgacatctgcgggtgcatctgcggacagccttgacgaggctgccgacgatgtcgtctctcaactcgctcttcaaccgctccaccttcggcacaaaatgcaaaacatgtttaaatcttgtcatttcaagaatcaagctgctgcgcaacaggagggagttacaactaataaatatgcgcaaagaaatggttcaatatcttcagactggccaggaatcaatcgcgaggattcgagtggagcacattattcgggagcaaaatatattggctgcctatgagatcgttgagcttttctgtgaatttgttctggcaagagtccctattgttgaggtccaaaaggaatgccccttagaactgcgtgaagccattgctagtataatctttgcatcaggaaggtgttcagacttgcctgagctaatgcatctccgtaatttgtttaccaccaagtatggaaaggagtttgttgctggtgctatggaattgcgccccgacagcagtgtcaaccgcacaataattgaaaagctctcggtgaaggctccatcaggtgattcaaagctaaaagtcttgaaagctattgcccaagagtacaatattgaatgggattcatctaatactgaagcagaattcaacaagaaatatgaagatctactggacggctcgggatcttcggtccaccagatccagacacctatcattgagggctcagtgagctcaccagttgtttctgctccaagagataagacgccagcattgaattcacctgtcattgatgccgaaaaacaccaagttcgcgaatctccgacttcaccagctggaggtgcaagagctggtgttgtcactaagggcaatgtggtaaccatgggccatcactcccccgctgaggagatgccctccaccagcccaagttcatcagacgcgctggagaaagcccgagctgctattgcagctgccacccgcgcatctgctgctgctcgcgccgcagctgaacttgcaaaagttaaaattacaaatcaatgacacctccagttcgggcaaggcgtgtcaggaagtttaatctggcaactgatcaccaggacagactgaaatgtatttcattgaataaattgttactgtatattccctttgtgagcacttggcacatcatataaggagcgtggctcctcgcctttcttcgaatgtactcaaagagaactatctggaatgcataatgttgcatttactgttcactagttagttattgtatcattacggtttttttacaatacaaaccaatctaaattgcagtggttagagacgaa

SEQ ID NO: 32271 - DNA, 1787 bp, Zea Mays
tctacaatgagttatctagagctacagcatagggtactggaaaaaaaaatctcatcgactctctcctgagtcctgactcctgacatctccgatcgtcaccgtccccgtccccggcgccgtccctctcgctcttgtcctcggtgccgcacctcctacatctctgtctcaccgctttagcacggccaccacgcccgcctgcgctagatcccatctgaagccggcggccatcatacccgtgagcgctagctgggctgcatctctcacctccacagccagcaagcgagcgtggttagcgccgcagtggtttcaccgaccttagatcgggccgtaagctcgaggactgaccttaatttcttgagcttaaggtctcagtgggtttaatcccgtagtgtatgaggttgacctttaaaggccttacggcccccttgtttcgcacgctacagatatcgagctgttgacatctgcgggtgcatctgcggacagccttgacgaggctgccgacgatgtcgtctctcaactcgctcttcaaccgctccaccttcggcacaaaatgcaaaacatgtttaaatcttgtcatttcaagaatcaagctgctgcgcaacaggagggagttacaactaataaatatgcgcaaagaaatggttcaatatcttcagactggccaggaatcaatcgcgaggattcgagtggagcacattattcgggagcaaaatatattggctgcctatgagatcgttgagcttttctgtgaatttgttctggcaagagtccctattgttgaggtccaaaaaatatgattaacagctataagttttatcatggagcagggaatgccccttagaactgcgtgaagccattgctagtataatctttgcatcaggaaggtgttcagacttgcctgagctaatgcatctccgtaatttgtttaccaccaagtatggaaaggagtttgttgctggtgctatggaattgcgccccgacagcagtgtcaaccgcacaataattgaaaagctctcggtgaaggctccatcaggtgattcaaagctaaaagtcttgaaagctattgcccaagagtacaatattgaatgggattcatctaatactgaagcagaattcaacaagaaatatgaagatctactggacggctcgggatcttcggtccaccagatccagacacctatcattgagggctcagtgagctcaccagttgtttctgctccaagagataagacgccagcattgaattcacctgtcattgatgccgaaaaacaccaagttcgcgaatctccgacttcaccagctggaggtgcaagagctggtgttgtcactaagggcaatgtggtaaccatgggccatcactcccccgctgaggagatgccctccaccagcccaagttcatcagacgcgctggagaaagcccgagctgctattgcagctgccacccgcgcatctgctgctgctcgcgccgcagctgaacttgcaaaagttaaaattacaaatcaatgacacctccagttcgggcaaggcgtgtcaggaagtttaatctggcaactgatcaccaggacagactgaaatgtatttcattgaataaattgttactgtatattccctttgtgagcacttggcacatcatataaggagcgtggctcctcgcctttcttcgaatgtactcaaagagaactatctggaatgcataatgttgcatttactgttcactagttagttattgtatcattacggtttttttacaatacaaaccaatctaaattgcagtggttagagacgaa

SEQ ID NO: 32272 - DNA, 1908 bp, Zea Mays
aaaaacatgactagtattgagctggaaaaactaaattacaaaacatgtttaaatcttgtcatttcaagaatcaagctgctgcgcaacaggagggagttacaactaataaatatgcgcaaagaaatggttcaatatcttcagactggccaggaatcaatcgcgaggattcgagtggagcacattattcgggagcaaaatatattggctgcctatgagatcgttgagcttttctgtgaatttgttctggcaagagtccctattgttgaggtccaaaaggaatgccccttagaactgcgtgaagccattgctagtataatctttgcatcaggaaggtgttcagacttgcctgagctaatgcatctccgtaatttgtttaccaccaagtatggaaaggagtttgttgctggtgctatggaattgcgccccgacagcagtgtcaaccgcacaataattgaaaagctctcggtgaaggctccatcaggtgattcaaagctaaaagtcttgaaagctattgcccaagagtacaatattgaatgggattcatctaatactgaagcagaattcaacaagaaatatgaagatctactggtagcatttgctaactcattacttattccctgattattagacaggaatgcatatgaaaggtgtttcatgtgacatcttcaaagcaggtgtttgcattactgctttatttagtgaataaaaactatatgataataattgaagaactgcacgtttgatattctatgttgggcttaacataggccattcagtgttcagttgaaggaattcagtgtacctttacgcccatcctgagaaaccattagctcacaagacactgttttctctatctaatattcagctaggaatcttcgaccgtcctttgcatattccatatgcgatgtcacattagggttgtgtcccacatttctagtccagtttatagactatagagttctccccccttttttggacttgtggatctggtctaatcttatgtcaccacaattaggatgtcaaacaatctggtaatgtagaaggtttgttggctgtttactgtgaatcggggcctaatgattttgtaaacatgatgcagttaattaaggaatttagaagagaatgagaaccaactaactgcaagaatatatatgcctccacaagaccacaactccatcttgaactaaatgtgcagctaagtttgaaatgagagtaatctagaaatcacttcatttattatgtgctggtatgatgtatgcaggacggctcgggatcttcggtccaccagatccagacacctatcattgagggctcagtgagctcaccagttgtttctgctccaagagataagacgccagcattgaattcacctgtcattgatgccgaaaaacaccaagttcgcgaatctccgacttcaccagctggaggtgcaagagctggtgttgtcactaagggcaatgtggtaaccatgggccatcactcccccgctgaggagatgccctccaccagcccaagttcatcagacgcgctggagaaagcccgagctgctattgcagctgccacccgcgcatctgctgctgctcgcgccgcagctgaacttgcaaaagttaaaattacaaatcaatgacacctccagttcgggcaaggcgtgtcaggaagtttaatctggcaactgatcaccaggacagactgaaatgtatttcattgaataaattgttactgtatattccctttgtgagcacttggcacatcatataaggagcgtggctcctcgcctttcttcgaatgtactcaaagagaactatctggaatgcataatgttgcatttactgttcactagttagttattgtatcattacggtttttttacaatacaaaccaatctaaattgcagtggttagagacgaa

SEQ ID NO: 32273 - DNA, 816 bp, Zea Mays
cttgatatggttacattctctgaagaatcacagggagaactaatgcaggatacgaggcaacgttgattgtttgctaatgatgatgcttcactggtgaagaatattggaaagagcttccggctttctgctgtggagtcaaagcgcgaagataaaatcagagatgcgcatgatgaggctatatttggtgtacctacaacttcatttgttgatgttgaaattggtggggacgagcttaaaaccaatcatgaagacgggaaagttgaagacacagaatctgatgaacctagcagctccctcatcagcgataaagtactggccatgcaaaaaggttcctggagggatcgggctcagaagttgcggaagaatttgaacacatgaactttgtccttgcaactgctcaagttcgaatttgccagcgtgtgacagagatctggcatcttgtgaagatttgagcctgaagttgaacttagccccacccatcccttagaatagttgcataatgtaagttgtaagatttgcgcctgctttctgtttcctcgagtcagcgcgcaagtgacaccttgtagtgaactgagtttggaaattcatttggttattgtgatttggcaaatggcctgaatctattcatgtttaaaaagatgtatgtgcttcttgctccctccattagcagtgccattttcaagttggccttcaacttctgccttatggtatttgaacattcaggtcctaaaattactgccaatggaatggaattacgatggaagtcagcatctgattgctgatctagtttaaacatcctaaccctaagactatctc

SEQ ID NO: 32274 - DNA, 2607 bp, Zea Mays
aagtttggaacgaattttaaaaaaccagtggtttaaccggttttataaaccatggttgccagttgcctgagcctcacagcgcgcgccaccaccaccgcgccatgccgttctccgccaccgccgccggcgcctccaaaccctaaacccgccgcagcaatcaatggcgtccctcctctcctcccccgacgattccaagtcgctgtccgtcaccacctcatcgctcttcctctcctccatcgcctctctcccctcttcccatgccttctccatcttcacctccgcctccacgcctcttccccctgtcccggtctctgtgcctcccgccgcactcatcccgggctcccgcttccttgtcgatgccttccgccatgccggaaacttctctgtcgcctacttcctctcgcacttccactccgaccactacagtggcctcggcccttcctggcgccgcggccttgtattctgctccgcgccaaccgcacgcctcgtctcatccgtgctctctgtcccgcctcaacttgtcgtctccctcgatatcggtgtccgtatcaccgttgatgggtggggcgtcaccgccgtggacgccaatcattgtcccggtgccgttcagttcctcttcgcctctcctgggccgagagccgagagatatgtgcacaccggtgactttcgttacacagagtctatgacgcgtgatcctaacttgctggagttcgtccgtgctgatgcggtgtttctggacaccacatactgcaaccccaagtttacattcccttcgcaagaggattctgtggattacatagtgaatgcaatcaaacgtgtgaaagaggagagttcagtatcaggagagcgtgtgctatgtctgatcgccacctatgctgtcggcaaggagaagattttgctggaggtcgcacagcgctgtgggtgttcaatccatgtggacagtaggaagatgaagattttgacactgttggggttcggtgggaagaatagcgtttttactgaggacgcaacagggacggatgtgcatgttcttgggtggaatttgttaggggagacttcgccctacttccagccgaattttgtgaaattgaaggagatcatgatggagagagggtatgctaaggctgttgggtttgtaccaactgggtggatgtatgaaaccaagaaggaaggttttgctgttagggtgaaagattcactcgaaatccatcttgttccttatagtgagcactcaagttacaatgagttgcgcgactatgttaagtttttgcacccaaagagtgtgatccctactgccggagtggatgctgggaagctcgatagtaaggaggcagttgctctgcagaagcattttgctgggttggttgatgagacagcaaacaaacaggagttcttgatggcattccatcgtaggtcaatagatgctactcgtagctgcaaagatgtggttgttaattgctcgagccagcttgatggggaggatgctgctttgttaccagcaatctcttctgcttctgaacaacaggataaactgatggagaatactatgcaggaaacacttaaagaactgtcagatttcttaccctcgtgggtgagccaggaacagatcacagacctgctgatgagttctgaaggtgatgttgttaaagcagcatcgattttttttgagcgggaaagagatttctttgaagaagcaaatgtttcttgtaatggcacacccaagacagagaaaaaccattcttctaatcatgggtcgtctgctgatgtaagtagtcagcaagaatcttctttattttcacagaagcctgtggaatactctgcaaaactggtaaatttgtctcctatgagaatgaaaccaaatactcccaaaaaggtaaataagaggggttccagcaatacaaacaagccaaaaaagaaaggccgattaacttcctcaacagaatctggtgggcggaagcagtccacaattacaaattatttcattagagctactgaagctgcttttaaaaggtgtagacctgaaagagtaactgtggaggcacatcaaaataacgtggaaaacagtgatcagttagctgatactgaaaaaacacaagatcagattgtagaccagcttctccagattgtagatggtagcatgtctagagaatatgcagtttatttgcttgagaaggcaaacggagatgtggctgtagcagttgacatattttacagttcaagtgagggtaataatgtaattgaggttgacaagaatattatgctgcagaatgcacaaggtgaaactgcagataattgtagtgaaacagacatggctagtggttattctcaggctactccaaaaatgtcaaacttacatgtaggaacttctttagcacatggagattctgccaacacatcactgctaattgaaaagtatctacctattgaacatgttgtaactactctggaggaatcattaggaaccagcagatctaaaatacatgaaatgtacaaaacttacggtgatcttggtactgttgcccaagaatgtcgtcagaatcaaacactaattgctcctccccgttctctctcgatttgtgatgtatattccacgcttcggaaactaag

SEQ ID NO: 32275 - DNA, 4741 bp, Zea Mays
aagtttggaacgaattttaaaaaaccagtggtttaaccggttttataaaccatggttgccagttgcctgagcctcacagcgcgcgccaccaccaccgcgccatgccgttctccgccaccgccgccggcgcctccaaaccctaaacccgccgcagcaatcaatggcgtccctcctctcctcccccgacgattccaagtcgctgtccgtcaccacctcatcgctcttcctctcctccatcgcctctctcccctcttcccatgccttctccatcttcacctccgcctccacgcctcttccccctgtcccggtctctgtgcctcccgccgcactcatcccgggctcccgcttccttgtcgatgccttccgccatgccggaaacttctctgtcgcctacttcctctcgcacttccactccgaccactacagtggcctcggcccttcctggcgccgcggccttgtattctgctccgcgccaaccgcacgcctcgtctcatccgtgctctctgtcccgcctcaacttgtcgtctccctcgatatcggtgtccgtatcaccgttgatgggtggggcgtcaccgccgtggacgccaatcattgtcccggtgccgttcagttcctcttcgcctctcctgggccgagagccgagagatatgtgcacaccggtgactttcgttacacagagtctatgacgcgtgatcctaacttgctggagttcgtccgtgctgatgcggtgtttctggacaccacatactgcaaccccaagtttacattcccttcgcaagaggattctgtggattacatagtgaatgcaatcaaacgtgtgaaagaggagagttcagtatcaggagagcgtgtgctatgtctgatcgccacctatgctgtcggcaaggagaagattttgctggaggtcgcacagcgctgtgggtgttcaatccatgtggacagtaggaagatgaagattttgacactgttggggttcggtgggaagaatagcgtttttactgaggacgcaacagggacggatgtgcatgttcttgggtggaatttgttaggggagacttcgccctacttccagccgaattttgtgaaattgaaggagatcatgatggagagagggtatgctaaggctgttgggtttgtaccaactgggtggatgtatgaaaccaagaaggaaggttttgctgttagggtgaaagattcactcgaaatccatcttgttccttatagtgagcactcaagttacaatgagttgcgcgactatgttaagtttttgcacccaaagagtgtgatccctactgccggagtggatgctgggaagctcgatagtaaggaggcagttgctctgcagaagcattttgctgggttggttgatgagacagcaaacaaacaggagttcttgatggcattccatcgtaggtcaatagatgctactcgtagctgcaaagatgtggttgttaattgctcgagccagcttgatggggaggatgctgctttgttaccagcaatctcttctgcttctgaacaacaggataaactgatggagaatactatgcaggaaacacttaaagaactgtcagatttcttaccctcgtgggtgagccaggaacagatcacagacctgctgatgagttctgaaggtgatgttgttaaagcagcatcgattttttttgagcgggaaagagatttctttgaagaagcaaatgtttcttgtaatggcacacccaagacagagaaaaaccattcttctaatcatgggtcgtctgctgatgtaagtagtcagcaagaatcttctttattttcacagaagcctgtggaatactctgcaaaactggtaaatttgtctcctatgagaatgaaaccaaatactcccaaaaaggtaaataagaggggttccagcaatacaaacaagccaaaaaagaaaggccgattaacttcctcaacagaatctggtgggcggaagcagtccacaattacaaattatttcattagagctactgaagctgcttttaaaaggtgtagacctgaaagagtaactgtggaggcacatcaaaataacgtggaaaacagtgatcagttagctgatactgaaaaaacacaagatcagattgtagaccagcttctccagattgtagatggtagcatgtctagagaatatgcagtttatttgcttgagaaggcaaacggagatgtggctgtagcagttgacatattttacagttcaagtgagggtaataatgtaattgaggttgacaagaatattatgctgcagaatgcacaaggtgaaactgcagataattgtagtgaaacagacatggctagtggttattctcaggctactccaaaaatgtcaaacttacatgtaggaacttctttagcacatggagattctgccaacacatcactgctaattgaaaagtatctacctattgaacatgcttgctggatagcaggacagcctgcaccatacttgcatttggctcgcacatttgacttggttgaaaaggaaaaaggaaagatcaaaactatcgcaatattttgcaacatgttcaggagtttgcttgctttatcccctgatgatgttctacctgctgtttatctatgtactaataaaatttctcctgaccatgaaaatatgctaggaactgaacattggtgggagtctagttgtaactactctggaggaatcattaggaaccagcagatctaaaatacatgaaatgtacaaaacttacggtgatcttgtgcaatatcaggtagtggaagtgctgggaggagaaaaaatcttgtcttgcatctgattcggtcttgtagagaaacagaaatgaaatttcttgtcagaacactggttcgtaacttgcgtattggggctatgatgaagacgattttacctgcgcttgcacatgctgttgtttttgatagaaactgtgcagcagatcctgcggtgtcattggaaggcataaaatcacaactacagagtctttcaactgaagttgccgaggcatacaatgtcactcctaatctagatttgctcattccttctcttctgagagaaggcactgcattttcagcttcatccttggcaatggtgcctggcacacctattccacctatgcttgcaagaattactaacgggttgactcagtcgttgaaagctttccatggcagatcatttacttgtgagtacaagtatgatggtcagcgtgcccagattcacaaagcacttgatggatccgtgcgaatattttcaaggcaaatgaaagaatcaacttccagatttcctgatcttgtgaatatgattaaggagttgtgcaagcccgaagtgtcaagctttatactggatgccgaggtggtaggaattaacaggaagaaaggaaatgagttgatgtcgttccaagagctatcttcaagagaaagagggaataagcattcctcaatttcaatagagaacataaaggttgacatttgtgtgtttgtttttgacatcatgttccatgatggagagagactactggattgccctcttcggcaaagaagaaagtacattcatgacttgttccatgagaagccaggatattttgagttagctcagcagctaaatatagaagcctgcgaagcttcaccagacaattctagcactttggctaggatggacacgtttttcagaaatgcatgccagtcttcttgtgagggtataatgttaaagactttggatgtcgatgctggatactctgcttccaaacgctgtgattcatggttaaaggtcaagcgtgactatgtgcaaggcttaggtgatagccttgacttggttccgattggtgcatggtatggaaacggacgtaaagctgggtggtacagcccttttctcatggcatgctacaaccctgaaactgaagagttccaaagtgtatgtcgtgttatgtctggtttctcggatgagttctataaagagatgaaggagttctattcgggggaaaggatactgcccaagaagcctgtttactacaaaacagacgagcaaccagagctgtggttcaccgcagaacaaatctgggagatccgaggtgcagacctgacgttgtcccctgtccaccatgcggccattgggcttgtccatccatcgcgcggcatctcggtgaggatgccccggtacatccgttcagttccagaccggagcccagaggactgcggcacggccgccgatattgctagcatgttcaaagcccagacccggaagatggatgtcagcagcgagggccaggagtagtaggcaatgcaaagctcagcccatttcctcgtcctagctttgcttatgttcaccagttctgtatatacacagaacgaaccagggtgaagtgaaccaccctactgatcaaatggtgaaaactgaagcgtaggacaggcagcactgatcccactggctttcaatttttctttgtacagaaactgaatgcagttggaacgcggaaggaagcccacgagttgcacgttcggggggaaaaaaacaatgcataagtacatcaggtatcagcttgctttgtactacagcgcgattattgtaacgcccgtggccgccggcgagtcagccgttgacgtgagcacagatttggtgggaagcgccggcgaggattgcgtcggcctgtgcgcgttcgtgtttctgaatatctgaatcgatcgtctattacaagtctcaggcacttatgtgctgttacacggatacaagagggttaacgctaataactcgaat

SEQ ID NO: 32276 - DNA, 4654 bp, Zea Mays
aagtttggaacgaattttaaaaaaccagtggtttaaccggttttataaaccatggttgccagttgcctgagcctcacagcgcgcgccaccaccaccgcgccatgccgttctccgccaccgccgccggcgcctccaaaccctaaacccgccgcagcaatcaatggcgtccctcctctcctcccccgacgattccaagtcgctgtccgtcaccacctcatcgctcttcctctcctccatcgcctctctcccctcttcccatgccttctccatcttcacctccgcctccacgcctcttccccctgtcccggtctctgtgcctcccgccgcactcatcccgggctcccgcttccttgtcgatgccttccgccatgccggaaacttctctgtcgcctacttcctctcgcacttccactccgaccactacagtggcctcggcccttcctggcgccgcggccttgtattctgctccgcgccaaccgcacgcctcgtctcatccgtgctctctgtcccgcctcaacttgtcgtctccctcgatatcggtgtccgtatcaccgttgatgggtggggcgtcaccgccgtggacgccaatcattgtcccggtgccgttcagttcctcttcgcctctcctgggccgagagccgagagatatgtgcacaccggtgactttcgttacacagagtctatgacgcgtgatcctaacttgctggagttcgtccgtgctgatgcggtgtttctggacaccacatactgcaaccccaagtttacattcccttcgcaagaggattctgtggattacatagtgaatgcaatcaaacgtgtgaaagaggagagttcagtatcaggagagcgtgtgctatgtctgatcgccacctatgctgtcggcaaggagaagattttgctggaggtcgcacagcgctgtgggtgttcaatccatgtggacagtaggaagatgaagattttgacactgttggggttcggtgggaagaatagcgtttttactgaggacgcaacagggacggatgtgcatgttcttgggtggaatttgttaggggagacttcgccctacttccagccgaattttgtgaaattgaaggagatcatgatggagagagggtatgctaaggctgttgggtttgtaccaactgggtggatgtatgaaaccaagaaggaaggttttgctgttagggtgaaagattcactcgaaatccatcttgttccttatagtgagcactcaagttacaatgagttgcgcgactatgttaagtttttgcacccaaagagtgtgatccctactgccggagtggatgctgggaagctcgatagtaaggaggcagttgctctgcagaagcattttgctgggttggttgatgagacagcaaacaaacaggagttcttgatggcattccatcgtaggtcaatagatgctactcgtagctgcaaagatgtggttgttaattgctcgagccagcttgatggggaggatgctgctttgttaccagcaatctcttctgcttctgaacaacaggataaactgatggagaatactatgcaggaaacacttaaagaactgtcagatttcttaccctcgtgggtgagccaggaacagatcacagacctgctgatgagttctgaaggtgatgttgttaaagcagcatcgattttttttgagcgggaaagagatttctttgaagaagcaaatgtttcttgtaatggcacacccaagacagagaaaaaccattcttctaatcatgggtcgtctgctgatgtaagtagtcagcaagaatcttctttattttcacagaagcctgtggaatactctgcaaaactggtaaatttgtctcctatgagaatgaaaccaaatactcccaaaaaggtaaataagaggggttccagcaatacaaacaagccaaaaaagaaaggccgattaacttcctcaacagaatctggtgggcggaagcagtccacaattacaaattatttcattagagctactgaagctgcttttaaaaggtgtagacctgaaagagtaactgtggaggcacatcaaaataacgtggaaaacagtgatcagttagctgatactgaaaaaacacaagatcagattgtagaccagcttctccagattgtagatggtagcatgtctagagaatatgcagtttatttgcttgagaaggcaaacggagatgtggctgtagcagttgacatattttacagttcaagtgagggtaataatgtaattgaggttgacaagaatattatgctgcagaatgcacaaggtgaaactgcagataattgtagtgaaacagacatggctagtggttattctcaggctactccaaaaatgtcaaacttacatgtaggaacttctttagcacatggagattctgccaacacatcactgctaattgaaaagtatctacctattgaacatgcttgctggatagcaggacagcctgcaccatacttgcatttggctcgcacatttgacttggttgaaaaggaaaaaggaaagatcaaaactatcgcaatattttgcaacatgttcaggagtttgcttgctttatcccctgatgatgttctacctgctgtttatctatgtactaataaaatttctcctgaccatgaaaatatggaactgaacattggtgggagtctagttgtaactactctggaggaatcattaggaaccagcagatctaaaatacatgaaatgtacaaaacttacggtgatcttgtgcaatatcaggtagtggaagtgctgggaggagaaaaaatcttgtcttgcatctgattcggtcttgtagagaaacagaaatgaaatttcttgtcagaacactggttcgtaacttgcgtattggggctatgatgaagacgattttacctgcgcttgcacatgctgttgtttttgatagaaactgtgcagcagatcctgcggtgtcattggaaggcataaaatcacaactacaggatttgctcattccttctcttctgagagaaggcactgcattttcagcttcatccttggcaatggtgcctggcacacctattccacctatgcttgcaagaattactaacgggttgactcagtcgttgaaagctttccatggcagatcatttacttgtgagtacaagtatgatggtcagcgtgcccagattcacaaagcacttgatggatccgtgcgaatattttcaaggcaaatgaaagaatcaacttccagatttcctgatcttgtgaatatgattaaggagttgtgcaagcccgaagtgtcaagctttatactggatgccgaggtggtaggaattaacaggaagaaaggaaatgagttgatgtcgttccaagagctatcttcaagagaaagagggaataagcattcctcaatttcaatagagaacataaaggttgacatttgtgtgtttgtttttgacatcatgttccatgatggagagagacattcatgacttgttccatgagaagccaggatattttgagttagctcagcagctaaatatagaagcctgcgaagcttcaccagacaattctagcactttggctaggatggacacgtttttcagaaatgcatgccagtcttcttgtgagggtataatgttaaagactttggatgtcgatgctggatactctgcttccaaacgctgtgattcatggttaaaggtcaagcgtgactatgtgcaaggcttaggtgatagccttgacttggttccgattggtgcatggtatggaaacggacgtaaagctgggtggtacagcccttttctcatggcatgctacaaccctgaaactgaagagttccaaagtgtatgtcgtgttatgtctggtttctcggatgagttctataaagagatgaaggagttctattcgggggaaaggatactgcccaagaagcctgtttactacaaaacagacgagcaaccagagctgtggttcaccgcagaacaaatctgggagatccgaggtgcagacctgacgttgtcccctgtccaccatgcggccattgggcttgtccatccatcgcgcggcatctcggtgaggatgccccggtacatccgttcagttccagaccggagcccagaggactgcggcacggccgccgatattgctagcatgttcaaagcccagacccggaagatggatgtcagcagcgagggccaggagtagtaggcaatgcaaagctcagcccatttcctcgtcctagctttgcttatgttcaccagttctgtatatacacagaacgaaccagggtgaagtgaaccaccctactgatcaaatggtgaaaactgaagcgtaggacaggcagcactgatcccactggctttcaatttttctttgtacagaaactgaatgcagttggaacgcggaaggaagcccacgagttgcacgttcggggggaaaaaaacaatgcataagtacatcaggtatcagcttgctttgtactacagcgcgattattgtaacgcccgtggccgccggcgagtcagccgttgacgtgagcacagatttggtgggaagcgccggcgaggattgcgtcggcctgtgcgcgttcgtgtttctgaatatctgaatcgatcgtctattacaagtctcaggcacttatgtgctgttacacggatacaagagggttaacgctaataactcgaat

SEQ ID NO: 32277 - DNA, 4737 bp, Zea Mays
aagtttggaacgaattttaaaaaaccagtggtttaaccggttttataaaccatggttgccagttgcctgagcctcacagcgcgcgccaccaccaccgcgccatgccgttctccgccaccgccgccggcgcctccaaaccctaaacccgccgcagcaatcaatggcgtccctcctctcctcccccgacgattccaagtcgctgtccgtcaccacctcatcgctcttcctctcctccatcgcctctctcccctcttcccatgccttctccatcttcacctccgcctccacgcctcttccccctgtcccggtctctgtgcctcccgccgcactcatcccgggctcccgcttccttgtcgatgccttccgccatgccggaaacttctctgtcgcctacttcctctcgcacttccactccgaccactacagtggcctcggcccttcctggcgccgcggccttgtattctgctccgcgccaaccgcacgcctcgtctcatccgtgctctctgtcccgcctcaacttgtcgtctccctcgatatcggtgtccgtatcaccgttgatgggtggggcgtcaccgccgtggacgccaatcattgtcccggtgccgttcagttcctcttcgcctctcctgggccgagagccgagagatatgtgcacaccggtgactttcgttacacagagtctatgacgcgtgatcctaacttgctggagttcgtccgtgctgatgcggtgtttctggacaccacatactgcaaccccaagtttacattcccttcgcaagaggattctgtggattacatagtgaatgcaatcaaacgtgtgaaagaggagagttcagtatcaggagagcgtgtgctatgtctgatcgccacctatgctgtcggcaaggagaagattttgctggaggtcgcacagcgctgtgggtgttcaatccatgtggacagtaggaagatgaagattttgacactgttggggttcggtgggaagaatagcgtttttactgaggacgcaacagggacggatgtgcatgttcttgggtggaatttgttaggggagacttcgccctacttccagccgaattttgtgaaattgaaggagatcatgatggagagagggtatgctaaggctgttgggtttgtaccaactgggtggatgtatgaaaccaagaaggaaggttttgctgttagggtgaaagattcactcgaaatccatcttgttccttatagtgagcactcaagttacaatgagttgcgcgactatgttaagtttttgcacccaaagagtgtgatccctactgccggagtggatgctgggaagctcgatagtaaggaggcagttgctctgcagaagcattttgctgggttggttgatgagacagcaaacaaacaggagttcttgatggcattccatcgtaggtcaatagatgctactcgtagctgcaaagatgtggttgttaattgctcgagccagcttgatggggaggatgctgctttgttaccagcaatctcttctgcttctgaacaacaggataaactgatggagaatactatgcaggaaacacttaaagaactgtcagatttcttaccctcgtgggtgagccaggaacagatcacagacctgctgatgagttctgaaggtgatgttgttaaagcagcatcgattttttttgagcgggaaagagatttctttgaagaagcaaatgtttcttgtaatggcacacccaagacagagaaaaaccattcttctaatcatgggtcgtctgctgatgtaagtagtcagcaagaatcttctttattttcacagaagcctgtggaatactctgcaaaactggtaaatttgtctcctatgagaatgaaaccaaatactcccaaaaaggtaaataagaggggttccagcaatacaaacaagccaaaaaagaaaggccgattaacttcctcaacagaatctggtgggcggaagcagtccacaattacaaattatttcattagagctactgaagctgcttttaaaaggtgtagacctgaaagagtaactgtggaggcacatcaaaataacgtggaaaacagtgatcagttagctgatactgaaaaaacacaagatcagattgtagaccagcttctccagattgtagatggtagcatgtctagagaatatgcagtttatttgcttgagaaggcaaacggagatgtggctgtagcagttgacatattttacagttcaagtgagggtaataatgtaattgaggttgacaagaatattatgctgcagaatgcacaaggtgaaactgcagataattgtagtgaaacagacatggctagtggttattctcaggctactccaaaaatgtcaaacttacatgtaggaacttctttagcacatggagattctgccaacacatcactgctaattgaaaagtatctacctattgaacatgcttgctggatagcaggacagcctgcaccatacttgcatttggctcgcacatttgacttggttgaaaaggaaaaaggaaagatcaaaactatcgcaatattttgcaacatgttcaggagtttgcttgctttatcccctgatgatgttctacctgctgtttatctatgtactaataaaatttctcctgaccatgaaaatatggaactgaacattggtgggagtctagttgtaactactctggaggaatcattaggaaccagcagatctaaaatacatgaaatgtacaaaacttacggtgatcttgtgcaatatcaggtagtggaagtgctgggaggagaaaaaatcttgtcttgcatctgattcggtcttgtagagaaacagaaatgaaatttcttgtcagaacactggttcgtaacttgcgtattggggctatgatgaagacgattttacctgcgcttgcacatgctgttgtttttgatagaaactgtgcagcagatcctgcggtgtcattggaaggcataaaatcacaactacagagtctttcaactgaagttgccgaggcatacaatgtcactcctaatctagatttgctcattccttctcttctgagagaaggcactgcattttcagcttcatccttggcaatggtgcctggcacacctattccacctatgcttgcaagaattactaacgggttgactcagtcgttgaaagctttccatggcagatcatttacttgtgagtacaagtatgatggtcagcgtgcccagattcacaaagcacttgatggatccgtgcgaatattttcaaggcaaatgaaagaatcaacttccagatttcctgatcttgtgaatatgattaaggagttgtgcaagcccgaagtgtcaagctttatactggatgccgaggtggtaggaattaacaggaagaaaggaaatgagttgatgtcgttccaagagctatcttcaagagaaagagggaataagcattcctcaatttcaatagagaacataaaggttgacatttgtgtgtttgtttttgacatcatgttccatgatggagagagactactggattgccctcttcggcaaagaagaaagtacattcatgacttgttccatgagaagccaggatattttgagttagctcagcagctaaatatagaagcctgcgaagcttcaccagacaattctagcactttggctaggatggacacgtttttcagaaatgcatgccagtcttcttgtgagggtataatgttaaagactttggatgtcgatgctggatactctgcttccaaacgctgtgattcatggttaaaggtcaagcgtgactatgtgcaaggcttaggtgatagccttgacttggttccgattggtgcatggtatggaaacggacgtaaagctgggtggtacagcccttttctcatggcatgctacaaccctgaaactgaagagttccaaagtgtatgtcgtgttatgtctggtttctcggatgagttctataaagagatgaaggagttctattcgggggaaaggatactgcccaagaagcctgtttactacaaaacagacgagcaaccagagctgtggttcaccgcagaacaaatctgggagatccgaggtgcagacctgacgttgtcccctgtccaccatgcggccattgggcttgtccatccatcgcgcggcatctcggtgaggatgccccggtacatccgttcagttccagaccggagcccagaggactgcggcacggccgccgatattgctagcatgttcaaagcccagacccggaagatggatgtcagcagcgagggccaggagtagtaggcaatgcaaagctcagcccatttcctcgtcctagctttgcttatgttcaccagttctgtatatacacagaacgaaccagggtgaagtgaaccaccctactgatcaaatggtgaaaactgaagcgtaggacaggcagcactgatcccactggctttcaatttttctttgtacagaaactgaatgcagttggaacgcggaaggaagcccacgagttgcacgttcggggggaaaaaaacaatgcataagtacatcaggtatcagcttgctttgtactacagcgcgattattgtaacgcccgtggccgccggcgagtcagccgttgacgtgagcacagatttggtgggaagcgccggcgaggattgcgtcggcctgtgcgcgttcgtgtttctgaatatctgaatcgatcgtctattacaagtctcaggcacttatgtgctgttacacggatacaagagggttaacgctaataactcgaat

SEQ ID NO: 32278 - DNA, 4637 bp, Zea Mays
aagtttggaacgaattttaaaaaaccagtggtttaaccggttttataaaccatggttgccagttgcctgagcctcacagcgcgcgccaccaccaccgcgccatgccgttctccgccaccgccgccggcgcctccaaaccctaaacccgccgcagcaatcaatggcgtccctcctctcctcccccgacgattccaagtcgctgtccgtcaccacctcatcgctcttcctctcctccatcgcctctctcccctcttcccatgccttctccatcttcacctccgcctccacgcctcttccccctgtcccggtctctgtgcctcccgccgcactcatcccgggctcccgcttccttgtcgatgccttccgccatgccggaaacttctctgtcgcctacttcctctcgcacttccactccgaccactacagtggcctcggcccttcctggcgccgcggccttgtattctgctccgcgccaaccgcacgcctcgtctcatccgtgctctctgtcccgcctcaacttgtcgtctccctcgatatcggtgtccgtatcaccgttgatgggtggggcgtcaccgccgtggacgccaatcattgtcccggtgccgttcagttcctcttcgcctctcctgggccgagagccgagagatatgtgcacaccggtgactttcgttacacagagtctatgacgcgtgatcctaacttgctggagttcgtccgtgctgatgcggtgtttctggacaccacatactgcaaccccaagtttacattcccttcgcaagaggattctgtggattacatagtgaatgcaatcaaacgtgtgaaagaggagagttcagtatcaggagagcgtgtgctatgtctgatcgccacctatgctgtcggcaaggagaagattttgctggaggtcgcacagcgctgtgggtgttcaatccatgtggacagtaggaagatgaagattttgacactgttggggttcggtgggaagaatagcgtttttactgaggacgcaacagggacggatgtgcatgttcttgggtggaatttgttaggggagacttcgccctacttccagccgaattttgtgaaattgaaggagatcatgatggagagagggtatgctaaggctgttgggtttgtaccaactgggtggatgtatgaaaccaagaaggaaggttttgctgttagggtgaaagattcactcgaaatccatcttgttccttatagtgagcactcaagttacaatgagttgcgcgactatgttaagtttttgcacccaaagagtgtgatccctactgccggagtggatgctgggaagctcgatagtaaggaggcagttgctctgcagaagcattttgctgggttggttgatgagacagcaaacaaacaggagttcttgatggcattccatcgtaggtcaatagatgctactcgtagctgcaaagatgtggttgttaattgctcgagccagcttgatggggaggatgctgctttgttaccagcaatctcttctgcttctgaacaacaggataaactgatggagaatactatgcaggaaacacttaaagaactgtcagatttcttaccctcgtgggtgagccaggaacagatcacagacctgctgatgagttctgaaggtgatgttgttaaagcagcatcgattttttttgagcgggaaagagatttctttgaagaagcaaatgtttcttgtaatggcacacccaagacagagaaaaaccattcttctaatcatgggtcgtctgctgatgtaagtagtcagcaagaatcttctttattttcacagaagcctgtggaatactctgcaaaactggtaaatttgtctcctatgagaatgaaaccaaatactcccaaaaaggtaaataagaggggttccagcaatacaaacaagccaaaaaagaaaggccgattaacttcctcaacagaatctggtgggcggaagcagtccacaattacaaattatttcattagagctactgaagctgcttttaaaaggtgtagacctgaaagagtaactgtggaggcacatcaaaataacgtggaaaacagtgatcagttagctgatactgaaaaaacacaagatcagattgtagaccagcttctccagattgtagatggtagcatgtctagagaatatgcagtttatttgcttgagaaggcaaacggagatgtggctgtagcagttgacatattttacagttcaagtgagggtaataatgtaattgaggttgacaagaatattatgctgcagaatgcacaaggtgaaactgcagataattgtagtgaaacagacatggctagtggttattctcaggctactccaaaaatgtcaaacttacatgtaggaacttctttagcacatggagattctgccaacacatcactgctaattgaaaagtatctacctattgaacatgcttgctggatagcaggacagcctgcaccatacttgcatttggctcgcacatttgacttggttgaaaaggaaaaaggaaagatcaaaactatcgcaatattttgcaacatgttcaggagtttgcttgctttatcccctgatgatgttctacctgctgtttatctatgtactaataaaatttctcctgaccatgaaaatatggaactgaacattggtgggagtctagttgtaactactctggaggaatcattaggaaccagcagatctaaaatacatgaaatgtacaaaacttacggtgatcttggtactgttgcccaagaatgtcgtcagaatcaaacactaattgctcctccccgttctctctcgatttgtgatgtatattccacgcttcggaaactaagtgcaatatcaggtagtggaagtgctgggaggagaaaaaatcttgtcttgcatctgattcggtcttgtagagaaacagaaatgaaatttcttgtcagaacactggttcgtaacttgcgtattggggctatgatgaagacgattttacctgcgcttgcacatgctgttgtttttgatagaaactgtgcagcagatcctgcggtgtcattggaaggcataaaatcacaactacagagtctttcaactgaagttgccgaggcatacaatgtcactcctaatctagatttgctcattccttctcttctgagagaaggcactgcattttcagcttcatccttggcaatggtgcctggcacacctattccacctatgcttgcaagaattactaacgggttgactcagtcgttgaaagctttccatggcagatcatttacttgtgagtacaagtatgatggtcagcgtgcccagattcacaaagcacttgatggatccgtgcgaatattttcaaggcaaatgaaagaatcaacttccagatttcctgatcttgtgaatatgattaaggagttgtgcaagcccgaagtgtcaagctttatactggatgccgaggtggtaggaattaacaggaagaaaggaaatgagttgatgtcgttccaagagctatcttcaagagaaagagggaataagcattcctcaatttcaatagagaacataaaggttgacatttgtgtgtttgtttttgacatcatgttccatgatggagagagacattcatgacttgttccatgagaagccaggatattttgagttagctcagcagctaaatgtcaagcgtgactatgtgcaaggcttaggtgatagccttgacttggttccgattggtgcatggtatggaaacggacgtaaagctgggtggtacagcccttttctcatggcatgctacaaccctgaaactgaagagttccaaagtgtatgtcgtgttatgtctggtttctcggatgagttctataaagagatgaaggagttctattcgggggaaaggatactgcccaagaagcctgtttactacaaaacagacgagcaaccagagctgtggttcaccgcagaacaaatctgggagatccgaggtgcagacctgacgttgtcccctgtccaccatgcggccattgggcttgtccatccatcgcgcggcatctcggtgaggatgccccggtacatccgttcagttccagaccggagcccagaggactgcggcacggccgccgatattgctagcatgttcaaagcccagacccggaagatggatgtcagcagcgagggccaggagtagtaggcaatgcaaagctcagcccatttcctcgtcctagctttgcttatgttcaccagttctgtatatacacagaacgaaccagggtgaagtgaaccaccctactgatcaaatggtgaaaactgaagcgtaggacaggcagcactgatcccactggctttcaatttttctttgtacagaaactgaatgcagttggaacgcggaaggaagcccacgagttgcacgttcggggggaaaaaaacaatgcataagtacatcaggtatcagcttgctttgtactacagcgcgattattgtaacgcccgtggccgccggcgagtcagccgttgacgtgagcacagatttggtgggaagcgccggcgaggattgcgtcggcctgtgcgcgttcgtgtttctgaatatctgaatcgatcgtctattacaagtctcaggcacttatgtgctgttacacggatacaagagggttaacgctaataactcgaat

SEQ ID NO: 32279 - DNA, 4789 bp, Zea Mays
aagtttggaacgaattttaaaaaaccagtggtttaaccggttttataaaccatggttgccagttgcctgagcctcacagcgcgcgccaccaccaccgcgccatgccgttctccgccaccgccgccggcgcctccaaaccctaaacccgccgcagcaatcaatggcgtccctcctctcctcccccgacgattccaagtcgctgtccgtcaccacctcatcgctcttcctctcctccatcgcctctctcccctcttcccatgccttctccatcttcacctccgcctccacgcctcttccccctgtcccggtctctgtgcctcccgccgcactcatcccgggctcccgcttccttgtcgatgccttccgccatgccggaaacttctctgtcgcctacttcctctcgcacttccactccgaccactacagtggcctcggcccttcctggcgccgcggccttgtattctgctccgcgccaaccgcacgcctcgtctcatccgtgctctctgtcccgcctcaacttgtcgtctccctcgatatcggtgtccgtatcaccgttgatgggtggggcgtcaccgccgtggacgccaatcattgtcccggtgccgttcagttcctcttcgcctctcctgggccgagagccgagagatatgtgcacaccggtgactttcgttacacagagtctatgacgcgtgatcctaacttgctggagttcgtccgtgctgatgcggtgtttctggacaccacatactgcaaccccaagtttacattcccttcgcaagaggattctgtggattacatagtgaatgcaatcaaacgtgtgaaagaggagagttcagtatcaggagagcgtgtgctatgtctgatcgccacctatgctgtcggcaaggagaagattttgctggaggtcgcacagcgctgtgggtgttcaatccatgtggacagtaggaagatgaagattttgacactgttggggttcggtgggaagaatagcgtttttactgaggacgcaacagggacggatgtgcatgttcttgggtggaatttgttaggggagacttcgccctacttccagccgaattttgtgaaattgaaggagatcatgatggagagagggtatgctaaggctgttgggtttgtaccaactgggtggatgtatgaaaccaagaaggaaggttttgctgttagggtgaaagattcactcgaaatccatcttgttccttatagtgagcactcaagttacaatgagttgcgcgactatgttaagtttttgcacccaaagagtgtgatccctactgccggagtggatgctgggaagctcgatagtaaggaggcagttgctctgcagaagcattttgctgggttggttgatgagacagcaaacaaacaggagttcttgatggcattccatcgtaggtcaatagatgctactcgtagctgcaaagatgtggttgttaattgctcgagccagcttgatggggaggatgctgctttgttaccagcaatctcttctgcttctgaacaacaggataaactgatggagaatactatgcaggaaacacttaaagaactgtcagatttcttaccctcgtgggtgagccaggaacagatcacagacctgctgatgagttctgaaggtgatgttgttaaagcagcatcgattttttttgagcgggaaagagatttctttgaagaagcaaatgtttcttgtaatggcacacccaagacagagaaaaaccattcttctaatcatgggtcgtctgctgatgtaagtagtcagcaagaatcttctttattttcacagaagcctgtggaatactctgcaaaactggtaaatttgtctcctatgagaatgaaaccaaatactcccaaaaaggtaaataagaggggttccagcaatacaaacaagccaaaaaagaaaggccgattaacttcctcaacagaatctggtgggcggaagcagtccacaattacaaattatttcattagagctactgaagctgcttttaaaaggtgtagacctgaaagagtaactgtggaggcacatcaaaataacgtggaaaacagtgatcagttagctgatactgaaaaaacacaagatcagattgtagaccagcttctccagattgtagatggtagcatgtctagagaatatgcagtttatttgcttgagaaggcaaacggagatgtggctgtagcagttgacatattttacagttcaagtgagggtaataatgtaattgaggttgacaagaatattatgctgcagaatgcacaaggtgaaactgcagataattgtagtgaaacagacatggctagtggttattctcaggctactccaaaaatgtcaaacttacatgtaggaacttctttagcacatggagattctgccaacacatcactgctaattgaaaagtatctacctattgaacatgcttgctggatagcaggacagcctgcaccatacttgcatttggctcgcacatttgacttggttgaaaaggaaaaaggaaagatcaaaactatcgcaatattttgcaacatgttcaggagtttgcttgctttatcccctgatgatgttctacctgctgtttatctatgtactaataaaatttctcctgaccatgaaaatatggaactgaacattggtgggagtctagttgtaactactctggaggaatcattaggaaccagcagatctaaaatacatgaaatgtacaaaacttacggtgatcttggtactgttgcccaagaatgtcgtcagaatcaaacactaattgctcctccccgttctctctcgatttgtgatgtatattccacgcttcggaaactaagtgcaatatcaggtagtggaagtgctgggaggagaaaaaatcttgtcttgcatctgattcggtcttgtagagaaacagaaatgaaatttcttgtcagaacactggttcgtaacttgcgtattggggctatgatgaagacgattttacctgcgcttgcacatgctgttgtttttgatagaaactgtgcagcagatcctgcggtgtcattggaaggcataaaatcacaactacagagtctttcaactgaagttgccgaggcatacaatgtcactcctaatctagatttgctcattccttctcttctgagagaaggcactgcattttcagcttcatccttggcaatggtgcctggcacacctattccacctatgcttgcaagaattactaacgggttgactcagtcgttgaaagctttccatggcagatcatttacttgtatgatggtcagcgtgcccagattcacaaagcacttgatggatccgtgcgaatattttcaaggcaaatgaaagaatcaacttccagatttcctgatcttgtgaatatgattaaggagttgtgcaagcccgaagtgtcaagctttatactggatgccgaggtggtaggaattaacaggaagaaaggaaatgagttgatgtcgttccaagagctatcttcaagagaaagagggaataagcattcctcaatttcaatagagaacataaaggttgacatttgtgtgtttgtttttgacatcatgttccatgatggagagagacattcatgacttgttccatgagaagccaggatattttgagttagctcagcagctaaatatagaagcctgcgaagcttcaccagacaattctagcactttggctaggatggacacgtttttcagaaatgcatgccagtcttcttgtgagggtataatgttaaagactttggatgtcgatgctggatactctgcttccaaacgctgtgattcatggttaaaggtcaagcgtgactatgtgcaaggcttaggtgatagccttgacttggttccgattggtgcatggtatggaaacggacgtaaagctgggtggtacagcccttttctcatggcatgctacaaccctgaaactgaagagttccaaagtgtatgtcgtgttatgtctggtttctcggatgagttctataaagagatgaaggagttctattcgggggaaaggatactgcccaagaagcctgtttactacaaaacagacgagcaaccagagctgtggttcaccgcagaacaaatctgggagatccgaggtgcagacctgacgttgtcccctgtccaccatgcggccattgggcttgtccatccatcgcgcggcatctcggtgaggatgccccggtacatccgttcagttccagaccggagcccagaggactgcggcacggccgccgatattgctagcatgttcaaagcccagacccggaagatggatgtcagcagcgagggccaggagtagtaggcaatgcaaagctcagcccatttcctcgtcctagctttgcttatgttcaccagttctgtatatacacagaacgaaccagggtgaagtgaaccaccctactgatcaaatggtgaaaactgaagcgtaggacaggcagcactgatcccactggctttcaatttttctttgtacagaaactgaatgcagttggaacgcggaaggaagcccacgagttgcacgttcggggggaaaaaaacaatgcataagtacatcaggtatcagcttgctttgtactacagcgcgattattgtaacgcccgtggccgccggcgagtcagccgttgacgtgagcacagatttggtgggaagcgccggcgaggattgcgtcggcctgtgcgcgttcgtgtttctgaatatctgaatcgatcgtctattacaagtctcaggcacttatgtgctgttacacggatacaagagggttaacgctaataactcgaat

SEQ ID NO: 32280 - DNA, 4809 bp, Zea Mays
aagtttggaacgaattttaaaaaaccagtggtttaaccggttttataaaccatggttgccagttgcctgagcctcacagcgcgcgccaccaccaccgcgccatgccgttctccgccaccgccgccggcgcctccaaaccctaaacccgccgcagcaatcaatggcgtccctcctctcctcccccgacgattccaagtcgctgtccgtcaccacctcatcgctcttcctctcctccatcgcctctctcccctcttcccatgccttctccatcttcacctccgcctccacgcctcttccccctgtcccggtctctgtgcctcccgccgcactcatcccgggctcccgcttccttgtcgatgccttccgccatgccggaaacttctctgtcgcctacttcctctcgcacttccactccgaccactacagtggcctcggcccttcctggcgccgcggccttgtattctgctccgcgccaaccgcacgcctcgtctcatccgtgctctctgtcccgcctcaacttgtcgtctccctcgatatcggtgtccgtatcaccgttgatgggtggggcgtcaccgccgtggacgccaatcattgtcccggtgccgttcagttcctcttcgcctctcctgggccgagagccgagagatatgtgcacaccggtgactttcgttacacagagtctatgacgcgtgatcctaacttgctggagttcgtccgtgctgatgcggtgtttctggacaccacatactgcaaccccaagtttacattcccttcgcaagaggattctgtggattacatagtgaatgcaatcaaacgtgtgaaagaggagagttcagtatcaggagagcgtgtgctatgtctgatcgccacctatgctgtcggcaaggagaagattttgctggaggtcgcacagcgctgtgggtgttcaatccatgtggacagtaggaagatgaagattttgacactgttggggttcggtgggaagaatagcgtttttactgaggacgcaacagggacggatgtgcatgttcttgggtggaatttgttaggggagacttcgccctacttccagccgaattttgtgaaattgaaggagatcatgatggagagagggtatgctaaggctgttgggtttgtaccaactgggtggatgtatgaaaccaagaaggaaggttttgctgttagggtgaaagattcactcgaaatccatcttgttccttatagtgagcactcaagttacaatgagttgcgcgactatgttaagtttttgcacccaaagagtgtgatccctactgccggagtggatgctgggaagctcgatagtaaggaggcagttgctctgcagaagcattttgctgggttggttgatgagacagcaaacaaacaggagttcttgatggcattccatcgtaggtcaatagatgctactcgtagctgcaaagatgtggttgttaattgctcgagccagcttgatggggaggatgctgctttgttaccagcaatctcttctgcttctgaacaacaggataaactgatggagaatactatgcaggaaacacttaaagaactgtcagatttcttaccctcgtgggtgagccaggaacagatcacagacctgctgatgagttctgaaggtgatgttgttaaagcagcatcgattttttttgagcgggaaagagatttctttgaagaagcaaatgtttcttgtaatggcacacccaagacagagaaaaaccattcttctaatcatgggtcgtctgctgatgtaagtagtcagcaagaatcttctttattttcacagaagcctgtggaatactctgcaaaactggtaaatttgtctcctatgagaatgaaaccaaatactcccaaaaaggtaaataagaggggttccagcaatacaaacaagccaaaaaagaaaggccgattaacttcctcaacagaatctggtgggcggaagcagtccacaattacaaattatttcattagagctactgaagctgcttttaaaaggtgtagacctgaaagagtaactgtggaggcacatcaaaataacgtggaaaacagtgatcagttagctgatactgaaaaaacacaagatcagattgtagaccagcttctccagattgtagatggtagcatgtctagagaatatgcagtttatttgcttgagaaggcaaacggagatgtggctgtagcagttgacatattttacagttcaagtgagggtaataatgtaattgaggttgacaagaatattatgctgcagaatgcacaaggtgaaactgcagataattgtagtgaaacagacatggctagtggttattctcaggctactccaaaaatgtcaaacttacatgtaggaacttctttagcacatggagattctgccaacacatcactgctaattgaaaagtatctacctattgaacatgcttgctggatagcaggacagcctgcaccatacttgcatttggctcgcacatttgacttggttgaaaaggaaaaaggaaagatcaaaactatcgcaatattttgcaacatgttcaggagtttgcttgctttatcccctgatgatgttctacctgctgtttatctatgtactaataaaatttctcctgaccatgaaaatatggaactgaacattggtgggagtctagttgtaactactctggaggaatcattaggaaccagcagatctaaaatacatgaaatgtacaaaacttacggtgatcttgaatgtcgtcagaatcaaacactaattgctcctccccgttctctctcgatttgtgatgtatattccacgcttcggaaactaagtgcaatatcaggtagtggaagtgctgggaggagaaaaaatcttgtcttgcatctgattcggtcttgtagagaaacagaaatgaaatttcttgtcagaacactggttcgtaacttgcgtattggggctatgatgaagacgattttacctgcgcttgcacatgctgttgtttttgatagaaactgtgcagcagatcctgcggtgtcattggaaggcataaaatcacaactacagagtctttcaactgaagttgccgaggcatacaatgtcactcctaatctagatttgctcattccttctcttctgagagaaggcactgcattttcagcttcatccttggcaatggtgcctggcacacctattccacctatgcttgcaagaattactaacgggttgactcagtcgttgaaagctttccatggcagatcatttacttgtatgatggtcagcgtgcccagattcacaaagcacttgatggatccgtgcgaatattttcaaggcaaatgaaagaatcaacttccagatttcctgatcttgtgaatatgattaaggagttgtgcaagcccgaagtgtcaagctttatactggatgccgaggtggtaggaattaacaggaagaaaggaaatgagttgatgtcgttccaagagctatcttcaagagaaagagggaataagcattcctcaatttcaatagagaacataaaggttgacatttgtgtgtttgtttttgacatcatgttccatgatggagagagactactggattgccctcttcggcaaagaagaaagtacattcatgacttgttccatgagaagccaggatattttgagttagctcagcagctaaatatagaagcctgcgaagcttcaccagacaattctagcactttggctaggatggacacgtttttcagaaatgcatgccagtcttcttgtgagggtataatgttaaagactttggatgtcgatgctggatactctgcttccaaacgctgtgattcatggttaaaggtcaagcgtgactatgtgcaaggcttaggtgatagccttgacttggttccgattggtgcatggtatggaaacggacgtaaagctgggtggtacagcccttttctcatggcatgctacaaccctgaaactgaagagttccaaagtgtatgtcgtgttatgtctggtttctcggatgagttctataaagagatgaaggagttctattcgggggaaaggatactgcccaagaagcctgtttactacaaaacagacgagcaaccagagctgtggttcaccgcagaacaaatctgggagatccgaggtgcagacctgacgttgtcccctgtccaccatgcggccattgggcttgtccatccatcgcgcggcatctcggtgaggatgccccggtacatccgttcagttccagaccggagcccagaggactgcggcacggccgccgatattgctagcatgttcaaagcccagacccggaagatggatgtcagcagcgagggccaggagtagtaggcaatgcaaagctcagcccatttcctcgtcctagctttgcttatgttcaccagttctgtatatacacagaacgaaccagggtgaagtgaaccaccctactgatcaaatggtgaaaactgaagcgtaggacaggcagcactgatcccactggctttcaatttttctttgtacagaaactgaatgcagttggaacgcggaaggaagcccacgagttgcacgttcggggggaaaaaaacaatgcataagtacatcaggtatcagcttgctttgtactacagcgcgattattgtaacgcccgtggccgccggcgagtcagccgttgacgtgagcacagatttggtgggaagcgccggcgaggattgcgtcggcctgtgcgcgttcgtgtttctgaatatctgaatcgatcgtctattacaagtctcaggcacttatgtgctgttacacggatacaagagggttaacgctaataactcgaat

SEQ ID NO: 32281 - DNA, 4824 bp, Zea Mays
aagtttggaacgaattttaaaaaaccagtggtttaaccggttttataaaccatggttgccagttgcctgagcctcacagcgcgcgccaccaccaccgcgccatgccgttctccgccaccgccgccggcgcctccaaaccctaaacccgccgcagcaatcaatggcgtccctcctctcctcccccgacgattccaagtcgctgtccgtcaccacctcatcgctcttcctctcctccatcgcctctctcccctcttcccatgccttctccatcttcacctccgcctccacgcctcttccccctgtcccggtctctgtgcctcccgccgcactcatcccgggctcccgcttccttgtcgatgccttccgccatgccggaaacttctctgtcgcctacttcctctcgcacttccactccgaccactacagtggcctcggcccttcctggcgccgcggccttgtattctgctccgcgccaaccgcacgcctcgtctcatccgtgctctctgtcccgcctcaacttgtcgtctccctcgatatcggtgtccgtatcaccgttgatgggtggggcgtcaccgccgtggacgccaatcattgtcccggtgccgttcagttcctcttcgcctctcctgggccgagagccgagagatatgtgcacaccggtgactttcgttacacagagtctatgacgcgtgatcctaacttgctggagttcgtccgtgctgatgcggtgtttctggacaccacatactgcaaccccaagtttacattcccttcgcaagaggattctgtggattacatagtgaatgcaatcaaacgtgtgaaagaggagagttcagtatcaggagagcgtgtgctatgtctgatcgccacctatgctgtcggcaaggagaagattttgctggaggtcgcacagcgctgtgggtgttcaatccatgtggacagtaggaagatgaagattttgacactgttggggttcggtgggaagaatagcgtttttactgaggacgcaacagggacggatgtgcatgttcttgggtggaatttgttaggggagacttcgccctacttccagccgaattttgtgaaattgaaggagatcatgatggagagagggtatgctaaggctgttgggtttgtaccaactgggtggatgtatgaaaccaagaaggaaggttttgctgttagggtgaaagattcactcgaaatccatcttgttccttatagtgagcactcaagttacaatgagttgcgcgactatgttaagtttttgcacccaaagagtgtgatccctactgccggagtggatgctgggaagctcgatagtaaggaggcagttgctctgcagaagcattttgctgggttggttgatgagacagcaaacaaacaggagttcttgatggcattccatcgtaggtcaatagatgctactcgtagctgcaaagatgtggttgttaattgctcgagccagcttgatggggaggatgctgctttgttaccagcaatctcttctgcttctgaacaacaggataaactgatggagaatactatgcaggaaacacttaaagaactgtcagatttcttaccctcgtgggtgagccaggaacagatcacagacctgctgatgagttctgaaggtgatgttgttaaagcagcatcgattttttttgagcgggaaagagatttctttgaagaagcaaatgtttcttgtaatggcacacccaagacagagaaaaaccattcttctaatcatgggtcgtctgctgatgtaagtagtcagcaagaatcttctttattttcacagaagcctgtggaatactctgcaaaactggtaaatttgtctcctatgagaatgaaaccaaatactcccaaaaaggtaaataagaggggttccagcaatacaaacaagccaaaaaagaaaggccgattaacttcctcaacagaatctggtgggcggaagcagtccacaattacaaattatttcattagagctactgaagctgcttttaaaaggtgtagacctgaaagagtaactgtggaggcacatcaaaataacgtggaaaacagtgatcagttagctgatactgaaaaaacacaagatcagattgtagaccagcttctccagattgtagatggtagcatgtctagagaatatgcagtttatttgcttgagaaggcaaacggagatgtggctgtagcagttgacatattttacagttcaagtgagggtaataatgtaattgaggttgacaagaatattatgctgcagaatgcacaaggtgaaactgcagataattgtagtgaaacagacatggctagtggttattctcaggctactccaaaaatgtcaaacttacatgtaggaacttctttagcacatggagattctgccaacacatcactgctaattgaaaagtatctacctattgaacatgcttgctggatagcaggacagcctgcaccatacttgcatttggctcgcacatttgacttggttgaaaaggaaaaaggaaagatcaaaactatcgcaatattttgcaacatgttcaggagtttgcttgctttatcccctgatgatgttctacctgctgtttatctatgtactaataaaatttctcctgaccatgaaaatatggaactgaacattggtgggagtctagttgtaactactctggaggaatcattaggaaccagcagatctaaaatacatgaaatgtacaaaacttacggtgatcttggtactgttgcccaagaatgtcgtcagaatcaaacactaattgctcctccccgttctctctcgatttgtgatgtatattccacgcttcggaaactaagtgcaatatcaggtagtggaagtgctgggaggagaaaaaatcttgtcttgcatctgattcggtcttgtagagaaacagaaatgaaatttcttgtcagaacactggttcgtaacttgcgtattggggctatgatgaagacgattttacctgcgcttgcacatgctgttgtttttgatagaaactgtgcagcagatcctgcggtgtcattggaaggcataaaatcacaactacagagtctttcaactgaagttgccgaggcatacaatgtcactcctaatctagatttgctcattccttctcttctgagagaaggcactgcattttcagcttcatccttggcaatggtgcctggcacacctattccacctatgcttgcaagaattactaacgggttgactcagtcgttgaaagctttccatggcagatcatttacttgtatgatggtcagcgtgcccagattcacaaagcacttgatggatccgtgcgaatattttcaaggcaaatgaaagaatcaacttccagatttcctgatcttgtgaatatgattaaggagttgtgcaagcccgaagtgtcaagctttatactggatgccgaggtggtaggaattaacaggaagaaaggaaatgagttgatgtcgttccaagagctatcttcaagagaaagagggaataagcattcctcaatttcaatagagaacataaaggttgacatttgtgtgtttgtttttgacatcatgttccatgatggagagagactactggattgccctcttcggcaaagaagaaagtacattcatgacttgttccatgagaagccaggatattttgagttagctcagcagctaaatatagaagcctgcgaagcttcaccagacaattctagcactttggctaggatggacacgtttttcagaaatgcatgccagtcttcttgtgagggtataatgttaaagactttggatgtcgatgctggatactctgcttccaaacgctgtgattcatggttaaaggtcaagcgtgactatgtgcaaggcttaggtgatagccttgacttggttccgattggtgcatggtatggaaacggacgtaaagctgggtggtacagcccttttctcatggcatgctacaaccctgaaactgaagagttccaaagtgtatgtcgtgttatgtctggtttctcggatgagttctataaagagatgaaggagttctattcgggggaaaggatactgcccaagaagcctgtttactacaaaacagacgagcaaccagagctgtggttcaccgcagaacaaatctgggagatccgaggtgcagacctgacgttgtcccctgtccaccatgcggccattgggcttgtccatccatcgcgcggcatctcggtgaggatgccccggtacatccgttcagttccagaccggagcccagaggactgcggcacggccgccgatattgctagcatgttcaaagcccagacccggaagatggatgtcagcagcgagggccaggagtagtaggcaatgcaaagctcagcccatttcctcgtcctagctttgcttatgttcaccagttctgtatatacacagaacgaaccagggtgaagtgaaccaccctactgatcaaatggtgaaaactgaagcgtaggacaggcagcactgatcccactggctttcaatttttctttgtacagaaactgaatgcagttggaacgcggaaggaagcccacgagttgcacgttcggggggaaaaaaacaatgcataagtacatcaggtatcagcttgctttgtactacagcgcgattattgtaacgcccgtggccgccggcgagtcagccgttgacgtgagcacagatttggtgggaagcgccggcgaggattgcgtcggcctgtgcgcgttcgtgtttctgaatatctgaatcgatcgtctattacaagtctcaggcacttatgtgctgttacacggatacaagagggttaacgctaataactcgaat

SEQ ID NO: 32282 - DNA, 4600 bp, Zea Mays
aagtttggaacgaattttaaaaaaccagtggtttaaccggttttataaaccatggttgccagttgcctgagcctcacagcgcgcgccaccaccaccgcgccatgccgttctccgccaccgccgccggcgcctccaaaccctaaacccgccgcagcaatcaatggcgtccctcctctcctcccccgacgattccaagtcgctgtccgtcaccacctcatcgctcttcctctcctccatcgcctctctcccctcttcccatgccttctccatcttcacctccgcctccacgcctcttccccctgtcccggtctctgtgcctcccgccgcactcatcccgggctcccgcttccttgtcgatgccttccgccatgccggaaacttctctgtcgcctacttcctctcgcacttccactccgaccactacagtggcctcggcccttcctggcgccgcggccttgtattctgctccgcgccaaccgcacgcctcgtctcatccgtgctctctgtcccgcctcaacttgtcgtctccctcgatatcggtgtccgtatcaccgttgatgggtggggcgtcaccgccgtggacgccaatcattgtcccggtgccgttcagttcctcttcgcctctcctgggccgagagccgagagatatgtgcacaccggtgactttcgttacacagagtctatgacgcgtgatcctaacttgctggagttcgtccgtgctgatgcggtgtttctggacaccacatactgcaaccccaagtttacattcccttcgcaagaggattctgtggattacatagtgaatgcaatcaaacgtgtgaaagaggagagttcagtatcaggagagcgtgtgctatgtctgatcgccacctatgctgtcggcaaggagaagattttgctggaggtcgcacagcgctgtgggtgttcaatccatgtggacagtaggaagatgaagattttgacactgttggggttcggtgggaagaatagcgtttttactgaggacgcaacagggacggatgtgcatgttcttgggtggaatttgttaggggagacttcgccctacttccagccgaattttgtgaaattgaaggagatcatgatggagagagggtatgctaaggctgttgggtttgtaccaactgggtggatgtatgaaaccaagaaggaaggttttgctgttagggtgaaagattcactcgaaatccatcttgttccttatagtgagcactcaagttacaatgagttgcgcgactatgttaagtttttgcacccaaagagtgtgatccctactgccggagtggatgctgggaagctcgatagtaaggaggcagttgctctgcagaagcattttgctgggttggttgatgagacagcaaacaaacaggagttcttgatggcattccatcgtaggtcaatagatgctactcgtagctgcaaagatgtggttgttaattgctcgagccagcttgatggggaggatgctgctttgttaccagcaatctcttctgcttctgaacaacaggataaactgatggagaatactatgcaggaaacacttaaagaactgtcagatttcttaccctcgtgggtgagccaggaacagatcacagacctgctgatgagttctgaaggtgatgttgttaaagcagcatcgattttttttgagcgggaaagagatttctttgaagaagcaaatgtttcttgtaatggcacacccaagacagagaaaaaccattcttctaatcatgggtcgtctgctgatgtaagtagtcagcaagaatcttctttattttcacagaagcctgtggaatactctgcaaaactggtaaatttgtctcctatgagaatgaaaccaaatactcccaaaaaggtaaataagaggggttccagcaatacaaacaagccaaaaaagaaaggccgattaacttcctcaacagaatctggtgggcggaagcagtccacaattacaaattatttcattagagctactgaagctgcttttaaaaggtgtagacctgaaagagtaactgtggaggcacatcaaaataacgtggaaaacagtgatcagttagctgatactgaaaaaacacaagatcagattgtagaccagcttctccagattgtagatggtagcatgtctagagaatatgcagtttatttgcttgagaaggcaaacggagatgtggctgtagcagttgacatattttacagttcaagtgagggtaataatgtaattgaggttgacaagaatattatgctgcagaatgcacaaggtgaaactgcagataattgtagtgaaacagacatggctagtggttattctcaggctactccaaaaatgtcaaacttacatgtaggaacttctttagcacatggagattctgccaacacatcactgctaattgaaaagtatctacctattgaacatggttgtaactactctggaggaatcattaggaaccagcagatctaaaatacatgaaatgtacaaaacttacggtgatcttggtactgttgcccaagaatgtcgtcagaatcaaacactaattgctcctccccgttctctctcgatttgtgatgtatattccacgcttcggaaactaagtgcaatatcaggtagtggaagtgctgggaggagaaaaaatcttgtcttgcatctgattcggtcttgtagagaaacagaaatgaaatttcttgtcagaacactggttcgtaacttgcgtattggggctatgatgaagacgattttacctgcgcttgcacatgctgttgtttttgatagaaactgtgcagcagatcctgcggtgtcattggaaggcataaaatcacaactacagagtctttcaactgaagttgccgaggcatacaatgtcactcctaatctagatttgctcattccttctcttctgagagaaggcactgcattttcagcttcatccttggcaatggtgcctggcacacctattccacctatgcttgcaagaattactaacgggttgactcagtcgttgaaagctttccatggcagatcatttacttgtatgatggtcagcgtgcccagattcacaaagcacttgatggatccgtgcgaatattttcaaggcaaatgaaagaatcaacttccagatttcctgatcttgtgaatatgattaaggagttgtgcaagcccgaagtgtcaagctttatactggatgccgaggtggtaggaattaacaggaagaaaggaaatgagttgatgtcgttccaagagctatcttcaagagaaagagggaataagcattcctcaatttcaatagagaacataaaggttgacatttgtgtgtttgtttttgacatcatgttccatgatggagagagactactggattgccctcttcggcaaagaagaaagtacattcatgacttgttccatgagaagccaggatattttgagttagctcagcagctaaatatagaagcctgcgaagcttcaccagacaattctagcactttggctaggatggacacgtttttcagaaatgcatgccagtcttcttgtgagggtataatgttaaagactttggatgtcgatgctggatactctgcttccaaacgctgtgattcatggttaaaggtcaagcgtgactatgtgcaaggcttaggtgatagccttgacttggttccgattggtgcatggtatggaaacggacgtaaagctgggtggtacagcccttttctcatggcatgctacaaccctgaaactgaagagttccaaagtgtatgtcgtgttatgtctggtttctcggatgagttctataaagagatgaaggagttctattcgggggaaaggatactgcccaagaagcctgtttactacaaaacagacgagcaaccagagctgtggttcaccgcagaacaaatctgggagatccgaggtgcagacctgacgttgtcccctgtccaccatgcggccattgggcttgtccatccatcgcgcggcatctcggtgaggatgccccggtacatccgttcagttccagaccggagcccagaggactgcggcacggccgccgatattgctagcatgttcaaagcccagacccggaagatggatgtcagcagcgagggccaggagtagtaggcaatgcaaagctcagcccatttcctcgtcctagctttgcttatgttcaccagttctgtatatacacagaacgaaccagggtgaagtgaaccaccctactgatcaaatggtgaaaactgaagcgtaggacaggcagcactgatcccactggctttcaatttttctttgtacagaaactgaatgcagttggaacgcggaaggaagcccacgagttgcacgttcggggggaaaaaaacaatgcataagtacatcaggtatcagcttgctttgtactacagcgcgattattgtaacgcccgtggccgccggcgagtcagccgttgacgtgagcacagatttggtgggaagcgccggcgaggattgcgtcggcctgtgcgcgttcgtgtttctgaatatctgaatcgatcgtctattacaagtctcaggcacttatgtgctgttacacggatacaagagggttaacgctaataactcgaat

SEQ ID NO: 32283 - DNA, 4823 bp, Zea Mays
aagtttggaacgaattttaaaaaaccagtggtttaaccggttttataaaccatggttgccagttgcctgagcctcacagcgcgcgccaccaccaccgcgccatgccgttctccgccaccgccgccggcgcctccaaaccctaaacccgccgcagcaatcaatggcgtccctcctctcctcccccgacgattccaagtcgctgtccgtcaccacctcatcgctcttcctctcctccatcgcctctctcccctcttcccatgccttctccatcttcacctccgcctccacgcctcttccccctgtcccggtctctgtgcctcccgccgcactcatcccgggctcccgcttccttgtcgatgccttccgccatgccggaaacttctctgtcgcctacttcctctcgcacttccactccgaccactacagtggcctcggcccttcctggcgccgcggccttgtattctgctccgcgccaaccgcacgcctcgtctcatccgtgctctctgtcccgcctcaacttgtcgtctccctcgatatcggtgtccgtatcaccgttgatgggtggggcgtcaccgccgtggacgccaatcattgtcccggtgccgttcagttcctcttcgcctctcctgggccgagagccgagagatatgtgcacaccggtgactttcgttacacagagtctatgacgcgtgatcctaacttgctggagttcgtccgtgctgatgcggtgtttctggacaccacatactgcaaccccaagtttacattcccttcgcaagaggattctgtggattacatagtgaatgcaatcaaacgtgtgaaagaggagagttcagtatcaggagagcgtgtgctatgtctgatcgccacctatgctgtcggcaaggagaagattttgctggaggtcgcacagcgctgtgggtgttcaatccatgtggacagtaggaagatgaagattttgacactgttggggttcggtgggaagaatagcgtttttactgaggacgcaacagggacggatgtgcatgttcttgggtggaatttgttaggggagacttcgccctacttccagccgaattttgtgaaattgaaggagatcatgatggagagagggtatgctaaggctgttgggtttgtaccaactgggtggatgtatgaaaccaagaaggaaggttttgctgttagggtgaaagattcactcgaaatccatcttgttccttatagtgagcactcaagttacaatgagttgcgcgactatgttaagtttttgcacccaaagagtgtgatccctactgccggagtggatgctgggaagctcgatagtaaggaggcagttgctctgcagaagcattttgctgggttggttgatgagacagcaaacaaacaggagttcttgatggcattccatcgtaggtcaatagatgctactcgtagctgcaaagatgtggttgttaattgctcgagccagcttgatggggaggatgctgctttgttaccagcaatctcttctgcttctgaacaacaggataaactgatggagaatactatgcaggaaacacttaaagaactgtcagatttcttaccctcgtgggtgagccaggaacagatcacagacctgctgatgagttctgaaggtgatgttgttaaagcagcatcgattttttttgagcgggaaagagatttctttgaagaagcaaatgtttcttgtaatggcacacccaagacagagaaaaaccattcttctaatcatgggtcgtctgctgatgtaagtagtcagcaagaatcttctttattttcacagaagcctgtggaatactctgcaaaactggtaaatttgtctcctatgagaatgaaaccaaatactcccaaaaaggtaaataagaggggttccagcaatacaaacaagccaaaaaagaaaggccgattaacttcctcaacagaatctggtgggcggaagcagtccacaattacaaattatttcattagagctactgaagctgcttttaaaaggtgtagacctgaaagagtaactgtggaggcacatcaaaataacgtggaaaacagtgatcagttagctgatactgaaaaaacacaagatcagattgtagaccagcttctccagattgtagatggtagcatgtctagagaatatgcagtttatttgcttgagaaggcaaacggagatgtggctgtagcagttgacatattttacagttcaagtgagggtaataatgtaattgaggttgacaagaatattatgctgcagaatgcacaaggtgaaactgcagataattgtagtgaaacagacatggctagtggttattctcaggctactccaaaaatgtcaaacttacatgtaggaacttctttagcacatggagattctgccaacacatcactgctaattgaaaagtatctacctattgaacatgcttgctggatagcaggacagcctgcaccatacttgcatttggctcgcacatttgacttggttgaaaaggaaaaaggaaagatcaaaactatcgcaatattttgcaacatgttcaggagtttgcttgctttatcccctgatgatgttctacctgctgtttatctatgtactaataaaatttctcctgaccatgaaaatatgctaggaactgaacattggtgggagtctagttgtaactactctggaggaatcattaggaaccagcagatctaaaatacatgaaatgtacaaaacttacggtgatcttgaatgtcgtcagaatcaaacactaattgctcctccccgttctctctcgatttgtgatgtatattccacgcttcggaaactaagtgcaatatcaggtagtggaagtgctgggaggagaaaaaatcttgtcttgcatctgattcggtcttgtagagaaacagaaatgaaatttcttgtcagaacactggttcgtaacttgcgtattggggctatgatgaagacgattttacctgcgcttgcacatgctgttgtttttgatagaaactgtgcagcagatcctgcggtgtcattggaaggcataaaatcacaactacagagtctttcaactgaagttgccgaggcatacaatgtcactcctaatctagatttgctcattccttctcttctgagagaaggcactgcattttcagcttcatccttggcaatggtgcctggcacacctattccacctatgcttgcaagaattactaacgggttgactcagtcgttgaaagctttccatggcagatcatttacttgtgagtacaagtatgatggtcagcgtgcccagattcacaaagcacttgatggatccgtgcgaatattttcaaggcaaatgaaagaatcaacttccagatttcctgatcttgtgaatatgattaaggagttgtgcaagcccgaagtgtcaagctttatactggatgccgaggtggtaggaattaacaggaagaaaggaaatgagttgatgtcgttccaagagctatcttcaagagaaagagggaataagcattcctcaatttcaatagagaacataaaggttgacatttgtgtgtttgtttttgacatcatgttccatgatggagagagactactggattgccctcttcggcaaagaagaaagtacattcatgacttgttccatgagaagccaggatattttgagttagctcagcagctaaatatagaagcctgcgaagcttcaccagacaattctagcactttggctaggatggacacgtttttcagaaatgcatgccagtcttcttgtgagggtataatgttaaagactttggatgtcgatgctggatactctgcttccaaacgctgtgattcatggttaaaggtcaagcgtgactatgtgcaaggcttaggtgatagccttgacttggttccgattggtgcatggtatggaaacggacgtaaagctgggtggtacagcccttttctcatggcatgctacaaccctgaaactgaagagttccaaagtgtatgtcgtgttatgtctggtttctcggatgagttctataaagagatgaaggagttctattcgggggaaaggatactgcccaagaagcctgtttactacaaaacagacgagcaaccagagctgtggttcaccgcagaacaaatctgggagatccgaggtgcagacctgacgttgtcccctgtccaccatgcggccattgggcttgtccatccatcgcgcggcatctcggtgaggatgccccggtacatccgttcagttccagaccggagcccagaggactgcggcacggccgccgatattgctagcatgttcaaagcccagacccggaagatggatgtcagcagcgagggccaggagtagtaggcaatgcaaagctcagcccatttcctcgtcctagctttgcttatgttcaccagttctgtatatacacagaacgaaccagggtgaagtgaaccaccctactgatcaaatggtgaaaactgaagcgtaggacaggcagcactgatcccactggctttcaatttttctttgtacagaaactgaatgcagttggaacgcggaaggaagcccacgagttgcacgttcggggggaaaaaaacaatgcataagtacatcaggtatcagcttgctttgtactacagcgcgattattgtaacgcccgtggccgccggcgagtcagccgttgacgtgagcacagatttggtgggaagcgccggcgaggattgcgtcggcctgtgcgcgttcgtgtttctgaatatctgaatcgatcgtctattacaagtctcaggcacttatgtgctgttacacggatacaagagggttaacgctaataactcgaat

SEQ ID NO: 32284 - DNA, 4735 bp, Zea Mays
aagtttggaacgaattttaaaaaaccagtggtttaaccggttttataaaccatggttgccagttgcctgagcctcacagcgcgcgccaccaccaccgcgccatgccgttctccgccaccgccgccggcgcctccaaaccctaaacccgccgcagcaatcaatggcgtccctcctctcctcccccgacgattccaagtcgctgtccgtcaccacctcatcgctcttcctctcctccatcgcctctctcccctcttcccatgccttctccatcttcacctccgcctccacgcctcttccccctgtcccggtctctgtgcctcccgccgcactcatcccgggctcccgcttccttgtcgatgccttccgccatgccggaaacttctctgtcgcctacttcctctcgcacttccactccgaccactacagtggcctcggcccttcctggcgccgcggccttgtattctgctccgcgccaaccgcacgcctcgtctcatccgtgctctctgtcccgcctcaacttgtcgtctccctcgatatcggtgtccgtatcaccgttgatgggtggggcgtcaccgccgtggacgccaatcattgtcccggtgccgttcagttcctcttcgcctctcctgggccgagagccgagagatatgtgcacaccggtgactttcgttacacagagtctatgacgcgtgatcctaacttgctggagttcgtccgtgctgatgcggtgtttctggacaccacatactgcaaccccaagtttacattcccttcgcaagaggattctgtggattacatagtgaatgcaatcaaacgtgtgaaagaggagagttcagtatcaggagagcgtgtgctatgtctgatcgccacctatgctgtcggcaaggagaagattttgctggaggtcgcacagcgctgtgggtgttcaatccatgtggacagtaggaagatgaagattttgacactgttggggttcggtgggaagaatagcgtttttactgaggacgcaacagggacggatgtgcatgttcttgggtggaatttgttaggggagacttcgccctacttccagccgaattttgtgaaattgaaggagatcatgatggagagagggtatgctaaggctgttgggtttgtaccaactgggtggatgtatgaaaccaagaaggaaggttttgctgttagggtgaaagattcactcgaaatccatcttgttccttatagtgagcactcaagttacaatgagttgcgcgactatgttaagtttttgcacccaaagagtgtgatccctactgccggagtggatgctgggaagctcgatagtaaggaggcagttgctctgcagaagcattttgctgggttggttgatgagacagcaaacaaacaggagttcttgatggcattccatcgtaggtcaatagatgctactcgtagctgcaaagatgtggttgttaattgctcgagccagcttgatggggaggatgctgctttgttaccagcaatctcttctgcttctgaacaacaggataaactgatggagaatactatgcaggaaacacttaaagaactgtcagatttcttaccctcgtgggtgagccaggaacagatcacagacctgctgatgagttctgaaggtgatgttgttaaagcagcatcgattttttttgagcgggaaagagatttctttgaagaagcaaatgtttcttgtaatggcacacccaagacagagaaaaaccattcttctaatcatgggtcgtctgctgatgtaagtagtcagcaagaatcttctttattttcacagaagcctgtggaatactctgcaaaactggtaaatttgtctcctatgagaatgaaaccaaatactcccaaaaaggtaaataagaggggttccagcaatacaaacaagccaaaaaagaaaggccgattaacttcctcaacagaatctggtgggcggaagcagtccacaattacaaattatttcattagagctactgaagctgcttttaaaaggtgtagacctgaaagagtaactgtggaggcacatcaaaataacgtggaaaacagtgatcagttagctgatactgaaaaaacacaagatcagattgtagaccagcttctccagattgtagatggtagcatgtctagagaatatgcagtttatttgcttgagaaggcaaacggagatgtggctgtagcagttgacatattttacagttcaagtgagggtaataatgtaattgaggttgacaagaatattatgctgcagaatgcacaaggaacttctttagcacatggagattctgccaacacatcactgctaattgaaaagtatctacctattgaacatgcttgctggatagcaggacagcctgcaccatacttgcatttggctcgcacatttgacttggttgaaaaggaaaaaggaaagatcaaaactatcgcaatattttgcaacatgttcaggagtttgcttgctttatcccctgatgatgttctacctgctgtttatctatgtactaataaaatttctcctgaccatgaaaatatggaactgaacattggtgggagtctagttgtaactactctggaggaatcattaggaaccagcagatctaaaatacatgaaatgtacaaaacttacggtgatcttgaatgtcgtcagaatcaaacactaattgctcctccccgttctctctcgatttgtgatgtatattccacgcttcggaaactaagtgcaatatcaggtagtggaagtgctgggaggagaaaaaatcttgtcttgcatctgattcggtcttgtagagaaacagaaatgaaatttcttgtcagaacactggttcgtaacttgcgtattggggctatgatgaagacgattttacctgcgcttgcacatgctgttgtttttgatagaaactgtgcagcagatcctgcggtgtcattggaaggcataaaatcacaactacagagtctttcaactgaagttgccgaggcatacaatgtcactcctaatctagatttgctcattccttctcttctgagagaaggcactgcattttcagcttcatccttggcaatggtgcctggcacacctattccacctatgcttgcaagaattactaacgggttgactcagtcgttgaaagctttccatggcagatcatttacttgtgagtacaagtatgatggtcagcgtgcccagattcacaaagcacttgatggatccgtgcgaatattttcaaggcaaatgaaagaatcaacttccagatttcctgatcttgtgaatatgattaaggagttgtgcaagcccgaagtgtcaagctttatactggatgccgaggtggtaggaattaacaggaagaaaggaaatgagttgatgtcgttccaagagctatcttcaagagaaagagggaataagcattcctcaatttcaatagagaacataaaggttgacatttgtgtgtttgtttttgacatcatgttccatgatggagagagactactggattgccctcttcggcaaagaagaaagtacattcatgacttgttccatgagaagccaggatattttgagttagctcagcagctaaatatagaagcctgcgaagcttcaccagacaattctagcactttggctaggatggacacgtttttcagaaatgcatgccagtcttcttgtgagggtataatgttaaagactttggatgtcgatgctggatactctgcttccaaacgctgtgattcatggttaaaggtcaagcgtgactatgtgcaaggcttaggtgatagccttgacttggttccgattggtgcatggtatggaaacggacgtaaagctgggtggtacagcccttttctcatggcatgctacaaccctgaaactgaagagttccaaagtgtatgtcgtgttatgtctggtttctcggatgagttctataaagagatgaaggagttctattcgggggaaaggatactgcccaagaagcctgtttactacaaaacagacgagcaaccagagctgtggttcaccgcagaacaaatctgggagatccgaggtgcagacctgacgttgtcccctgtccaccatgcggccattgggcttgtccatccatcgcgcggcatctcggtgaggatgccccggtacatccgttcagttccagaccggagcccagaggactgcggcacggccgccgatattgctagcatgttcaaagcccagacccggaagatggatgtcagcagcgagggccaggagtagtaggcaatgcaaagctcagcccatttcctcgtcctagctttgcttatgttcaccagttctgtatatacacagaacgaaccagggtgaagtgaaccaccctactgatcaaatggtgaaaactgaagcgtaggacaggcagcactgatcccactggctttcaatttttctttgtacagaaactgaatgcagttggaacgcggaaggaagcccacgagttgcacgttcggggggaaaaaaacaatgcataagtacatcaggtatcagcttgctttgtactacagcgcgattattgtaacgcccgtggccgccggcgagtcagccgttgacgtgagcacagatttggtgggaagcgccggcgaggattgcgtcggcctgtgcgcgttcgtgtttctgaatatctgaatcgatcgtctattacaagtctcaggcacttatgtgctgttacacggatacaagagggttaacgctaataactcgaat

SEQ ID NO: 32285 - DNA, 4803 bp, Zea Mays
aagtttggaacgaattttaaaaaaccagtggtttaaccggttttataaaccatggttgccagttgcctgagcctcacagcgcgcgccaccaccaccgcgccatgccgttctccgccaccgccgccggcgcctccaaaccctaaacccgccgcagcaatcaatggcgtccctcctctcctcccccgacgattccaagtcgctgtccgtcaccacctcatcgctcttcctctcctccatcgcctctctcccctcttcccatgccttctccatcttcacctccgcctccacgcctcttccccctgtcccggtctctgtgcctcccgccgcactcatcccgggctcccgcttccttgtcgatgccttccgccatgccggaaacttctctgtcgcctacttcctctcgcacttccactccgaccactacagtggcctcggcccttcctggcgccgcggccttgtattctgctccgcgccaaccgcacgcctcgtctcatccgtgctctctgtcccgcctcaacttgtcgtctccctcgatatcggtgtccgtatcaccgttgatgggtggggcgtcaccgccgtggacgccaatcattgtcccggtgccgttcagttcctcttcgcctctcctgggccgagagccgagagatatgtgcacaccggtgactttcgttacacagagtctatgacgcgtgatcctaacttgctggagttcgtccgtgctgatgcggtgtttctggacaccacatactgcaaccccaagtttacattcccttcgcaagaggattctgtggattacatagtgaatgcaatcaaacgtgtgaaagaggagagttcagtatcaggagagcgtgtgctatgtctgatcgccacctatgctgtcggcaaggagaagattttgctggaggtcgcacagcgctgtgggtgttcaatccatgtggacagtaggaagatgaagattttgacactgttggggttcggtgggaagaatagcgtttttactgaggacgcaacagggacggatgtgcatgttcttgggtggaatttgttaggggagacttcgccctacttccagccgaattttgtgaaattgaaggagatcatgatggagagagggtatgctaaggctgttgggtttgtaccaactgggtggatgtatgaaaccaagaaggaaggttttgctgttagggtgaaagattcactcgaaatccatcttgttccttatagtgagcactcaagttacaatgagttgcgcgactatgttaagtttttgcacccaaagagtgtgatccctactgccggagtggatgctgggaagctcgatagtaaggaggcagttgctctgcagaagcattttgctgggttggttgatgagacagcaaacaaacaggagttcttgatggcattccatcgtaggtcaatagatgctactcgtagctgcaaagatgtggttgttaattgctcgagccagcttgatggggaggatgctgctttgttaccagcaatctcttctgcttctgaacaacaggataaactgatggagaatactatgcaggaaacacttaaagaactgtcagatttcttaccctcgtgggtgagccaggaacagatcacagacctgctgatgagttctgaaggtgatgttgttaaagcagcatcgattttttttgagcgggaaagagatttctttgaagaagcaaatgtttcttgtaatggcacacccaagacagagaaaaaccattcttctaatcatgggtcgtctgctgatgtaagtagtcagcaagaatcttctttattttcacagaagcctgtggaatactctgcaaaactggtaaatttgtctcctatgagaatgaaaccaaatactcccaaaaaggtaaataagaggggttccagcaatacaaacaagccaaaaaagaaaggccgattaacttcctcaacagaatctggtgggcggaagcagtccacaattacaaattatttcattagagctactgaagctgcttttaaaaggtgtagacctgaaagagtaactgtggaggcacatcaaaataacgtggaaaacagtgatcagttagctgatactgaaaaaacacaagatcagattgtagaccagcttctccagattgtagatggtagcatgtctagagaatatgcagtttatttgcttgagaaggcaaacggagatgtggctgtagcagttgacatattttacagttcaagtgagggtaataatgtaattgaggttgacaagaatattatgctgcagaatgcacaaggtgaaactgcagataattgtagtgaaacagacatggctagtggttattctcaggctactccaaaaatgtcaaacttacatgtaggaacttctttagcacatggagattctgccaacacatcactgctaattgaaaagtatctacctattgaacatgcttgctggatagcaggacagcctgcaccatacttgcatttggctcgcacatttgacttggttgaaaaggaaaaaggaaagatcaaaactatcgcaatattttgcaacatgttcaggagtttgcttgctttatcccctgatgatgttctacctgctgtttatctatgtactaataaaatttctcctgaccatgaaaatatgctaggaactgaacattggtgggagtctagttgtaactactctggaggaatcattaggaaccagcagatctaaaatacatgaaatgtacaaaacttacggtgatcttggtactgttgcccaagaatgtcgtcagaatcaaacactaattgctcctccccgttctctctcgatttgtgatgtatattccacgcttcggaaactaagtgcaatatcaggtagtggaagtgctgggaggagaaaaaatcttgtcttgcatctgattcggtcttgtagagaaacagaaatgaaatttcttgtcagaacactggttcgtaacttgcgtattggggctatgatgaagacgattttacctgcgcttgcacatgctgttgtttttgatagaaactgtgcagcagatcctgcggtgtcattggaaggcataaaatcacaactacagagtctttcaactgaagttgccgaggcatacaatgtcactcctaatctagatttgctcattccttctcttctgagagaaggcactgcattttcagcttcatccttggcaatggtgcctggcacacctattccacctatgcttgcaagaattactaacgggttgactcagtcgttgaaagctttccatggcagatcatttacttgtgagtacaagtatgatggtcagcgtgcccagattcacaaagcacttgatggatccgtgcgaatattttcaaggcaaatgaaagaatcaacttccagatttcctgatcttgtgaatatgattaaggagttgtgcaagcccgaagtgtcaagctttatactggatgccgaggtggtaggaattaacaggaagaaaggaaatgagttgatgtcgttccaagagctatcttcaagagaaagagggaataagcattcctcaatttcaatagagaacataaaggttgacatttgtgtgtttgtttttgacatcatgttccatgatggagagagacattcatgacttgttccatgagaagccaggatattttgagttagctcagcagctaaatatagaagcctgcgaagcttcaccagacaattctagcactttggctaggatggacacgtttttcagaaatgcatgccagtcttcttgtgagggtataatgttaaagactttggatgtcgatgctggatactctgcttccaaacgctgtgattcatggttaaaggtcaagcgtgactatgtgcaaggcttaggtgatagccttgacttggttccgattggtgcatggtatggaaacggacgtaaagctgggtggtacagcccttttctcatggcatgctacaaccctgaaactgaagagttccaaagtgtatgtcgtgttatgtctggtttctcggatgagttctataaagagatgaaggagttctattcgggggaaaggatactgcccaagaagcctgtttactacaaaacagacgagcaaccagagctgtggttcaccgcagaacaaatctgggagatccgaggtgcagacctgacgttgtcccctgtccaccatgcggccattgggcttgtccatccatcgcgcggcatctcggtgaggatgccccggtacatccgttcagttccagaccggagcccagaggactgcggcacggccgccgatattgctagcatgttcaaagcccagacccggaagatggatgtcagcagcgagggccaggagtagtaggcaatgcaaagctcagcccatttcctcgtcctagctttgcttatgttcaccagttctgtatatacacagaacgaaccagggtgaagtgaaccaccctactgatcaaatggtgaaaactgaagcgtaggacaggcagcactgatcccactggctttcaatttttctttgtacagaaactgaatgcagttggaacgcggaaggaagcccacgagttgcacgttcggggggaaaaaaacaatgcataagtacatcaggtatcagcttgctttgtactacagcgcgattattgtaacgcccgtggccgccggcgagtcagccgttgacgtgagcacagatttggtgggaagcgccggcgaggattgcgtcggcctgtgcgcgttcgtgtttctgaatatctgaatcgatcgtctattacaagtctcaggcacttatgtgctgttacacggatacaagagggttaacgctaataactcgaat

SEQ ID NO: 32286 - DNA, 4838 bp, Zea Mays
aagtttggaacgaattttaaaaaaccagtggtttaaccggttttataaaccatggttgccagttgcctgagcctcacagcgcgcgccaccaccaccgcgccatgccgttctccgccaccgccgccggcgcctccaaaccctaaacccgccgcagcaatcaatggcgtccctcctctcctcccccgacgattccaagtcgctgtccgtcaccacctcatcgctcttcctctcctccatcgcctctctcccctcttcccatgccttctccatcttcacctccgcctccacgcctcttccccctgtcccggtctctgtgcctcccgccgcactcatcccgggctcccgcttccttgtcgatgccttccgccatgccggaaacttctctgtcgcctacttcctctcgcacttccactccgaccactacagtggcctcggcccttcctggcgccgcggccttgtattctgctccgcgccaaccgcacgcctcgtctcatccgtgctctctgtcccgcctcaacttgtcgtctccctcgatatcggtgtccgtatcaccgttgatgggtggggcgtcaccgccgtggacgccaatcattgtcccggtgccgttcagttcctcttcgcctctcctgggccgagagccgagagatatgtgcacaccggtgactttcgttacacagagtctatgacgcgtgatcctaacttgctggagttcgtccgtgctgatgcggtgtttctggacaccacatactgcaaccccaagtttacattcccttcgcaagaggattctgtggattacatagtgaatgcaatcaaacgtgtgaaagaggagagttcagtatcaggagagcgtgtgctatgtctgatcgccacctatgctgtcggcaaggagaagattttgctggaggtcgcacagcgctgtgggtgttcaatccatgtggacagtaggaagatgaagattttgacactgttggggttcggtgggaagaatagcgtttttactgaggacgcaacagggacggatgtgcatgttcttgggtggaatttgttaggggagacttcgccctacttccagccgaattttgtgaaattgaaggagatcatgatggagagagggtatgctaaggctgttgggtttgtaccaactgggtggatgtatgaaaccaagaaggaaggttttgctgttagggtgaaagattcactcgaaatccatcttgttccttatagtgagcactcaagttacaatgagttgcgcgactatgttaagtttttgcacccaaagagtgtgatccctactgccggagtggatgctgggaagctcgatagtaaggaggcagttgctctgcagaagcattttgctgggttggttgatgagacagcaaacaaacaggagttcttgatggcattccatcgtaggtcaatagatgctactcgtagctgcaaagatgtggttgttaattgctcgagccagcttgatggggaggatgctgctttgttaccagcaatctcttctgcttctgaacaacaggataaactgatggagaatactatgcaggaaacacttaaagaactgtcagatttcttaccctcgtgggtgagccaggaacagatcacagacctgctgatgagttctgaaggtgatgttgttaaagcagcatcgattttttttgagcgggaaagagatttctttgaagaagcaaatgtttcttgtaatggcacacccaagacagagaaaaaccattcttctaatcatgggtcgtctgctgatgtaagtagtcagcaagaatcttctttattttcacagaagcctgtggaatactctgcaaaactggtaaatttgtctcctatgagaatgaaaccaaatactcccaaaaaggtaaataagaggggttccagcaatacaaacaagccaaaaaagaaaggccgattaacttcctcaacagaatctggtgggcggaagcagtccacaattacaaattatttcattagagctactgaagctgcttttaaaaggtgtagacctgaaagagtaactgtggaggcacatcaaaataacgtggaaaacagtgatcagttagctgatactgaaaaaacacaagatcagattgtagaccagcttctccagattgtagatggtagcatgtctagagaatatgcagtttatttgcttgagaaggcaaacggagatgtggctgtagcagttgacatattttacagttcaagtgagggtaataatgtaattgaggttgacaagaatattatgctgcagaatgcacaaggtgaaactgcagataattgtagtgaaacagacatggctagtggttattctcaggctactccaaaaatgtcaaacttacatgtaggaacttctttagcacatggagattctgccaacacatcactgctaattgaaaagtatctacctattgaacatgcttgctggatagcaggacagcctgcaccatacttgcatttggctcgcacatttgacttggttgaaaaggaaaaaggaaagatcaaaactatcgcaatattttgcaacatgttcaggagtttgcttgctttatcccctgatgatgttctacctgctgtttatctatgtactaataaaatttctcctgaccatgaaaatatgctaggaactgaacattggtgggagtctagttgtaactactctggaggaatcattaggaaccagcagatctaaaatacatgaaatgtacaaaacttacggtgatcttggtactgttgcccaagaatgtcgtcagaatcaaacactaattgctcctccccgttctctctcgatttgtgatgtatattccacgcttcggaaactaagtgcaatatcaggtagtggaagtgctgggaggagaaaaaatcttgtcttgcatctgattcggtcttgtagagaaacagaaatgaaatttcttgtcagaacactggttcgtaacttgcgtattggggctatgatgaagacgattttacctgcgcttgcacatgctgttgtttttgatagaaactgtgcagcagatcctgcggtgtcattggaaggcataaaatcacaactacagagtctttcaactgaagttgccgaggcatacaatgtcactcctaatctagatttgctcattccttctcttctgagagaaggcactgcattttcagcttcatccttggcaatggtgcctggcacacctattccacctatgcttgcaagaattactaacgggttgactcagtcgttgaaagctttccatggcagatcatttacttgtgagtacaagtatgatggtcagcgtgcccagattcacaaagcacttgatggatccgtgcgaatattttcaaggcaaatgaaagaatcaacttccagatttcctgatcttgtgaatatgattaaggagttgtgcaagcccgaagtgtcaagctttatactggatgccgaggtggtaggaattaacaggaagaaaggaaatgagttgatgtcgttccaagagctatcttcaagagaaagagggaataagcattcctcaatttcaatagagaacataaaggttgacatttgtgtgtttgtttttgacatcatgttccatgatggagagagactactggattgccctcttcggcaaagaagaaagtacattcatgacttgttccatgagaagccaggatattttgagttagctcagcagctaaatatagaagcctgcgaagcttcaccagacaattctagcactttggctaggatggacacgtttttcagaaatgcatgccagtcttcttgtgagggtataatgttaaagactttggatgtcgatgctggatactctgcttccaaacgctgtgattcatggttaaaggtcaagcgtgactatgtgcaaggcttaggtgatagccttgacttggttccgattggtgcatggtatggaaacggacgtaaagctgggtggtacagcccttttctcatggcatgctacaaccctgaaactgaagagttccaaagtgtatgtcgtgttatgtctggtttctcggatgagttctataaagagatgaaggagttctattcgggggaaaggatactgcccaagaagcctgtttactacaaaacagacgagcaaccagagctgtggttcaccgcagaacaaatctgggagatccgaggtgcagacctgacgttgtcccctgtccaccatgcggccattgggcttgtccatccatcgcgcggcatctcggtgaggatgccccggtacatccgttcagttccagaccggagcccagaggactgcggcacggccgccgatattgctagcatgttcaaagcccagacccggaagatggatgtcagcagcgagggccaggagtagtaggcaatgcaaagctcagcccatttcctcgtcctagctttgcttatgttcaccagttctgtatatacacagaacgaaccagggtgaagtgaaccaccctactgatcaaatggtgaaaactgaagcgtaggacaggcagcactgatcccactggctttcaatttttctttgtacagaaactgaatgcagttggaacgcggaaggaagcccacgagttgcacgttcggggggaaaaaaacaatgcataagtacatcaggtatcagcttgctttgtactacagcgcgattattgtaacgcccgtggccgccggcgagtcagccgttgacgtgagcacagatttggtgggaagcgccggcgaggattgcgtcggcctgtgcgcgttcgtgtttctgaatatctgaatcgatcgtctattacaagtctcaggcacttatgtgctgttacacggatacaagagggttaacgctaataactcgaat

SEQ ID NO: 32287 - DNA, 4828 bp, Zea Mays
aagtttggaacgaattttaaaaaaccagtggtttaaccggttttataaaccatggttgccagttgcctgagcctcacagcgcgcgccaccaccaccgcgccatgccgttctccgccaccgccgccggcgcctccaaaccctaaacccgccgcagcaatcaatggcgtccctcctctcctcccccgacgattccaagtcgctgtccgtcaccacctcatcgctcttcctctcctccatcgcctctctcccctcttcccatgccttctccatcttcacctccgcctccacgcctcttccccctgtcccggtctctgtgcctcccgccgcactcatcccgggctcccgcttccttgtcgatgccttccgccatgccggaaacttctctgtcgcctacttcctctcgcacttccactccgaccactacagtggcctcggcccttcctggcgccgcggccttgtattctgctccgcgccaaccgcacgcctcgtctcatccgtgctctctgtcccgcctcaacttgtcgtctccctcgatatcggtgtccgtatcaccgttgatgggtggggcgtcaccgccgtggacgccaatcattgtcccggtgccgttcagttcctcttcgcctctcctgggccgagagccgagagatatgtgcacaccggtgactttcgttacacagagtctatgacgcgtgatcctaacttgctggagttcgtccgtgctgatgcggtgtttctggacaccacatactgcaaccccaagtttacattcccttcgcaagaggattctgtggattacatagtgaatgcaatcaaacgtgtgaaagaggagagttcagtatcaggagagcgtgtgctatgtctgatcgccacctatgctgtcggcaaggagaagattttgctggaggtcgcacagcgctgtgggtgttcaatccatgtggacagtaggaagatgaagattttgacactgttggggttcggtgggaagaatagcgtttttactgaggacgcaacagggacggatgtgcatgttcttgggtggaatttgttaggggagacttcgccctacttccagccgaattttgtgaaattgaaggagatcatgatggagagagggtatgctaaggctgttgggtttgtaccaactgggtggatgtatgaaaccaagaaggaaggttttgctgttagggtgaaagattcactcgaaatccatcttgttccttatagtgagcactcaagttacaatgagttgcgcgactatgttaagtttttgcacccaaagagtgtgatccctactgccggagtggatgctgggaagctcgatagtaaggaggcagttgctctgcagaagcattttgctgggttggttgatgagacagcaaacaaacaggagttcttgatggcattccatcgtaggtcaatagatgctactcgtagctgcaaagatgtggttgttaattgctcgagccagcttgatggggaggatgctgctttgttaccagcaatctcttctgcttctgaacaacaggataaactgatggagaatactatgcaggaaacacttaaagaactgtcagatttcttaccctcgtgggtgagccaggaacagatcacagacctgctgatgagttctgaaggtgatgttgttaaagcagcatcgattttttttgagcgggaaagagatttctttgaagaagcaaatgtttcttgtaatggcacacccaagacagagaaaaaccattcttctaatcatgggtcgtctgctgatgtaagtagtcagcaagaatcttctttattttcacagaagcctgtggaatactctgcaaaactggtaaatttgtctcctatgagaatgaaaccaaatactcccaaaaaggtaaataagaggggttccagcaatacaaacaagccaaaaaagaaaggccgattaacttcctcaacagaatctggtgggcggaagcagtccacaattacaaattatttcattagagctactgaagctgcttttaaaaggtgtagacctgaaagagtaactgtggaggcacatcaaaataacgtggaaaacagtgatcagttagctgatactgaaaaaacacaagatcagattgtagaccagcttctccagattgtagatggtagcatgtctagagaatatgcagtttatttgcttgagaaggcaaacggagatgtggctgtagcagttgacatattttacagttcaagtgagggtaataatgtaattgaggttgacaagaatattatgctgcagaatgcacaaggtgaaactgcagataattgtagtgaaacagacatggctagtggttattctcaggctactccaaaaatgtcaaacttacatgtaggaacttctttagcacatggagattctgccaacacatcactgctaattgaaaagtatctacctattgaacatgcttgctggatagcaggacagcctgcaccatacttgcatttggctcgcacatttgacttggttgaaaaggaaaaaggaaagatcaaaactatcgcaatattttgcaacatgttcaggagtttgcttgctttatcccctgatgatgttctacctgctgtttatctatgtactaataaaatttctcctgaccatgaaaatatggaactgaacattggtgggagtctagttgtaactactctggaggaatcattaggaaccagcagatctaaaatacatgaaatgtacaaaacttacggtgatcttggtactgttgcccaagaatgtcgtcagaatcaaacactaattgctcctccccgttctctctcgatttgtgatgtatattccacgcttcggaaactaagtgcaatatcaggtagtggaagtgctgggaggagaaaaaatcttgtcttgcatctgattcggtcttgtagagaaacagaaatgaaatttcttgtcagaacactggttcgtaacttgcgtattggggctatgatgaagacgattttacctgcgcttgcacatgctgttgtttttgatagaaactgtgcagcagatcctgcggtgtcattggaaggcataaaatcacaactacagagtctttcaactgaagttgccgaggcatacaatgtcactcctaatctagatttgctcattccttctcttctgagagaaggcactgcattttcagcttcatccttggcaatggtgcctggcacacctattccacctatgcttgcaagaattactaacgggttgactcagtcgttgaaagctttccatggcagatcatttacttgtgagtacaagtatgatggtcagcgtgcccagattcacaaagcacttgatggatccgtgcgaatattttcaaggcaaatgaaagaatcaacttccagatttcctgatcttgtgaatatgattaaggagttgtgcaagcccgaagtgtcaagctttatactggatgccgaggtggtaggaattaacaggaagaaaggaaatgagttgatgtcgttccaagagctatcttcaagagaaagagggaataagcattcctcaatttcaatagagaacataaaggttgacatttgtgtgtttgtttttgacatcatgttccatgatggagagagactactggattgccctcttcggcaaagaagaaagtacattcatgacttgttccatgagaagccaggatattttgagttagctcagcagctaaatatagaagcctgcgaagcttcaccagacaattctagcactttggctaggatggacacgtttttcagaaatgcatgccagtcttcttgtgagggtataatgttaaagactttggatgtcgatgctggatactctgcttccaaacgctgtgattcatggttaaaggtcaagcgtgactatgtgcaaggcttaggtgatagccttgacttggttccgattggtgcatggtatggaaacggacgtaaagctgggtgcccttttctcatggcatgctacaaccctgaaactgaagagttccaaagtgtatgtcgtgttatgtctggtttctcggatgagttctataaagagatgaaggagttctattcgggggaaaggatactgcccaagaagcctgtttactacaaaacagacgagcaaccagagctgtggttcaccgcagaacaaatctgggagatccgaggtgcagacctgacgttgtcccctgtccaccatgcggccattgggcttgtccatccatcgcgcggcatctcggtgaggatgccccggtacatccgttcagttccagaccggagcccagaggactgcggcacggccgccgatattgctagcatgttcaaagcccagacccggaagatggatgtcagcagcgagggccaggagtagtaggcaatgcaaagctcagcccatttcctcgtcctagctttgcttatgttcaccagttctgtatatacacagaacgaaccagggtgaagtgaaccaccctactgatcaaatggtgaaaactgaagcgtaggacaggcagcactgatcccactggctttcaatttttctttgtacagaaactgaatgcagttggaacgcggaaggaagcccacgagttgcacgttcggggggaaaaaaacaatgcataagtacatcaggtatcagcttgctttgtactacagcgcgattattgtaacgcccgtggccgccggcgagtcagccgttgacgtgagcacagatttggtgggaagcgccggcgaggattgcgtcggcctgtgcgcgttcgtgtttctgaatatctgaatcgatcgtctattacaagtctcaggcacttatgtgctgttacacggatacaagagggttaacgctaataactcgaat

SEQ ID NO: 32288 - DNA, 4834 bp, Zea Mays
aagtttggaacgaattttaaaaaaccagtggtttaaccggttttataaaccatggttgccagttgcctgagcctcacagcgcgcgccaccaccaccgcgccatgccgttctccgccaccgccgccggcgcctccaaaccctaaacccgccgcagcaatcaatggcgtccctcctctcctcccccgacgattccaagtcgctgtccgtcaccacctcatcgctcttcctctcctccatcgcctctctcccctcttcccatgccttctccatcttcacctccgcctccacgcctcttccccctgtcccggtctctgtgcctcccgccgcactcatcccgggctcccgcttccttgtcgatgccttccgccatgccggaaacttctctgtcgcctacttcctctcgcacttccactccgaccactacagtggcctcggcccttcctggcgccgcggccttgtattctgctccgcgccaaccgcacgcctcgtctcatccgtgctctctgtcccgcctcaacttgtcgtctccctcgatatcggtgtccgtatcaccgttgatgggtggggcgtcaccgccgtggacgccaatcattgtcccggtgccgttcagttcctcttcgcctctcctgggccgagagccgagagatatgtgcacaccggtgactttcgttacacagagtctatgacgcgtgatcctaacttgctggagttcgtccgtgctgatgcggtgtttctggacaccacatactgcaaccccaagtttacattcccttcgcaagaggattctgtggattacatagtgaatgcaatcaaacgtgtgaaagaggagagttcagtatcaggagagcgtgtgctatgtctgatcgccacctatgctgtcggcaaggagaagattttgctggaggtcgcacagcgctgtgggtgttcaatccatgtggacagtaggaagatgaagattttgacactgttggggttcggtgggaagaatagcgtttttactgaggacgcaacagggacggatgtgcatgttcttgggtggaatttgttaggggagacttcgccctacttccagccgaattttgtgaaattgaaggagatcatgatggagagagggtatgctaaggctgttgggtttgtaccaactgggtggatgtatgaaaccaagaaggaaggttttgctgttagggtgaaagattcactcgaaatccatcttgttccttatagtgagcactcaagttacaatgagttgcgcgactatgttaagtttttgcacccaaagagtgtgatccctactgccggagtggatgctgggaagctcgatagtaaggaggcagttgctctgcagaagcattttgctgggttggttgatgagacagcaaacaaacaggagttcttgatggcattccatcgtaggtcaatagatgctactcgtagctgcaaagatgtggttgttaattgctcgagccagcttgatggggaggatgctgctttgttaccagcaatctcttctgcttctgaacaacaggataaactgatggagaatactatgcaggaaacacttaaagaactgtcagatttcttaccctcgtgggtgagccaggaacagatcacagacctgctgatgagttctgaaggtgatgttgttaaagcagcatcgattttttttgagcgggaaagagatttctttgaagaagcaaatgtttcttgtaatggcacacccaagacagagaaaaaccattcttctaatcatgggtcgtctgctgatgtaagtagtcagcaagaatcttctttattttcacagaagcctgtggaatactctgcaaaactggtaaatttgtctcctatgagaatgaaaccaaatactcccaaaaaggtaaataagaggggttccagcaatacaaacaagccaaaaaagaaaggccgattaacttcctcaacagaatctggtgggcggaagcagtccacaattacaaattatttcattagagctactgaagctgcttttaaaaggtgtagacctgaaagagtaactgtggaggcacatcaaaataacgtggaaaacagtgatcagttagctgatactgaaaaaacacaagatcagattgtagaccagcttctccagattgtagatggtagcatgtctagagaatatgcagtttatttgcttgagaaggcaaacggagatgtggctgtagcagttgacatattttacagttcaagtgagggtaataatgtaattgaggttgacaagaatattatgctgcagaatgcacaaggtgaaactgcagataattgtagtgaaacagacatggctagtggttattctcaggctactccaaaaatgtcaaacttacatgtaggaacttctttagcacatggagattctgccaacacatcactgctaattgaaaagtatctacctattgaacatgcttgctggatagcaggacagcctgcaccatacttgcatttggctcgcacatttgacttggttgaaaaggaaaaaggaaagatcaaaactatcgcaatattttgcaacatgttcaggagtttgcttgctttatcccctgatgatgttctacctgctgtttatctatgtactaataaaatttctcctgaccatgaaaatatggaactgaacattggtgggagtctagttgtaactactctggaggaatcattaggaaccagcagatctaaaatacatgaaatgtacaaaacttacggtgatcttggtactgttgcccaagaatgtcgtcagaatcaaacactaattgctcctccccgttctctctcgatttgtgatgtatattccacgcttcggaaactaagtgcaatatcaggtagtggaagtgctgggaggagaaaaaatcttgtcttgcatctgattcggtcttgtagagaaacagaaatgaaatttcttgtcagaacactggttcgtaacttgcgtattggggctatgatgaagacgattttacctgcgcttgcacatgctgttgtttttgatagaaactgtgcagcagatcctgcggtgtcattggaaggcataaaatcacaactacagagtctttcaactgaagttgccgaggcatacaatgtcactcctaatctagatttgctcattccttctcttctgagagaaggcactgcattttcagcttcatccttggcaatggtgcctggcacacctattccacctatgcttgcaagaattactaacgggttgactcagtcgttgaaagctttccatggcagatcatttacttgtgagtacaagtatgatggtcagcgtgcccagattcacaaagcacttgatggatccgtgcgaatattttcaaggcaaatgaaagaatcaacttccagatttcctgatcttgtgaatatgattaaggagttgtgcaagcccgaagtgtcaagctttatactggatgccgaggtggtaggaattaacaggaagaaaggaaatgagttgatgtcgttccaagagctatcttcaagagaaagagggaataagcattcctcaatttcaatagagaacataaaggttgacatttgtgtgtttgtttttgacatcatgttccatgatggagagagactactggattgccctcttcggcaaagaagaaagtacattcatgacttgttccatgagaagccaggatattttgagttagctcagcagctaaatatagaagcctgcgaagcttcaccagacaattctagcactttggctaggatggacacgtttttcagaaatgcatgccagtcttcttgtgagggtataatgttaaagactttggatgtcgatgctggatactctgcttccaaacgctgtgattcatggttaaaggtcaagcgtgactatgtgcaaggcttaggtgatagccttgacttggttccgattggtgcatggtatggaaacggacgtaaagctgggtggtacagcccttttctcatggcatgctacaaccctgaaactgaagagttccaaagtgtatgtcgtgttatgtctggtttctcggatgagttctataaagagatgaaggagttctattcgggggaaaggatactgcccaagaagcctgtttactacaaaacagacgagcaaccagagctgtggttcaccgcagaacaaatctgggagatccgaggtgcagacctgacgttgtcccctgtccaccatgcggccattgggcttgtccatccatcgcgcggcatctcggtgaggatgccccggtacatccgttcagttccagaccggagcccagaggactgcggcacggccgccgatattgctagcatgttcaaagcccagacccggaagatggatgtcagcagcgagggccaggagtagtaggcaatgcaaagctcagcccatttcctcgtcctagctttgcttatgttcaccagttctgtatatacacagaacgaaccagggtgaagtgaaccaccctactgatcaaatggtgaaaactgaagcgtaggacaggcagcactgatcccactggctttcaatttttctttgtacagaaactgaatgcagttggaacgcggaaggaagcccacgagttgcacgttcggggggaaaaaaacaatgcataagtacatcaggtatcagcttgctttgtactacagcgcgattattgtaacgcccgtggccgccggcgagtcagccgttgacgtgagcacagatttggtgggaagcgccggcgaggattgcgtcggcctgtgcgcgttcgtgtttctgaatatctgaatcgatcgtctattacaagtctcaggcacttatgtgctgttacacggatacaagagggttaacgctaataactcgaat

SEQ ID NO: 32289 - DNA, 1605 bp, Zea Mays
ctttccatggcagatcatttacttgtatgatggtcagcgtgcccagattcacaaagcacttgatggatccgtgcgaatattttcaaggcaaatgaaagaatcaacttccagatttcctgatcttgtgaatatgattaaggagttgtgcaagcccgaagtgtcaagctttatactggatgccgaggtggtaggaattaacaggaagaaaggaaatgagttgatgtcgttccaagagctatcttcaagagaaagagggaataagcattcctcaatttcaatagagaacataaaggttgacatttgtgtgtttgtttttgacatcatgttccatgatggagagagggattttttttttgctcctgcagactactggattgccctcttcggcaaagaagaaagtacattcatgacttgttccatgagaagccaggatattttgagttagctcagcagctaaatatagaagcctgcgaagcttcaccagacaattctagcactttggctaggatggacacgtttttcagaaatgcatgccagtcttcttgtgagggtataatgttaaagactttggatgtcgatgctggatactctgcttccaaacgctgtgattcatggttaaaggtcaagcgtgactatgtgcaaggcttaggtgatagccttgacttggttccgattggtgcatggtatggaaacggacgtaaagctgggtggtacagcccttttctcatggcatgctacaaccctgaaactgaagagttccaaagtgtatgtcgtgttatgtctggtttctcggatgagttctataaagagatgaaggagttctattcgggggaaaggatactgcccaagaagcctgtttactacaaaacagacgagcaaccagagctgtggttcaccgcagaacaaatctgggagatccgaggtgcagacctgacgttgtcccctgtccaccatgcggccattgggcttgtccatccatcgcgcggcatctcggtgaggatgccccggtacatccgttcagttccagaccggagcccagaggactgcggcacggccgccgatattgctagcatgttcaaagcccagacccggaagatggatgtcagcagcgagggccaggagtagtaggcaatgcaaagctcagcccatttcctcgtcctagctttgcttatgttcaccagttctgtatatacacagaacgaaccagggtgaagtgaaccaccctactgatcaaatggtgaaaactgaagcgtaggacaggcagcactgatcccactggctttcaatttttctttgtacagaaactgaatgcagttggaacgcggaaggaagcccacgagttgcacgttcggggggaaaaaaacaatgcataagtacatcaggtatcagcttgctttgtactacagcgcgattattgtaacgcccgtggccgccggcgagtcagccgttgacgtgagcacagatttggtgggaagcgccggcgaggattgcgtcggcctgtgcgcgttcgtgtttctgaatatctgaatcgatcgtctattacaagtctcaggcacttatgtgctgttacacggatacaagagggttaacgctaataactcgaat

SEQ ID NO: 32290 - DNA, 3633 bp, Zea Mays
ataggtttcgctggtttgccatcaaacgagtgagctgcttgggccaacgagcattgctctgtttctattatgtttttgcctacccgacatacggtgcttacagaccttatacacggctggccagcccacgccacaattctacagtaacaatcaatctagcccagctacggcccatacccttctactgttcttcataagtgccagcttcctcttctatctccgatacagcaacatagaccggatgtcacagtgaccaccgccctctagctcgtcgcctcgtcggcgtgcccagcttctggtccagcgcgtcgcctccgctgctgctgggcccgacgcccaactaccgtgccgaggtcccaggcaggaagcatcttggcgtacgtgccgccggcgacaagcacccaccacaccagtcaaatgaatagttgatttcatttcaagcaattcctgaacaactatattacagtcatgaagtcgttagccaagcaagagacacagccaaaatcgcggctcattgtgcgccttggtgtattccttgcatctcaccacattctgttcagtgttatatgctgctatgcaggcattatcgcgctactactccttccttcacttgcaaaaaacacatacctctcggagaatgctcttatacctggctctgcaaatccattattttctactgaagatgccattgaagcaaacagatttatgaaagcaattgaagctgtggctagagactcaagcagtgtaataggcatggcaaatttcatagcacaacaaatagaagatctaggtgcagaagtgtgttaccaaaagtttctccctcatggcaagaattttcaccctctgaagttcttcacctccatgacaaatgatattgcaattcaacctaatggcactgccaccaattttgggataaatactatcggcattttacgagctcctcgtggcgatggaaaagaagcaatagtgctggttactccttataattctcaaagagttcagtcgaatgaattattatcgctggctcttggtttctctgtcttctctctcttaagtcgagcagcatggctgtccaaggatgttgtgtggttatctgcagactcacagtttggagagtatgctgcagtctctgcatggctaaaccagtatcataatcccgtgtttttgagtcactcagtggtgtcacataccaagatgtacggtgcaaacaatatatatgatggtaattcagaaaaaacagaagccacggctttcaaacgtgctggaacaatggctgctgctctcatatttaaagttggggaaaccagaagatacagtgacagggatagtgttacgatttatgcagaggcatctaatggacaaatgccaaacttggaccttctgaatgtggtgcactatttggctgttcacagacaaggttttcgtgtgaacatcgctgcatttagttctttgttgagctctgcatggctcagggttattgctgaaattttgcatactattggtagtgtgttaagaaaaataaatcctgactggaagcttgatattgcagtccctgattatgtggaagggactgcaaatctagctaactctatgtacaaccaggctcttggagtgcccacagggtcccatggtgctttccgtgattatcaagttgatgcggtttctttagaattttcaccaacatttcatgtcaaaaatgagaatgctaaatctttgtttcttctgaagggtggaaggtatcctaatgtgtttcaattgtgctgtttaatgcttcatcgttattagagcatggggggggggcaccttttgattttactaatgaagtagaagagtttgcattcatgctttgaggcatggaactgtttgtactgtaacttcacaacaatggtaacataacagtaaacaaattatttcaactgtttttgatgtaaatgtaacaattgctgaggttatattatgttccagtaacaaatagctgatcagtaaatagttttgtatctgtgaccgtgcaagttattgcagaaaattatttcatcagggatatgattgcatgttaaaccacataaaaggtaaaaattaacttgagtccagtcttattttataagaattttagcatattacggttttgtcgagggcagtacatagacattgtgtgcataaaaaatatttaatataagtgggacgaatgtgattattagcatgaactggtaaaatttggagaaacaccataattagttggtcttgttttttttttttttgcatgactataacaacccaacaggaaatatgtgcatggatggaagtgttttatgcaaatgttgcactgaagtaaacacaggaacgtgatcttaggttgccacttggtgataggctgagggtgtttaacagctttactttcatttcctgcaaaatattcctcagcagaattcgtttgactcgtgagagacttttgattcaggttaattgaaggagtggcacgttctgtgaacaatctgcttgagaagttccatcagtcctttttcctgtacttccttacaggtccaagcaagttcatttcggttggtgtgtatatgattccgtttgcattgcttttggcacctctcccaatagttgctgctgcccttgctgatggcagtagaagcatggaaaaaacagcggataagttgataggcgacggtaaaacagatggcattgctgatatttcgcagaacaagggtggatcatggaaatggcttcgagctgcaaaagtattgcttgttgtccaattatgggcagtacttgtttcactacttccatattacattactcagatacctgatgccacacctacgcaaagcacactcatttgggttgtgctctccatcgtcgtactgatctccctatctgtcttgtttggctcaccatactcaactggtgttgaatggaaacttctgaaggctaccatgatcacttccatctccatcggattggggcttatgtcgataataaatttcgccactgctcagcttggtgctctgatagtgatcccaatgtgtttgttttctcggcctctgaaggcatcagggatgaatttccttcctcgggcagttttgttggcttcaaatgtagcttttgctgtgttgggttttcctccagttgcgttgctgattatgaaaggagtgtccaagggatcgaggtcgtggacaatagatgttggagatttctgggtatggatggagttcctgtgggaaaggagcagcgcgacgtatctttacctatttcttgtacatcttccctgctggcttttgtgcgtccttgtgttcctgcacccatgtcaccaatcagaatataagctgaagcaggaatagctgtttggcatccatagtcttgtctttttggatggtaaatcttgtagactagtgtagaaatttctcactttcacaaacttttggttacccataattcggaaattattcacccagttggagacgacttgtagacgatgtatcctgcctaatgtactgtctgcaacattttcgaaggcatgtttttaaagctgcttgttgcagtaattgatttctaagttttttgttgatagcagccgagaaataaatcgaagttggaggtaagggacgctttagagactaacgtact

SEQ ID NO: 32291 - DNA, 3401 bp, Zea Mays
cgagcattgctctgtttctattatgtttttgcctacccgacatacggtgcttacagaccttatacacggctggccagcccacgccacaattctacagtaacaatcaatctagcccagctacggcccatacccttctactgttcttcataagtgccagcttcctcttctatctccgatacagcaacatagaccggatgtcacagtgaccaccgccctctagctcgtcgcctcgtcggcgtgcccagcttctggtccagcgcgtcgcctccgctgctgctgggcccgacgcccaactaccgtgccgaggtcccaggcaggaagcatcttggcgtacgtgccgccggcgacaagcacccaccacaccagtcatgaagtcgttagccaagcaagagacacagccaaaatcgcggctcattgtgcgccttggtgtattccttgcatctcaccacattctgttcagtgttatatgctgctatgcaggcattatcgcgctactactccttccttcacttgcaaaaaacacatacctctcggagaatgctcttatacctggctctgcaaatccattattttctactgaagatgccattgaagcaaacagatttatgaaagcaattgaagctgtggctagagactcaagcagtgtaataggcatggcaaatttcatagcacaacaaatagaagatctaggtgcagaagtgtgttaccaaaagtttctccctcatggcaagaattttcaccctctgaagttcttcacctccatgacaaatgatattgcaattcaacctaatggcactgccaccaattttgggataaatactatcggcattttacgagctcctcgtggcgatggaaaagaagcaatagtgctggttactccttataattctcaaagagttcagtcgaatgaattattatcgctggctcttggtttctctgtcttctctctcttaagtcgagcagcatggctgtccaaggatgttgtgtggttatctgcagactcacagtttggagagtatgctgcagtctctgcatggctaaaccagtatcataatcccgtgtttttgagtcactcagtggtgtcacataccaagatgtacggtgcaaacaatatatatgatggtaattcagaaaaaacagaagccacggctttcaaacgtgctggaacaatggctgctgctctcatatttaaagttggggaaaccagaagatacagtgacagggatagtgttacgatttatgcagaggcatctaatggacaaatgccaaacttggaccttctgaatgtggtgcactatttggctgttcacagacaagtccctgattatgtggaagggactgcaaatctagctaactctatgtacaaccaggctcttggagtgcccacagggtcccatggtgctttccgtgattatcaagttgatgcggtttctttagaattttcaccaacatttcatgtcaaaaatgagaatgctaaatctttgtttcttctgaagggtggaaggtatcctaatgtgtttcaattgtgctgtttaatgcttcatcgttattagagcatggggggggggcaccttttgattttactaatgaagtagaagagtttgcattcatgctttgaggcatggaactgtttgtactgtaacttcacaacaatggtaacataacagtaaacaaattatttcaactgtttttgatgtaaatgtaacaattgctgaggttatattatgttccagtaacaaatagctgatcagtaaatagttttgtatctgtgaccgtgcaagttattgcagaaaattatttcatcagggatatgattgcatgttaaaccacataaaaggtaaaaattaacttgagtccagtcttattttataagaattttagcatattacggttttgtcgagggcagtacatagacattgtgtgcataaaaaatatttaatataagtgggacgaatgtgattattagcatgaactggtaaaatttggagaaacaccataattagttggtcttgttttttttttttttgcatgactataacaacccaacaggaaatatgtgcatggatggaagtgttttatgcaaatgttgcactgaagtaaacacaggaacgtgatcttaggttgccacttggtgataggctgagggtgtttaacagctttactttcatttcctgcaaaatattcctcagcagaattcgtttgactcgtgagagacttttgattcaggttaattgaaggagtggcacgttctgtgaacaatctgcttgagaagttccatcagtcctttttcctgtacttccttacaggtccaagcaagttcatttcggttggtgtgtatatgattccgtttgcattgcttttggcacctctcccaatagttgctgctgcccttgctgatggcagtagaagcatggaaaaaacagcggataagttgataggcgacggtaaaacagatggcattgctgatatttcgcagaacaagggtggatcatggaaatggcttcgagctgcaaaagtattgcttgttgtccaattatgggcagtacttgtttcactacttccatattacattactcagatacctgatgccacacctacgcaaagcacactcatttgggttgtgctctccatcgtcgtactgatctccctatctgtcttgtttggctcaccatactcaactggtgttgaatggaaacttctgaaggctaccatgatcacttccatctccatcggattggggcttatgtcgataataaatttcgccactgctcagcttggtgctctgatagtgatcccaatgtgtttgttttctcggcctctgaaggcatcagggatgaatttccttcctcgggcagttttgttggcttcaaatgtagcttttgctgtgttgggttttcctccagttgcgttgctgattatgaaaggagtgtccaagggatcgaggtcgtggacaatagatgttggagatttctgggtatggatggagttcctgtgggaaaggagcagcgcgacgtatctttacctatttcttgtacatcttccctgctggcttttgtgcgtccttgtgttcctgcacccatgtcaccaatcagaatataagctgaagcaggaatagctgtttggcatccatagtcttgtctttttggatggtaaatcttgtagactagtgtagaaatttctcactttcacaaacttttggttacccataattcggaaattattcacccagttggagacgacttgtagacgatgtatcctgcctaatgtactgtctgcaacattttcgaaggcatgtttttaaagctgcttgttgcagtaattgatttctaagttttttgttgatagcagccgagaaataaatcgaagttggaggtaagggacgctttagagactaacgtact

SEQ ID NO: 32292 - DNA, 2586 bp, Zea Mays
cataagtgccagcttcctcttctatctccgatacagcaacatagaccggatgtcacagtgaccaccgccctctagctcgtcgcctcgtcggcgtgcccagcttctggtccagcgcgtcgcctccgctgctgctgggcccgacgcccaactaccgtgccgaggtcccaggcaggaagcatcttggcgtacgtgccgccggcgacaagcacccaccacaccagtcatgaagtcgttagccaagcaagagacacagccaaaatcgcggctcattgtgcgccttggtgtattccttgcatctcaccacattctgttcagtgttatatgctgctatgcaggcattatcgcgctactactccttccttcacttgcaaaaaacacatacctctcggagaatgctcttatacctggctctgcaaatccattattttctactgaagatgccattgaagcaaacagatttatgaaagcaattgaagctgtggctagagactcaagcagtgtaataggcatggcaaatttcatagcacaacaaatagaagatctaggtgcagaagtgtgttaccaaaagtttctccctcatggcaagaattttcaccctctgaagttcttcacctccatgacaaatgatattgcaattcaacctaatggcactgccaccaattttgggataaatactatcggcattttacgagctcctcgtggcgatggaaaagaagcaatagtgctggttactccttataattctcaaagagttcagtcgaatgaattattatcgctggctcttggtttctctgtcttctctctcttaagtcgagcagcatggctgtccaaggatgttgtgtggttatctgcagactcacagtttggagagtatgctgcagtctctgcatggctaaaccagtatcataatcccgtgtttttgagtcactcagtggtgtcacataccaagatgtacggtgcaaacaatatatatgatggtaattcagaaaaaacagaagccacggctttcaaacgtgctggaacaatggctgctgctctcatatttaaagttggggaaaccagaagatacagtgacagggatagtgttacgatttatgcagaggcatctaatggacaaatgccaaacttggaccttctgaatgtggtgcactatttggctgttcacagacaaggttttcgtgtgaacatcgctgcatttagttctttgttgagctctgcatggctcagggttattgctgaaattttgcatactattggtagtgtgttaagaaaaataaatcctgactggaagcttgatattgcagtccctgattatgtggaagggactgcaaatctagctaactctatgtacaaccaggctcttggagtgcccacagggtcccatggtgctttccgtgattatcaagttgatgcggtttctttagaattttcaccaacatttcatgtcaaaaatgagaatgctaaatctttgtttcttctgaagggtggaaggtccaagcaagttcatttcggttggtgtgtatatgattccgtttgcattgcttttggcacctctcccaatagttgctgctgcccttgctgatggcagtagaagcatggaaaaaacagcggataagttgataggcgacggtaaaacagatggcattgctgatatttcgcagaacaagggtggatcatggaaatggcttcgagctgcaaaagtattgcttgttgtccaattatgggcagtacttgtttcactacttccatattacattactcagatacctgatgccacacctacgcaaagcacactcatttgggttgtgctctccatcgtcgtactgatctccctatctgtcttgtttggctcaccatactcaactggtgttgaatggaaacttctgaaggctaccatgatcacttccatctccatcggattggggcttatgtcgataataaatttcgccactgctcagcttggtgctctgatagtgatcccaatgtgtttgttttctcggcctctgaaggcatcagggatgaatttccttcctcgggcagttttgttggcttcaaatgtagcttttgctgtgttgggttttcctccagttgcgttgctgattatgaaaggagtgtccaagggatcgaggtcgtggacaatagatgttggagatttctgggtatggatggagttcctgtgggaaaggagcagcgcgacgtatctttacctatttcttgtacatcttccctgctggcttttgtgcgtccttgtgttcctgcacccatgtcaccaatcagaatataagctgaagcaggaatagctgtttggcatccatagtcttgtctttttggatggtaaatcttgtagactagtgtagaaatttctcactttcacaaacttttggttacccataattcggaaattattcacccagttggagacgacttgtagacgatgtatcctgcctaatgtactgtctgcaacattttcgaaggcatgtttttaaagctgcttgttgcagtaattgatttctaagttttttgttgatagcagccgagaaataaatcgaagttggaggtaagggacgctttagagactaacgtact

SEQ ID NO: 32293 - DNA, 2609 bp, Zea Mays
atacagcaacatagaccggatgtcacagtgaccaccgccctctagctcgtcgcctcgtcggcgtgcccagcttctggtccagcgcgtcgcctccgctgctgctgggcccgacgcccaactaccgtgccgaggtcccaggcaggaagcatcttggcgtacgtgccgccggcgacaagcacccaccacaccagtcaaatgaatagttgatttcatttcaagcaattcctgaacaactatattacagtcatgaagtcgttagccaagcaagagacacagccaaaatcgcggctcattgtgcgccttggtgtattccttgcatctcaccacattctgttcagtgttatatgctgctatgcaggcattatcgcgctactactccttccttcacttgcaaaaaacacatacctctcggagaatgctcttatacctggctctgcaaatccattattttctactgaagatgccattgaagcaaacagatttatgaaagcaattgaagctgtggctagagactcaagcagtgtaataggcatggcaaatttcatagcacaacaaatagaagatctaggtgcagaagtgtgttaccaaaagtttctccctcatggcaagaattttcaccctctgaagttcttcacctccatgacaaatgatattgcaattcaacctaatggcactgccaccaattttgggataaatactatcggcattttacgagctcctcgtggcgatggaaaagaagcaatagtgctggttactccttataattctcaaagagttcagtcgaatgaattattatcgctggctcttggtttctctgtcttctctctcttaagtcgagcagcatggctgtccaaggatgttgtgtggttatctgcagactcacagtttggagagtatgctgcagtctctgcatggctaaaccagtatcataatcccgtgtttttgagtcactcagtggtgtcacataccaagatgtacggtgcaaacaatatatatgatggtaattcagaaaaaacagaagccacggctttcaaacgtgctggaacaatggctgctgctctcatatttaaagttggggaaaccagaagatacagtgacagggatagtgttacgatttatgcagaggcatctaatggacaaatgccaaacttggaccttctgaatgtggtgcactatttggctgttcacagacaaggttttcgtgtgaacatcgctgcatttagttctttgttgagctctgcatggctcagggttattgctgaaattttgcatactattggtagtgtgttaagaaaaataaatcctgactggaagcttgatattgcagtccctgattatgtggaagggactgcaaatctagctaactctatgtacaaccaggctcttggagtgcccacagggtcccatggtgctttccgtgattatcaagttgatgcggtttctttagaattttcaccaacatttcatgtcaaaaatgagaatgctaaatctttgtttcttctgaagggtggaaggtccaagcaagttcatttcggttggtgtgtatatgattccgtttgcattgcttttggcacctctcccaatagttgctgctgcccttgctgatggcagtagaagcatggaaaaaacagcggataagttgataggcgacggtaaaacagatggcattgctgatatttcgcagaacaagggtggatcatggaaatggcttcgagctgcaaaagtattgcttgttgtccaattatgggcagtacttgtttcactacttccatattacattactcagatacctgatgccacacctacgcaaagcacactcatttgggttgtgctctccatcgtcgtactgatctccctatctgtcttgtttggctcaccatactcaactggtgttgaatggaaacttctgaaggctaccatgatcacttccatctccatcggattggggcttatgtcgataataaatttcgccactgctcagcttggtgctctgatagtgatcccaatgtgtttgttttctcggcctctgaaggcatcagggatgaatttccttcctcgggcagttttgttggcttcaaatgtagcttttgctgtgttgggttttcctccagttgcgttgctgattatgaaaggagtgtccaagggatcgaggtcgtggacaatagatgttggagatttctgggtatggatggagttcctgtgggaaaggagcagcgcgacgtatctttacctatttcttgtacatcttccctgctggcttttgtgcgtccttgtgttcctgcacccatgtcaccaatcagaatataagctgaagcaggaatagctgtttggcatccatagtcttgtctttttggatggtaaatcttgtagactagtgtagaaatttctcactttcacaaacttttggttacccataattcggaaattattcacccagttggagacgacttgtagacgatgtatcctgcctaatgtactgtctgcaacattttcgaaggcatgtttttaaagctgcttgttgcagtaattgatttctaagttttttgttgatagcagccgagaaataaatcgaagttggaggtaagggacgctttagagactaacgtact

SEQ ID NO: 32294 - DNA, 2504 bp, Zea Mays
atacagcaacatagaccggatgtcacagtgaccaccgccctctagctcgtcgcctcgtcggcgtgcccagcttctggtccagcgcgtcgcctccgctgctgctgggcccgacgcccaactaccgtgccgaggtcccaggcaggaagcatcttggcgtacgtgccgccggcgacaagcacccaccacaccagtcatgaagtcgttagccaagcaagagacacagccaaaatcgcggctcattgtgcgccttggtgtattccttgcatctcaccacattctgttcagtgttatatgctgctatgcaggcattatcgcgctactactccttccttcacttgcaaaaaacacatacctctcggagaatgctcttatacctggctctgcaaatccattattttctactgaagatgccattgaagcaaacagatttatgaaagcaattgaagctgtggctagagactcaagcagtgtaataggcatggcaaatttcatagcacaacaaatagaagatctaggtgcagaagtgtgttaccaaaagtttctccctcatggcaagaattttcaccctctgaagttcttcacctccatgacaaatgatattgcaattcaacctaatggcactgccaccaattttgggataaatactatcggcattttacgagctcctcgtggcgatggaaaagaagcaatagtgctggttactccttataattctcaaagagttcagtcgaatgaattattatcgctggctcttggtttctctgtcttctctctcttaagtcgagcagcatggctgtccaaggatgttgtgtggttatctgcagactcacagtttggagagtatgctgcagtctctgcatggctaaaccagtatcataatcccgtgtttttgagtcactcagtggtgtcacataccaagatgtacggtgcaaacaatatatatgatggtaattcagaaaaaacagaagccacggctttcaaacgtgctggaacaatggctgctgctctcatatttaaagttggggaaaccagaagatacagtgacagggatagtgttacgatttatgcagaggcatctaatggacaaatgccaaacttggaccttctgaatgtggtgcactatttggctgttcacagacaagtccctgattatgtggaagggactgcaaatctagctaactctatgtacaaccaggctcttggagtgcccacagggtcccatggtgctttccgtgattatcaagttgatgcggtttctttagaattttcaccaacatttcatgtcaaaaatgagaatgctaaatctttgtttcttctgaagggtggaaggttaattgaaggagtggcacgttctgtgaacaatctgcttgagaagttccatcagtcctttttcctgtacttccttacaggtccaagcaagttcatttcggttggtgtgtatatgattccgtttgcattgcttttggcacctctcccaatagttgctgctgcccttgctgatggcagtagaagcatggaaaaaacagcggataagttgataggcgacggtaaaacagatggcattgctgatatttcgcagaacaagggtggatcatggaaatggcttcgagctgcaaaagtattgcttgttgtccaattatgggcagtacttgtttcactacttccatattacattactcagatacctgatgccacacctacgcaaagcacactcatttgggttgtgctctccatcgtcgtactgatctccctatctgtcttgtttggctcaccatactcaactggtgttgaatggaaacttctgaaggctaccatgatcacttccatctccatcggattggggcttatgtcgataataaatttcgccactgctcagcttggtgctctgatagtgatcccaatgtgtttgttttctcggcctctgaaggcatcagggatgaatttccttcctcgggcagttttgttggcttcaaatgtagcttttgctgtgttgggttttcctccagttgcgttgctgattatgaaaggagtgtccaagggatcgaggtcgtggacaatagatgttggagatttctgggtatggatggagttcctgtgggaaaggagcagcgcgacgtatctttacctatttcttgtacatcttccctgctggcttttgtgcgtccttgtgttcctgcacccatgtcaccaatcagaatataagctgaagcaggaatagctgtttggcatccatagtcttgtctttttggatggtaaatcttgtagactagtgtagaaatttctcactttcacaaacttttggttacccataattcggaaattattcacccagttggagacgacttgtagacgatgtatcctgcctaatgtactgtctgcaacattttcgaaggcatgtttttaaagctgcttgttgcagtaattgatttctaagttttttgttgatagcagccgagaaataaatcgaagttggaggtaagggacgctttagagactaacgtact

SEQ ID NO: 32295 - DNA, 7570 bp, Zea Mays
aggagagcggggttggcagctaggcgcggtgagggcgagctcaccgccaccctccctcgctcctcccctctataaatgcagaggcgccgaatgctccccaacgccctgtacaatccgggggagaggtcaaggaaggcgagcgacgctcggcaggcagggcatcccgcgaggccgcgacagaggcggcactccgctcccaccaacccacaacaccgatcccctcctcgccgagccgccgccggggataagcgtggggaagtgagcagccaaaatctaagacaccgatccccgggcgtgagtcgcgaaggtagcggcggagaaaagggcggagccacaacgcggtcgtgagcccgcagccaccgcatgacaggttgcgaggcttgctgttcagccatgtcgacggcgcaagggacagcgttgaggtcggcgccgctgggcgcaggtcgttgggcccgacgcggccgccccgtggcggcgccgtaccgttcgggctggcaagcctacggtggcgtttccctcgagggcagcggattccttggccgcgtgcaccgcaccgaggagcgcgtcgctccgcgggcgccccacgcggcggcacgcgacgccgaggtggtgaggccgctctcaaagctcccgaacagcagcattgggctctacgattcctcattcgagcgtgacgcttgcggcgttgggtttgtcgctgagctatctggcgattacaaacgcgagactgttaatgatgctattgagatgcttgagagaatggctcaccgtggtgcctgcggctgcgagaagaatacaggagatggtgccggcatcatggtcgctctaccacatgacttcttcaaagaggtcgcaaaggatgctgggtttgagctacccccaccaggcgagtatgctgttggaatgttttttatgccaacagatgaaaagcgtcgtgagaaaggcaaagctgagtttatgaaggttgcagaatcactgggacatgtaatactcgggtggcgtctggttccgactgacaactcagacttgggtgaatctgcactcgagactgagccagtcattgagcaggttttcgttaccaagagctcaagatcagaggctgagtttgagcaacagctatatatccttaggagactctcaatcatctctgttcgagcctctctgaacattaagcgtggtggagagagggatttctacatgtgctctctatcttctaggactattgtttacaagggccagcttaaaccgtcccagcttaaggggtactactatgcagacctaggtcatgaaaacttcatgagttatatggctctggtaaatacaaaactttggcacttacacaaaaattgtcatgatcatagtcaacggatgggaaccaataatagcaaggctgttgtaagaagatacactcctatgcaggcatcgaactttgaactgtcctaccatcactgctctactcatatgctatttcagtcctggttcttgatgccttaaagtgaagtattagaaatctctattagttgatacccgataaccatgttgcagagtccagctgcagttctgctatggccgactgctatgcccgactcatcaggatgtgacctccgattaggtggtgggaaggaaatgtgtttggtttgaggttcactcaaggttctccacaaacacctttcccagctgggaccgtgcacaaccaatgcgtgttttaggtcataatggagagatcaatactcttagaggaaacaagaattggatgacagcacgtgagggtctcttagaggctgagaagcttggattatcaaaggagcagctctcaagaattctgccaattgttgatgctacctcttccgattctggcgcatttgataatgttcttgagcttcttgtccgaggtgggcgaagcctgccagaagctgtgatgatgatgatccctgaggcatggcagaatgatgtaaacatggatcctgagaagaaagctctctacgagtttctgtcagcacttatggagccttgggatggacctgctctaatatcgtttactgatggtcgttaccttggagctaccctggaccgtaatggtttgaggcctggtcggttttatgtgacgcacagtgggcgtgtgatcatgggtagtgaggtcggtgttgttgatgttcctcctgaagacgtgctgagaaaaggcaggctaaaccctggaatgatgttattggttgattttgagaatcacactgtagtggatgatgaagctctgaaagcacaatattctaaagctcacccgtatggagaatggctcaagagacaaaaaatatacctcaaggatattgtagaatcagtaccagaaaccgatagagtcgctccaagcatttctagctcactttcacaaaagaatgagaacatagatcatgttggtatcagtgggattttgactcaactgaaggccttcgggtacacggtggaagccctcgagatgttgctactgccaatggctaaggatggagtggaagctcttggttccatgggaaacgatacaccacttgcggtgatgtcaaacagggagaagttgacttttgagtacttcaagcagatgtttgcacaagttacaaaccctccgattgaccctattagagagaaaattgttacatctatggagtgtatgattggcccagaaggtgacttgttggaaacaactgaaaaacaatgcaaccgccttgcacttaaaggtcccttggtttctattgatgaaatggaggctattaaaaagatgaattatcgaggttggcgaagcaaagtgcttgacataacttatccaaaaaagtctggaaggaagggcttggaagagactttgaacagaatttgtgctgaagctcgtaaagccatacgcgagggatacactattttggttctctcagatagaggattttcctcagaccgtgttgctgccagttctctcttagcagtgggagcagtgcatcagcaccttgttgcaaatcttgagaggacacgcataggattgttggttgagtcagctgaacctcgtgaagtgcaccatttctgcaccctggttggatttggcgctgatgctatatgcccttatttggctattgaagcaatttggtgcttacagaatgacgggaagattactcctaatggagatggacaaccttactcaaaggaagagctggtggcgaagtatttctatgcttctaactatggaatgatgaaagttcttgcaaagatgggaatatccacccttgcatcctacaaaggtgcacaaatttttgaagctcttggtctttcttctgaagtggttggcaagtgtttcgaaggcacacctagcagaattgagggtgcaacatttgaaatgcttgcacgagatgctctccgtcttcatgagttagctttcccatcaagagcccttccagctggcagtgcagatgcaaaggcacttcctaacccaggggattaccactggagaaaaaatggtgaaattcatctcaacgacccacttgcaatgggaaagttacaggaagcagctagagtcaacagccgggcagcatacaaggaatattcgaaacgaattcaggagctcaataaggcgtgcaatctacgtggcatgctgaaatttaaacatgtttctgacaagatatctttggatgaggttgaacctgcaagtgagatagtgaaacgcttttgtactggagcgatgagttatggttctatttcattagaagcacatactgcccttgctattgccatgaacaaacttggaggaaaatctaatacaggtgagggaggggaacagccctctcggatggaaccacttcctgatggctcaatgaatccaagacgaagtgcaatcaagcaagttgccagtggacggtttggagtttccagctattacctgactaatgcagatgagctgcagataaaaatggctcagggtgccaagcctggtgaaggtggtgaacttccaggccacaaggttattggtgacattgctgtcacaagacactccacagctggtgtaggactgatcagtccacctccgcatcatgatatttattcgattgaggatcttgcgcagcttatacatgaccttaagaattcaaatcctggagcccgcatcagtgtcaaactagtttctgaggctggtgtgggagttgttgctagtggtgttgtaaaaggacatgcagaccatgttcttatatctggccatgatggtggcactggagcttcaagatggaccggtatcaagaatgctggacttccatgggaacttgggttggctgagacacatcaaactctagtagcaaatgggcttcgtggtcgagctgtcctgcaaacagatggacagttgaagactggtagagatgttgctgttgcttgcttgcttggggcagaggaatttggtttcagcactgccccactgattacacttggctgtattatgatgcgaaaatgccacatgaacacttgtcctgttggtatagctactcaagacccagtgcttcgagaaaagtttgctggagaaccagagcatgtcatcaactttttcttcatgcttgctgaggagctaagagaaatcatggcaaaccttgggttccgcaccattactgaaatggttggacgttctgatatgcttgaggttgatccagaagtagtgaagagtaatgagaaacttgagaacattgatctctcactaatcttgaaaccagcttcagagattcgtccaggtgttgctcagtactgtgttgagaagcaagaccatggcctagacatggcattagataacaaactaatagatctgtcaagaactgctattgaaaagcaagttcgtgttttcattgagactccaatccagaacacgaatcgagcagttggaactatgctcagtcatcaagtcacaaaacgttatcacatgaatggattgcctgctggtacaattcatgtgaagtttactggaagtgctggtcaaagttttggcgcttttctttgtcctggaatcactcttgaactggaaggagacagcaatgattatgttggtaaaggattatctggtggaaaaattgttgtgtacccaccaaggaacagttcttttagtccagaggacaatattgtcattggtaatgtggctctgtatggtgctaccatgggagaggcatatttcaatggtatggcagcagaaagattttgtgttcgcaactcaggtgctcaagcagtggttgaaggaattggagatcacgggtgtgagtacatgactggaggcactgttgttatcctcggaaaaacagggcggaactttgctgctggcatgagtggaggcattgcctatgtttatgatgttgatgggaaattcagtgctcgctgcaacaatgagttagttgatctatatcatgtggaggaagaggatgacatcatcacattgaaaatgatgattgagcaacatcgtcgcaacactgagagtgttttggctagagatatactctccgattttgataaccttcttccaaaatttgtaaaagtatatccaagggactataagagggttctagaaagcatgaaggtggaaaaggctgttgctaagcatgcaaaggagcctaagatggcaaatggaatttctgtgacaactaagaaagtacaacctgatcagtcagcaagccgaccaacacatgttgccaatgccaaaaagtacaggggctttattacatatgagcgagagagtatttcatacagagatccaaaagagcgtgttagagattggaaggaagttgcaatcgaatctacacctggtccactattaaatacacaatctgctcgttgcatggactgtggcactcctttctgtcatcaggaaagctcaggtgctggttgtcctcttggaaataagatcccagaattcaatgaattagttcaccagaacagatggcgcgaagcattggatcgactacttgagacaaacaacttccctgaattcactggacgagtttgccctgctccttgtgaggggtcatgtgttcttgggattattgagaatccggtgtctatcaaaagtatagaatgtgcaatcatagacaaaggttttgaagagggatggatgattccacgacctccacttcaaagaacaggaaggaaggtggccattgttggcagtggaccatctggtttggctgctgcagatcaactaaataaaatgggccacttcgtaactgtgttcgaacgtgcagatcgaattggaggtttaatgatgtatggtgtgccaaacatgaagacagacaagattggcgttgtccagcgccgtgttaatttaatggctgaagagggtgtcacatttgtggtgaatgccaatgttggtagtgatcctttgtactcgattgaacgtctacgttctgaaaatgatgcggttattttggcttgtggagcaacaaaaccgagagatctcaccatccctggacgcgagctatctggagttcattttgcaatggaatttctccatgcaaatacgaaaagtttactcgacagcaacctggaggatggtaaatatatctccgcccgtgggaaaaaggtggtggttattggtggaggtgatacaggcacagattgcattggcacatctattaggcatggttgcaccagccttgtaaatcttgaactcctgtcaaaaccaccaagcactagagctgctgacaacccatggccccagtggccaagaattttccgtgttgactatgggcatcaagaagctgctaccaagtttgggaaggatccaagaacttacggagtcttgacaaagcgttttattggcgatggaaatggcaaggtgaaggcccttgaggtagtgcgtgtgaagtgggagaaagtagatggaagatttcaactcaaggagatggaaggatcagaagagattattgaggctgatctcgtcctcctagctatgggattcttgggtcctgaagcgacaatagctgagaaattgggtttggagaaggacaacagatcaaacttcaaagcgcagtttggagacttcgctaccagtgtcgatggtgtgtttgccgccggggactgcagacgtggacaatcactggtggtttgggccatcacggaggggcggcaggctgctgcagcggtagacaagtacttgtcaaggtatgatcagaatgctgctgctacaggcgacagcactccctccgggacagggctcgttcagccggttgcggcatagtagcataaactggagcaagttttacgtttgtcagtgtatcctgtggttccacacagcaaacaccgttcttgtagttgtctaaaagaaacagagaaatccgggctcattaaggaatgaaagcccttctatattttttttgacgatagataaacagttgaaagttttggtggctattgtctcttttttctgctgcatgtggttttgtagtccaaacaatgtacagtttcccctttcttaaatagatgtaaatttgtcgtgtgatatgtcggttattttctatgtgtttgcaagcgcgactgagccaccagtctgtatgaggccgagtctcggtttcggtcgacttataccgtt

SEQ ID NO: 32296 - DNA, 7042 bp, Zea Mays
ccctgtacaatccgggggagaggtcaaggaaggcgagcgacgctcggcaggcagggcatcccgcgaggccgcgacagaggcggcactccgctcccaccaacccacaacaccgatcccctcctcgccgagccgccgccggggataagcgtggggaagtgagcagccaaaatctaagacaccgatccccgggcgtgagtcgcgaaggtagcggcggagaaaagggcggagccacaacgcggtcgtgagcccgcagccaccgcatgacaggttgcgaggcttgctgttcagccatgtcgacggcgcaagggacagcgttgaggtcggcgccgctgggcgcaggtcgttgggcccgacgcggccgccccgtggcggcgccgtaccgttcgggctggcaagcctacggtggcgtttccctcgagggcagcggattccttggccgcgtgcaccgcaccgaggagcgcgtcgctccgcgggcgccccacgcggcggcacgcgacgccgaggtggtgaggccgctctcaaagctcccgaacagcagcattgggctctacgattcctcattcgagcgtgacgcttgcggcgttgggtttgtcgctgagctatctggcgattacaaacgcgagactgttaatgatgctattgagatgcttgagagaatggctcaccgtggtgcctgcggctgcgagaagaatacaggagatggtgccggcatcatggtcgctctaccacatgacttcttcaaagaggtcgcaaaggatgctgggtttgagctacccccaccaggcgagtatgctgttggaatgttttttatgccaacagatgaaaagcgtcgtgagaaaggcaaagctgagtttatgaaggttgcagaatcactgggacatgtaatactcgggtggcgtctggttccgactgacaactcagacttgggtgaatctgcactcgagactgagccagtcattgagcaggttttcgttaccaagagctcaagatcagaggctgagtttgagcaacagctatatatccttaggagactctcaatcatctctgttcgagcctctctgaacattaagcgtggtggagagagggatttctacatgtgctctctatcttctaggttcactcaaggttctccacaaacacctttcccagctgggaccgtgcacaaccaatgcgtgttttaggtcataatggagagatcaatactcttagaggaaacaagaattggatgacagcacgtgagggtctcttagaggctgagaagcttggattatcaaaggagcagctctcaagaattctgccaattgttgatgctacctcttccgattctggcgcatttgataatgttcttgagcttcttgtccgaggtgggcgaagcctgccagaagctgtgatgatgatgatccctgaggcatggcagaatgatgtaaacatggatcctgagaagaaagctctctacgagtttctgtcagcacttatggagccttgggatggacctgctctaatatcgtttactgatggtcgttaccttggagctaccctggaccgtaatggtttgaggcctggtcggttttatgtgacgcacagtgggcgtgtgatcatgggtagtgaggtcggtgttgttgatgttcctcctgaagacgtgctgagaaaaggcaggctaaaccctggaatgatgttattggttgattttgagaatcacactgtagtggatgatgaagctctgaaagcacaatattctaaagctcacccgtatggagaatggctcaagagacaaaaaatatacctcaaggatattgtagaatcagtaccagaaaccgatagagtcgctccaagcatttctagctcactttcacaaaagaatgagaacatagatcatgttggtatcagtgggattttgactcaactgaaggccttcgggtacacggtggaagccctcgagatgttgctactgccaatggctaaggatggagtggaagctcttggttccatgggaaacgatacaccacttgcggtgatgtcaaacagggagaagttgacttttgagtacttcaagcagatgtttgcacaagttacaaaccctccgattgaccctattagagagaaaattgttacatctatggagtgtatgattggcccagaaggtgacttgttggaaacaactgaaaaacaatgcaaccgccttgcacttaaaggtcccttggtttctattgatgaaatggaggctattaaaaagatgaattatcgaggttggcgaagcaaagtgcttgacataacttatccaaaaaagtctggaaggaagggcttggaagagactttgaacagaatttgtgctgaagctcgtaaagccatacgcgagggatacactattttggttctctcagatagaggattttcctcagaccgtgttgctgccagttctctcttagcagtgggagcagtgcatcagcaccttgttgcaaatcttgagaggacacgcataggattgttggttgagtcagctgaacctcgtgaagtgcaccatttctgcaccctggttggatttggcgctgatgctatatgcccttatttggctattgaagcaatttggtgcttacagaatgacgggaagattactcctaatggagatggacaaccttactcaaaggaagagctggtggcgaagtatttctatgcttctaactatggaatgatgaaagttcttgcaaagatgggaatatccacccttgcatcctacaaaggtgcacaaatttttgaagctcttggtctttcttctgaagtggttggcaagtgtttcgaaggcacacctagcagaattgagggtgcaacatttgaaatgcttgcacgagatgctctccgtcttcatgagttagctttcccatcaagagcccttccagctggcagtgcagatgcaaaggcacttcctaacccaggggattaccactggagaaaaaatggtgaaattcatctcaacgacccacttgcaatgggaaagttacaggaagcagctagagtcaacagccgggcagcatacaaggaatattcgaaacgaattcaggagctcaataaggcgtgcaatctacgtggcatgctgaaatttaaacatgtttctgacaagatatctttggatgaggttgaacctgcaagtgagatagtgaaacgcttttgtactggagcgatgagttatggttctatttcattagaagcacatactgcccttgctattgccatgaacaaacttggaggaaaatctaatacaggtgagggaggggaacagccctctcggatggaaccacttcctgatggctcaatgaatccaagacgaagtgcaatcaagcaagttgccagtggacggtttggagtttccagctattacctgactaatgcagatgagctgcagataaaaatggctcagggtgccaagcctggtgaaggtggtgaacttccaggccacaaggttattggtgacattgctgtcacaagacactccacagctggtgtaggactgatcagtccacctccgcatcatgatatttattcgattgaggatcttgcgcagcttatacatgaccttaagaattcaaatcctggagcccgcatcagtgtcaaactagtttctgaggctggtgtgggagttgttgctagtggtgttgtaaaaggacatgcagaccatgttcttatatctggccatgatggtggcactggagcttcaagatggaccggtatcaagaatgctggacttccatgggaacttgggttggctgagacacatcaaactctagtagcaaatgggcttcgtggtcgagctgtcctgcaaacagatggacagttgaagactggtagagatgttgctgttgcttgcttgcttggggcagaggaatttggtttcagcactgccccactgattacacttggctgtattatgatgcgaaaatgccacatgaacacttgtcctgttggtatagctactcaagacccagtgcttcgagaaaagtttgctggagaaccagagcatgtcatcaactttttcttcatgcttgctgaggagctaagagaaatcatggcaaaccttgggttccgcaccattactgaaatggttggacgttctgatatgcttgaggttgatccagaagtagtgaagagtaatgagaaacttgagaacattgatctctcactaatcttgaaaccagcttcagagattcgtccaggtgttgctcagtactgtgttgagaagcaagaccatggcctagacatggcattagataacaaactaatagatctgtcaagaactgctattgaaaagcaagttcgtgttttcattgagactccaatccagaacacgaatcgagcagttggaactatgctcagtcatcaagtcacaaaacgttatcacatgaatggattgcctgctggtacaattcatgtgaagtttactggaagtgctggtcaaagttttggcgcttttctttgtcctggaatcactcttgaactggaaggagacagcaatgattatgttggtaaaggattatctggtggaaaaattgttgtgtacccaccaaggaacagttcttttagtccagaggacaatattgtcattggtaatgtggctctgtatggtgctaccatgggagaggcatatttcaatggtatggcagcagaaagattttgtgttcgcaactcaggtgctcaagcagtggttgaaggaattggagatcacgggtgtgagtacatgactggaggcactgttgttatcctcggaaaaacagggcggaactttgctgctggcatgagtggaggcattgcctatgtttatgatgttgatgggaaattcagtgctcgctgcaacaatgagttagttgatctatatcatgtggaggaagaggatgacatcatcacattgaaaatgatgattgagcaacatcgtcgcaacactgagagtgttttggctagagatatactctccgattttgataaccttcttccaaaatttgtaaaagtatatccaagggactataagagggttctagaaagcatgaaggtggaaaaggctgttgctaagcatgcaaaggagcctaagatggcaaatggaatttctgtgacaactaagaaagtacaacctgatcagtcagcaagccgaccaacacatgttgccaatgccaaaaagtacaggggctttattacatatgagcgagagagtatttcatacagagatccaaaagagcgtgttagagattggaaggaagttgcaatcgaatctacacctggtccactattaaatacacaatctgctcgttgcatggactgtggcactcctttctgtcatcaggaaagctcaggtgctggttgtcctcttggaaataagatcccagaattcaatgaattagttcaccagaacagatggcgcgaagcattggatcgactacttgagacaaacaacttccctgaattcactggacgagtttgccctgctccttgtgaggggtcatgtgttcttgggattattgagaatccggtgtctatcaaaagtatagaatgtgcaatcatagacaaaggttttgaagagggatggatgattccacgacctccacttcaaagaacaggaaggaaggtggccattgttggcagtggaccatctggtttggctgctgcagatcaactaaataaaatgggccacttcgtaactgtgttcgaacgtgcagatcgaattggaggtttaatgatgtatggtgtgccaaacatgaagacagacaagattggcgttgtccagcgccgtgttaatttaatggctgaagagggtgtcacatttgtggtgaatgccaatgttggtagtgatcctttgtactcgattgaacgtctacgttctgaaaatgatgcggttattttggcttgtggagcaacaaaaccgagagatctcaccatccctggacgcgagctatctggagttcattttgcaatggaatttctccatgcaaatacgaaaagtttactcgacagcaacctggaggatggtaaatatatctccgcccgtgggaaaaaggtggtggttattggtggaggtgatacaggcacagattgcattggcacatctattaggcatggttgcaccagccttgtaaatcttgaactcctgtcaaaaccaccaagcactagagctgctgacaacccatggccccagtggccaagaattttccgtgttgactatgggcatcaagaagctgctaccaagtttgggaaggatccaagaacttacggagtcttgacaaagcgttttattggcgatggaaatggcaaggtgaaggcccttgaggtagtgcgtgtgaagtgggagaaagtagatggaagatttcaactcaaggagatggaaggatcagaagagattattgaggctgatctcgtcctcctagctatgggattcttgggtcctgaagcgacaatagctgagaaattgggtttggagaaggacaacagatcaaacttcaaagcgcagtttggagacttcgctaccagtgtcgatggtgtgtttgccgccggggactgcagacgtggacaatcactggtggtttgggccatcacggaggggcggcaggctgctgcagcggtagacaagtacttgtcaaggtatgatcagaatgctgctgctacaggcgacagcactccctccgggacagggctcgttcagccggttgcggcatagtagcataaactggagcaagttttacgtttgtcagtgtatcctgtggttccacacagcaaacaccgttcttgtagttgtctaaaagaaacagagaaatccgggctcattaaggaatgaaagcccttctatattttttttgacgatagataaacagttgaaagttttggtggctattgtctcttttttctgctgcatgtggttttgtagtccaaacaatgtacagtttcccctttcttaaatagatgtaaatttgtcgtgtgatatgtcggttattttctatgtgtttgcaagcgcgactgagccaccagtctgtatgaggccgagtctcggtttcggtcgacttataccgtt

SEQ ID NO: 32297 - DNA, 7061 bp, Zea Mays
gtgcggctagacggagagagaggttgcgaggcttgctgttcagccatgtcgacggcgcaagggacagcgttgaggtcggcgccgctgggcgcaggtcgttgggcccgacgcggccgccccgtggcggcgccgtaccgttcgggctggcaagcctacggtggcgtttccctcgagggcagcggattccttggccgcgtgcaccgcaccgaggagcgcgtcgctccgcgggcgccccacgcggcggcacgcgacgccgaggtggtgaggccgctctcaaagctcccgaacagcagcattgggctctacgattcctcattcgagcgtgacgcttgcggcgttgggtttgtcgctgagctatctggcgattacaaacgcgagactgttaatgatgctattgagatgcttgagagaatggctcaccgtggtgcctgcggctgcgagaagaatacaggagatggtgccggcatcatggtcgctctaccacatgacttcttcaaagaggtcgcaaaggatgctgggtttgagctacccccaccaggcgagtatgctgttggaatgttttttatgccaacagatgaaaagcgtcgtgagaaaggcaaagctgagtttatgaaggttgcagaatcactgggacatgtaatactcgggtggcgtctggttccgactgacaactcagacttgggtgaatctgcactcgagactgagccagtcattgagcaggttttcgttaccaagagctcaagatcagaggctgagtttgagcaacagctatatatccttaggagactctcaatcatctctgttcgagcctctctgaacattaagcgtggtggagagagggatttctacatgtgctctctatcttctaggactattgtttacaagggccagcttaaaccgtcccagcttaaggggtactactatgcagacctaggtcatgaaaacttcatgagttatatggctctggttcactcaaggttctccacaaacacctttcccagctgggaccgtgcacaaccaatgcgtgttttaggtcataatggagagatcaatactcttagaggaaacaagaattggatgacagcacgtgagggtctcttagaggctgagaagcttggattatcaaaggagcagctctcaagaattctgccaattgttgatgctacctcttccgattctggcgcatttgataatgttcttgagcttcttgtccgaggtgggcgaagcctgccagaagctgtgatgatgatgatccctgaggcatggcagaatgatgtaaacatggatcctgagaagaaagctctctacgagtttctgtcagcacttatggagccttgggatggacctgctctaatatcgtttactgatggtcgttaccttggagctaccctggaccgtaatggtttgaggcctggtcggttttatgtgacgcacagtgggcgtgtgatcatgggtagtgaggtcggtgttgttgatgttcctcctgaagacgtgctgagaaaaggcaggctaaaccctggaatgatgttattggttgattttgagaatcacactgtagtggatgatgaagctctgaaagcacaatattctaaagctcacccgtatggagaatggctcaagagacaaaaaatatacctcaaggatattgtagaatcagtaccagaaaccgatagagtcgctccaagcatttctagctcactttcacaaaagaatgagaacatagatcatgttggtatcagtgggattttgactcaactgaaggccttcgggtacacggtggaagccctcgagatgttgctactgccaatggctaaggatggagtggaagctcttggttccatgggaaacgatacaccacttgcggtgatgtcaaacagggagaagttgacttttgagtacttcaagcagatgtttgcacaagttacaaaccctccgattgaccctattagagagaaaattgttacatctatggagtgtatgattggcccagaaggtgacttgttggaaacaactgaaaaacaatgcaaccgccttgcacttaaaggtcccttggtttctattgatgaaatggaggctattaaaaagatgaattatcgaggttggcgaagcaaagtgcttgacataacttatccaaaaaagtctggaaggaagggcttggaagagactttgaacagaatttgtgctgaagctcgtaaagccatacgcgagggatacactattttggttctctcagatagaggattttcctcagaccgtgttgctgccagttctctcttagcagtgggagcagtgcatcagcaccttgttgcaaatcttgagaggacacgcataggattgttggttgagtcagctgaacctcgtgaagtgcaccatttctgcaccctggttggatttggcgctgatgctatatgcccttatttggctattgaagcaatttggtgcttacagaatgacgggaagattactcctaatggagatggacaaccttactcaaaggaagagctggtggcgaagtatttctatgcttctaactatggaatgatgaaagttcttgcaaagatgggaatatccacccttgcatcctacaaaggtgcacaaatttttgaagctcttggtctttcttctgaagtggttggcaagtgtttcgaaggcacacctagcagaattgagggtgcaacatttgaaatgcttgcacgagatgctctccgtcttcatgagttagctttcccatcaagagcccttccagctggcagtgcagatgcaaaggcacttcctaacccaggggattaccactggagaaaaaatggtgaaattcatctcaacgacccacttgcaatgggaaagttacaggaagcagctagagtcaacagccgggcagcatacaaggaatattcgaaacgaattcaggagctcaataaggcgtgcaatctacgtggcatgctgaaatttaaacatgtttctgacaagatatctttggatgaggttgaacctgcaagtgagatagtgaaacgcttttgtactggagcgatgagttatggttctatttcattagaagcacatactgcccttgctattgccatgaacaaacttggaggaaaatctaatacaggtgagggaggggaacagccctctcggatggaaccacttcctgatggctcaatgaatccaagacgaagtgcaatcaagcaagttgccagtggacggtttggagtttccagctattacctgactaatgcagatgagctgcagataaaaatggctcagggtgccaagcctggtgaaggtggtgaacttccaggccacaaggttattggtgacattgctgtcacaagacactccacagctggtgtaggactgatcagtccacctccgcatcatgatatttattcgattgaggatcttgcgcagcttatacatgaccttaagaattcaaatcctggagcccgcatcagtgtcaaactagtttctgaggctggtgtgggagttgttgctagtggtgttgtaaaaggacatgcagaccatgttcttatatctggccatgatggtggcactggagcttcaagatggaccggtatcaagaatgctggacttccatgggaacttgggttggctgagacacatcaaactctagtagcaaatgggcttcgtggtcgagctgtcctgcaaacagatggacagttgaagactggtagagatgttgctgttgcttgcttgcttggggcagaggaatttggtttcagcactgccccactgattacacttggctgtattatgatgcgaaaatgccacatgaacacttgtcctgttggtatagctactcaagacccagtgcttcgagaaaagtttgctggagaaccagagcatgtcatcaactttttcttcatgcttgctgaggagctaagagaaatcatggcaaaccttgggttccgcaccattactgaaatggttggacgttctgatatgcttgaggttgatccagaagtagtgaagagtaatgagaaacttgagaacattgatctctcactaatcttgaaaccagcttcagagattcgtccaggtgttgctcagtactgtgttgagaagcaagaccatggcctagacatggcattagataacaaactaatagatctgtcaagaactgctattgaaaagcaagttcgtgttttcattgagactccaatccagaacacgaatcgagcagttggaactatgctcagtcatcaagtcacaaaacgttatcacatgaatggattgcctgctggtacaattcatgtgaagtttactggaagtgctggtcaaagttttggcgcttttctttgtcctggaatcactcttgaactggaaggagacagcaatgattatgttggtaaaggattatctggtggaaaaattgttgtgtacccaccaaggaacagttcttttagtccagaggacaatattgtcattggtaatgtggctctgtatggtgctaccatgggagaggcatatttcaatggtatggcagcagaaagattttgtgttcgcaactcaggtgctcaagcagtggttgaaggaattggagatcacgggtgtgagtacatgactggaggcactgttgttatcctcggaaaaacagggcggaactttgctgctggcatgagtggaggcattgcctatgtttatgatgttgatgggaaattcagtgctcgctgcaacaatgagttagttgatctatatcatgtggaggaagaggatgacatcatcacattgaaaatgatgattgagcaacatcgtcgcaacactgagagtgttttggctagagatatactctccgattttgataaccttcttccaaaatttgtaaaagtatatccaagggactataagagggttctagaaagcatgaaggtggaaaaggctgttgctaagcatgcaaaggagcctaagatggcaaatggaatttctgtgacaactaagaaagtacaacctgatcagtcagcaagccgaccaacacatgttgccaatgccaaaaagtacaggggctttattacatatgagcgagagagtatttcatacagagatccaaaagagcgtgttagagattggaaggaagttgcaatcgaatctacacctggtccactattaaatacacaatctgctcgttgcatggactgtggcactcctttctgtcatcaggaaagctcaggtgctggttgtcctcttggaaataagatcccagaattcaatgaattagttcaccagaacagatggcgcgaagcattggatcgactacttgagacaaacaacttccctgaattcactggacgagtttgccctgctccttgtgaggggtcatgtgttcttgggattattgagaatccggtgtctatcaaaagtatagaatgtgcaatcatagacaaaggttttgaagagggatggatgattccacgacctccacttcaaagaacaggaaggaaggtggccattgttggcagtggaccatctggtttggctgctgcagatcaactaaataaaatgggccacttcgtaactgtgttcgaacgtgcagatcgaattggaggtttaatgatgtatggtgtgccaaacatgaagacagacaagattggcgttgtccagcgccgtgttaatttaatggctgaagagggtgtcacatttgtggtgaatgccaatgttggtagtgatcctttgtactcgattgaacgtctacgttctgaaaatgatgcggttattttggcttgtggagcaacaaaaccgagagatctcaccatccctggacgcgagctatctggagttcattttgcaatggaatttctccatgcaaatacgaaaagtttactcgacagcaacctggaggatggtaaatatatctccgcccgtgggaaaaaggtggtggttattggtggaggtgatacaggcacagattgcattggcacatctattaggcatggttgcaccagccttgtaaatcttgaactcctgtcaaaaccaccaagcactagagctgctgacaacccatggccccaggtatgtgtctccctttgcagttatcacactttttagagtactgcatttatccttatttccagcttggccttttgcttttagtggccaagaattttccgtgttgactatgggcatcaagaagctgctaccaagtttgggaaggatccaagaacttacggagtcttgacaaagcgttttattggcgatggaaatggcaaggtgaaggcccttgaggtagtgcgtgtgaagtgggagaaagtagatggaagatttcaactcaaggagatggaaggatcagaagagattattgaggctgatctcgtcctcctagctatgggattcttgggtcctgaagcggttagtacccctcaaggctattctagttcctaagtacccttgttctagtgcctaaagtagtagagtccgtcttttcttccctgcagacaatagctgagaaattgggtttggagaaggacaacagatcaaacttcaaagcgcagtttggagacttcgctaccagtgtcgatggtgtgtttgccgccggggactgcagacgtggacaatcactggtggtttgggccatcacggaggggcggcaggctgctgcagcggtagacaagtacttgtcaaggtatgatcagaatgctgctgctacaggcgacagcactccctccgggacagggctcgttcagccggttgcggcatagtagcataaactggagcaagttttacgtttgtcagtgtatcctgtggttccacacagcaaacaccgttcttgtagttgtctaaaagaaacagagaaatccgggctcattaaggaatgaaagcccttctatattttttttgacgatagataaacagttgaaagttttggtggctattgtctcttttttctgctgcatgtggttttgtagtccaaacaatgtacagtttcccctttcttaaatagatgtaaatttgtcgtgtgatatgtcggttattttctatgtgtttgcaagcgcgactgagccaccagtctgtatgaggccgagtctcggtttcggtcgacttataccgtt

SEQ ID NO: 32298 - DNA, 6083 bp, Zea Mays
atacccgataaccatgttgcagagtccagctgcagttctgctatggccgactgctatgcccgactcatcaggatgtgacctccgattaggtggtgggaaggaaatgtgtttggtttgaggttcactcaaggttctccacaaacacctttcccagctgggaccgtgcacaaccaatgcgtgttttaggtcataatggagagatcaatactcttagaggaaacaagaattggatgacagcacgtgagggtctcttagaggctgagaagcttggattatcaaaggagcagctctcaagaattctgccaattgttgatgctacctcttccgattctggcgcatttgataatgttcttgagcttcttgtccgaggtgggcgaagcctgccagaagctgtgatgatgatgatccctgaggcatggcagaatgatgtaaacatggatcctgagaagaaagctctctacgagtttctgtcagcacttatggagccttgggatggacctgctctaatatcgtttactgatggtcgttaccttggagctaccctggaccgtaatggtttgaggcctggtcggttttatgtgacgcacagtgggcgtgtgatcatgggtagtgaggtcggtgttgttgatgttcctcctgaagacgtgctgagaaaaggcaggctaaaccctggaatgatgttattggttgattttgagaatcacactgtagtggatgatgaagctctgaaagcacaatattctaaagctcacccgtatggagaatggctcaagagacaaaaaatatacctcaaggatattgtagaatcagtaccagaaaccgatagagtcgctccaagcatttctagctcactttcacaaaagaatgagaacatagatcatgttggtatcagtgggattttgactcaactgaaggccttcgggtacacggtggaagccctcgagatgttgctactgccaatggctaaggatggagtggaagctcttggttccatgggaaacgatacaccacttgcggtgatgtcaaacagggagaagttgacttttgagtacttcaagcagatgtttgcacaagttacaaaccctccgattgaccctattagagagaaaattgttacatctatggagtgtatgattggcccagaaggtgacttgttggaaacaactgaaaaacaatgcaaccgccttgcacttaaaggtcccttggtttctattgatgaaatggaggctattaaaaagatgaattatcgaggttggcgaagcaaagtgcttgacataacttatccaaaaaagtctggaaggaagggcttggaagagactttgaacagaatttgtgctgaagctcgtaaagccatacgcgagggatacactattttggttctctcagatagaggattttcctcagaccgtgttgctgccagttctctcttagcagtgggagcagtgcatcagcaccttgttgcaaatcttgagaggacacgcataggattgttggttgagtcagctgaacctcgtgaagtgcaccatttctgcaccctggttggatttggcgctgatgctatatgcccttatttggctattgaagcaatttggtgcttacagaatgacgggaagattactcctaatggagatggacaaccttactcaaaggaagagctggtggcgaagtatttctatgcttctaactatggaatgatgaaagttcttgcaaagatgggaatatccacccttgcatcctacaaaggtgcacaaatttttgaagctcttggtctttcttctgaagtggttggcaagtgtttcgaaggcacacctagcagaattgagggtgcaacatttgaaatgcttgcacgagatgctctccgtcttcatgagttagctttcccatcaagagcccttccagctggcagtgcagatgcaaaggcacttcctaacccaggggattaccactggagaaaaaatggtgaaattcatctcaacgacccacttgcaatgggaaagttacaggaagcagctagagtcaacagccgggcagcatacaaggaatattcgaaacgaattcaggagctcaataaggcgtgcaatctacgtggcatgctgaaatttaaacatgtttctgacaagatatctttggatgaggttgaacctgcaagtgagatagtgaaacgcttttgtactggagcgatgagttatggttctatttcattagaagcacatactgcccttgctattgccatgaacaaacttggaggaaaatctaatacaggtgagggaggggaacagccctctcggatggaaccacttcctgatggctcaatgaatccaagacgaagtgcaatcaagcaagttgccagtggacggtttggagtttccagctattacctgactaatgcagatgagctgcagataaaaatggctcagggtgccaagcctggtgaaggtggtgaacttccaggccacaaggttattggtgacattgctgtcacaagacactccacagctggtgtaggactgatcagtccacctccgcatcatgatatttattcgattgaggatcttgcgcagcttatacatgaccttaagaattcaaatcctggagcccgcatcagtgtcaaactagtttctgaggctggtgtgggagttgttgctagtggtgttgtaaaaggacatgcagaccatgttcttatatctggccatgatggtggcactggagcttcaagatggaccggtatcaagaatgctggacttccatgggaacttgggttggctgagacacatcaaactctagtagcaaatgggcttcgtggtcgagctgtcctgcaaacagatggacagttgaagactggtagagatgttgctgttgcttgcttgcttggggcagaggaatttggtttcagcactgccccactgattacacttggctgtattatgatgcgaaaatgccacatgaacacttgtcctgttggtatagctactcaagacccagtgcttcgagaaaagtttgctggagaaccagagcatgtcatcaactttttcttcatgcttgctgaggagctaagagaaatcatggcaaaccttgggttccgcaccattactgaaatggttggacgttctgatatgcttgaggttgatccagaagtagtgaagagtaatgagaaacttgagaacattgatctctcactaatcttgaaaccagcttcagagattcgtccaggtgttgctcagtactgtgttgagaagcaagaccatggcctagacatggcattagataacaaactaatagatctgtcaagaactgctattgaaaagcaagttcgtgttttcattgagactccaatccagaacacgaatcgagcagttggaactatgctcagtcatcaagtcacaaaacgttatcacatgaatggattgcctgctggtacaattcatgtgaagtttactggaagtgctggtcaaagttttggcgcttttctttgtcctggaatcactcttgaactggaaggagacagcaatgattatgttggtaaaggattatctggtggaaaaattgttgtgtacccaccaaggaacagttcttttagtccagaggacaatattgtcattggtaatgtggctctgtatggtgctaccatgggagaggcatatttcaatggtatggcagcagaaagattttgtgttcgcaactcaggtgctcaagcagtggttgaaggaattggagatcacgggtgtgagtacatgactggaggcactgttgttatcctcggaaaaacagggcggaactttgctgctggcatgagtggaggcattgcctatgtttatgatgttgatgggaaattcagtgctcgctgcaacaatgagttagttgatctatatcatgtggaggaagaggatgacatcatcacattgaaaatgatgattgagcaacatcgtcgcaacactgagagtgttttggctagagatatactctccgattttgataaccttcttccaaaatttgtaaaagtatatccaagggactataagagggttctagaaagcatgaaggtggaaaaggctgttgctaagcatgcaaaggagcctaagatggcaaatggaatttctgtgacaactaagctttcattgactacttgtatcaactttcatgtacagaaagtacaacctgatcagtcagcaagccgaccaacacatgttgccaatgccaaaaagtacaggggctttattacatatgagcgagagagtatttcatacagagatccaaaagagcgtgttagagattggaaggaagttgcaatcgaatctacacctggtccactattaaatacacaatctgctcgttgcatggactgtggcactcctttctgtcatcaggaaagctcaggtgctggttgtcctcttggaaataagatcccagaattcaatgaattagttcaccagaacagatggcgcgaagcattggatcgactacttgagacaaacaacttccctgaattcactggacgagtttgccctgctccttgtgaggggtcatgtgttcttgggattattgagaatccggtgtctatcaaaagtatagaatgtgcaatcatagacaaaggttttgaagagggatggatgattccacgacctccacttcaaagaacaggaaggaaggtggccattgttggcagtggaccatctggtttggctgctgcagatcaactaaataaaatgggccacttcgtaactgtgttcgaacgtgcagatcgaattggaggtttaatgatgtatggtgtgccaaacatgaagacagacaagattggcgttgtccagcgccgtgttaatttaatggctgaagagggtgtcacatttgtggtgaatgccaatgttggtagtgatcctttgtactcgattgaacgtctacgttctgaaaatgatgcggttattttggcttgtggagcaacaaaaccgagagatctcaccatccctggacgcgagctatctggagttcattttgcaatggaatttctccatgcaaatacgaaaagtttactcgacagcaacctggaggatggtaaatatatctccgcccgtgggaaaaaggtggtggttattggtggaggtgatacaggcacagattgcattggcacatctattaggcatggttgcaccagccttgtaaatcttgaactcctgtcaaaaccaccaagcactagagctgctgacaacccatggccccagtggccaagaattttccgtgttgactatgggcatcaagaagctgctaccaagtttgggaaggatccaagaacttacggagtcttgacaaagcgttttattggcgatggaaatggcaaggtgaaggcccttgaggtagtgcgtgtgaagtgggagaaagtagatggaagatttcaactcaaggagatggaaggatcagaagagattattgaggctgatctcgtcctcctagctatgggattcttgggtcctgaagcgacaatagctgagaaattgggtttggagaaggacaacagatcaaacttcaaagcgcagtttggagacttcgctaccagtgtcgatggtgtgtttgccgccggggactgcagacgtggacaatcactggtggtttgggccatcacggaggggcggcaggctgctgcagcggtagacaagtacttgtcaaggtatgatcagaatgctgctgctacaggcgacagcactccctccgggacagggctcgttcagccggttgcggcatagtagcataaactggagcaagttttacgtttgtcagtgtatcctgtggttccacacagcaaacaccgttcttgtagttgtctaaaagaaacagagaaatccgggctcattaaggaatgaaagcccttctatattttttttgacgatagataaacagttgaaagttttggtggctattgtctcttttttctgctgcatgtggttttgtagtccaaacaatgtacagtttcccctttcttaaatagatgtaaatttgtcgtgtgatatgtcggttattttctatgtgtttgcaagcgcgactgagccaccagtctgtatgaggccgagtctcggtttcggtcgacttataccgtt

SEQ ID NO: 32299 - DNA, 5977 bp, Zea Mays
gttctgctatggccgactgctatgcccgactcatcaggatgtgacctccgattaggtggtgggaaggaaatgtgtttggtttgaggttcactcaaggttctccacaaacacctttcccagctgggaccgtgcacaaccaatgcgtgttttaggtcataatggagagatcaatactcttagaggaaacaagaattggatgacagcacgtgagggtctcttagaggctgagaagcttggattatcaaaggagcagctctcaagaattctgccaattgttgatgctacctcttccgattctggcgcatttgataatgttcttgagcttcttgtccgaggtgggcgaagcctgccagaagctgtgatgatgatgatccctgaggcatggcagaatgatgtaaacatggatcctgagaagaaagctctctacgagtttctgtcagcacttatggagccttgggatggacctgctctaatatcgtttactgatggtcgttaccttggagctaccctggaccgtaatggtttgaggcctggtcggttttatgtgacgcacagtgggcgtgtgatcatgggtagtgaggtcggtgttgttgatgttcctcctgaagacgtgctgagaaaaggcaggctaaaccctggaatgatgttattggttgattttgagaatcacactgtagtggatgatgaagctctgaaagcacaatattctaaagctcacccgtatggagaatggctcaagagacaaaaaatatacctcaaggatattgtagaatcagtaccagaaaccgatagagtcgctccaagcatttctagctcactttcacaaaagaatgagaacatagatcatgttggtatcagtgggattttgactcaactgaaggccttcgggtacacggtggaagccctcgagatgttgctactgccaatggctaaggatggagtggaagctcttggttccatgggaaacgatacaccacttgcggtgatgtcaaacagggagaagttgacttttgagtacttcaagcagatgtttgcacaagttacaaaccctccgattgaccctattagagagaaaattgttacatctatggagtgtatgattggcccagaaggtgacttgttggaaacaactgaaaaacaatgcaaccgccttgcacttaaaggtcccttggtttctattgatgaaatggaggctattaaaaagatgaattatcgaggttggcgaagcaaagtgcttgacataacttatccaaaaaagtctggaaggaagggcttggaagagactttgaacagaatttgtgctgaagctcgtaaagccatacgcgagggatacactattttggttctctcagatagaggattttcctcagaccgtgttgctgccagttctctcttagcagtgggagcagtgcatcagcaccttgttgcaaatcttgagaggacacgcataggattgttggttgagtcagctgaacctcgtgaagtgcaccatttctgcaccctggttggatttggcgctgatgctatatgcccttatttggctattgaagcaatttggtgcttacagaatgacgggaagattactcctaatggagatggacaaccttactcaaaggaagagctggtggcgaagtatttctatgcttctaactatggaatgatgaaagttcttgcaaagatgggaatatccacccttgcatcctacaaaggtgcacaaatttttgaagctcttggtctttcttctgaagtggttggcaagtgtttcgaaggcacacctagcagaattgagggtgcaacatttgaaatgcttgcacgagatgctctccgtcttcatgagttagctttcccatcaagagcccttccagctggcagtgcagatgcaaaggcacttcctaacccaggggattaccactggagaaaaaatggtgaaattcatctcaacgacccacttgcaatgggaaagttacaggaagcagctagagtcaacagccgggcagcatacaaggaatattcgaaacgaattcaggagctcaataaggcgtgcaatctacgtggcatgctgaaatttaaacatgtttctgacaagatatctttggatgaggttgaacctgcaagtgagatagtgaaacgcttttgtactggagcgatgagttatggttctatttcattagaagcacatactgcccttgctattgccatgaacaaacttggaggaaaatctaatacaggtgagggaggggaacagccctctcggatggaaccacttcctgatggctcaatgaatccaagacgaagtgcaatcaagcaagttgccagtggacggtttggagtttccagctattacctgactaatgcagatgagctgcagataaaaatggctcagggtgccaagcctggtgaaggtggtgaacttccaggccacaaggttattggtgacattgctgtcacaagacactccacagctggtgtaggactgatcagtccacctccgcatcatgatatttattcgattgaggatcttgcgcagcttatacatgaccttaagaattcaaatcctggagcccgcatcagtgtcaaactagtttctgaggctggtgtgggagttgttgctagtggtgttgtaaaaggacatgcagaccatgttcttatatctggccatgatggtggcactggagcttcaagatggaccggtatcaagaatgctggacttccatgggaacttgggttggctgagacacatcaaactctagtagcaaatgggcttcgtggtcgagctgtcctgcaaacagatggacagttgaagactggtagagatgttgctgttgcttgcttgcttggggcagaggaatttggtttcagcactgccccactgattacacttggctgtattatgatgcgaaaatgccacatgaacacttgtcctgttggtatagctactcaagacccagtgcttcgagaaaagtttgctggagaaccagagcatgtcatcaactttttcttcatgcttgctgaggagctaagagaaatcatggcaaaccttgggttccgcaccattactgaaatggttggacgttctgatatgcttgaggttgatccagaagtagtgaagagtaatgagaaacttgagaacattgatctctcactaatcttgaaaccagcttcagagattcgtccaggtgttgctcagtactgtgttgagaagcaagaccatggcctagacatggcattagataacaaactaatagatctgtcaagaactgctattgaaaagcaagttcgtgttttcattgagactccaatccagaacacgaatcgagcagttggaactatgctcagtcatcaagtcacaaaacgttatcacatgaatggattgcctgctggtacaattcatgtgaagtttactggaagtgctggtcaaagttttggcgcttttctttgtcctggaatcactcttgaactggaaggagacagcaatgattatgttggtaaaggattatctggtggaaaaattgttgtgtacccaccaaggaacagttcttttagtccagaggacaatattgtcattggtaatgtggctctgtatggtgctaccatgggagaggcatatttcaatggtatggcagcagaaagattttgtgttcgcaactcaggtgctcaagcagtggttgaaggaattggagatcacgggtgtgagtacatgactggaggcactgttgttatcctcggaaaaacagggcggaactttgctgctggcatgagtggaggcattgcctatgtttatgatgttgatgggaaattcagtgctcgctgcaacaatgagttagttgatctatatcatgtggaggaagaggatgacatcatcacattgaaaatgatgattgagcaacatcgtcgcaacactgagagtgttttggctagagatatactctccgattttgataaccttcttccaaaatttgtaaaagtatatccaagggactataagagggttctagaaagcatgaaggtggaaaaggctgttgctaagcatgcaaaggagcctaagatggcaaatggaatttctgtgacaactaagaaagtacaacctgatcagtcagcaagccgaccaacacatgttgccaatgccaaaaagtacaggggctttattacatatgagcgagagagtatttcatacagagatccaaaagagcgtgttagagattggaaggaagttgcaatcgaatctacacctggtccactattaaatacacaatctgctcgttgcatggactgtggcactcctttctgtcatcagatcccagaattcaatgaattagttcaccagaacagatggcgcgaagcattggatcgactacttgagacaaacaacttccctgaattcactggacgagtttgccctgctccttgtgaggggtcatgtgttcttgggattattgagaatccggtgtctatcaaaagtatagaatgtgcaatcatagacaaaggttttgaagagggatggatgattccacgacctccacttcaaagaacaggaaggaaggtggccattgttggcagtggaccatctggtttggctgctgcagatcaactaaataaaatgggccacttcgtaactgtgttcgaacgtgcagatcgaattggaggtttaatgatgtatggtgtgccaaacatgaagacagacaagattggcgttgtccagcgccgtgttaatttaatggctgaagagggtgtcacatttgtggtgaatgccaatgttggtagtgatcctttgtactcgattgaacgtctacgttctgaaaatgatgcggttattttggcttgtggagcaacaaaaccgagagatctcaccatccctggacgcgagctatctggagttcattttgcaatggaatttctccatgcaaatacgaaaagtttactcgacagcaacctggaggatggtaaatatatctccgcccgtgggaaaaaggtggtggttattggtggaggtgatacaggcacagattgcattggcacatctattaggcatggttgcaccagccttgtaaatcttgaactcctgtcaaaaccaccaagcactagagctgctgacaacccatggccccagtggccaagaattttccgtgttgactatgggcatcaagaagctgctaccaagtttgggaaggatccaagaacttacggagtcttgacaaagcgttttattggcgatggaaatggcaaggtgaaggcccttgaggtagtgcgtgtgaagtgggagaaagtagatggaagatttcaactcaaggagatggaaggatcagaagagattattgaggctgatctcgtcctcctagctatgggattcttgggtcctgaagcgacaatagctgagaaattgggtttggagaaggacaacagatcaaacttcaaagcgcagtttggagacttcgctaccagtgtcgatggtgtgtttgccgccggggactgcagacgtggacaatcactggtggtttgggccatcacggaggggcggcaggctgctgcagcggtagacaagtacttgtcaaggtatgatcagaatgctgctgctacaggcgacagcactccctccgggacagggctcgttcagccggttgcggcatagtagcataaactggagcaagttttacgtttgtcagtgtatcctgtggttccacacagcaaacaccgttcttgtagttgtctaaaagaaacagagaaatccgggctcattaaggaatgaaagcccttctatattttttttgacgatagataaacagttgaaagttttggtggctattgtctcttttttctgctgcatgtggttttgtagtccaaacaatgtacagtttcccctttcttaaatagatgtaaatttgtcgtgtgatatgtcggttattttctatgtgtttgcaagcgcgactgagccaccagtctgtatgaggccgagtctcggtttcggtcgacttataccgtt

SEQ ID NO: 32300 - DNA, 5914 bp, Zea Mays
ttctgctatggccgactgctatgcccgactcatcaggatgtgacctccgattaggtggtgggaaggaaatgtgtttggtttgaggttcactcaaggttctccacaaacacctttcccagctgggaccgtgcacaaccaatgcgtgttttaggtcataatggagagatcaatactcttagaggaaacaagaattggatgacagcacgtgagggtctcttagaggctgagaagcttggattatcaaaggagcagctctcaagaattctgccaattgttgatgctacctcttccgattctggcgcatttgataatgttcttgagcttcttgtccgaggtgggcgaagcctgccagaagctgtgatgatgatgatccctgaggcatggcagaatgatgtaaacatggatcctgagaagaaagctctctacgagtttctgtcagcacttatggagccttgggatggacctgctctaatatcgtttactgatggtcgttaccttggagctaccctggaccgtaatggtttgaggcctggtcggttttatgtgacgcacagtgggcgtgtgatcatgggtagtgaggtcggtgttgttgatgttcctcctgaagacgtgctgagaaaaggcaggctaaaccctggaatgatgttattggttgattttgagaatcacactgtagtggatgatgaagctctgaaagcacaatattctaaagctcacccgtatggagaatggctcaagagacaaaaaatatacctcaaggatattgtagaatcagtaccagaaaccgatagagtcgctccaagcatttctagctcactttcacaaaagaatgagaacatagatcatgttggtatcagtgggattttgactcaactgaaggccttcgggtacacggtggaagccctcgagatgttgctactgccaatggctaaggatggagtggaagctcttggttccatgggaaacgatacaccacttgcggtgatgtcaaacagggagaagttgacttttgagtacttcaagcagatgtttgcacaagttacaaaccctccgattgaccctattagagagaaaattgttacatctatggagtgtatgattggcccagaaggtgacttgttggaaacaactgaaaaacaatgcaaccgccttgcacttaaaggtcccttggtttctattgatgaaatggaggctattaaaaagatgaattatcgaggttggcgaagcaaagtgcttgacataacttatccaaaaaagtctggaaggaagggcttggaagagactttgaacagaatttgtgctgaagctcgtaaagccatacgcgagggatacactattttggttctctcagatagaggattttcctcagaccgtgttgctgccagttctctcttagcagtgggagcagtgcatcagcaccttgttgcaaatcttgagaggacacgcataggattgttggttgagtcagctgaacctcgtgaagtgcaccatttctgcaccctggttggatttggcgctgatgctatatgcccttatttggctattgaagcaatttggtgcttacagaatgacgggaagattactcctaatggagatggacaaccttactcaaaggaagagctggtggcgaagtatttctatgcttctaactatggaatgatgaaagttcttgcaaagatgggaatatccacccttgcatcctacaaaggtgcacaaatttttgaagctcttggtctttcttctgaagtggttggcaagtgtttcgaaggcacacctagcagaattgagggtgcaacatttgaaatgcttgcacgagatgctctccgtcttcatgagttagctttcccatcaagagcccttccagctggcagtgcagatgcaaaggcacttcctaacccaggggattaccactggagaaaaaatggtgaaattcatctcaacgacccacttgcaatgggaaagttacaggaagcagctagagtcaacagccgggcagcatacaaggaatattcgaaacgaattcaggagctcaataaggcgtgcaatctacgtggcatgctgaaatttaaacatgtttctgacaagatatctttggatgaggttgaacctgcaagtgagatagtgaaacgcttttgtactggagcgatgagttatggttctatttcattagaagcacatactgcccttgctattgccatgaacaaacttggaggaaaatctaatacaggtgagggaggggaacagccctctcggatggaaccacttcctgatggctcaatgaatccaagacgaagtgcaatcaagcaagttgccagtggacggtttggagtttccagctattacctgactaatgcagatgagctgcagataaaaatggctcagggtgccaagcctggtgaaggtggtgaacttccaggccacaaggttattggtgacattgctgtcacaagacactccacagctggtgtaggactgatcagtccacctccgcatcatgatatttattcgattgaggatcttgcgcagcttatacatgaccttaagaattcaaatcctggagcccgcatcagtgtcaaactagtttctgaggctggtgtgggagttgttgctagtggtgttgtaaaaggacatgcagaccatgttcttatatctggccatgatggtggcactggagcttcaagatggaccggtatcaagaatgctggacttccatgggaacttgggttggctgagacacatcaaactctagtagcaaatgggcttcgtggtcgagctgtcctgcaaacagatggacagttgaagactggtagagatgttgctgttgcttgcttgcttggggcagaggaatttggtttcagcactgccccactgattacacttggctgtattatgatgcgaaaatgccacatgaacacttgtcctgttggtatagctactcaagacccagtgcttcgagaaaagtttgctggagaaccagagcatgtcatcaactttttcttcatgcttgctgaggagctaagagaaatcatggcaaaccttgggttccgcaccattactgaaatggttggacgttctgatatgcttgaggttgatccagaagtagtgaagagtaatgagaaacttgagaacattgatctctcactaatcttgaaaccagcttcagagattcgtccaggtgttgctcagtactgtgttgagaagcaagaccatggcctagacatggcattagataacaaactaatagatctgtcaagaactgctattgaaaagcaagttcgtgttttcattgagactccaatccagaacacgaatcgagcagttggaactatgctcagtcatcaagtcacaaaacgttatcacatgaatggattgcctgctggtacaattcatgtgaagtttactggaagtgctggtcaaagttttggcgcttttctttgtcctggaatcactcttgaactggaaggagacagcaatgattatgttggtaaaggattatctggtggaaaaattgttgtgtacccaccaaggaacagttcttttagtccagaggacaatattgtcattggtaatgtggctctgtatggtgctaccatgggagaggcatatttcaatggtatggcagcagaaagattttgtgttcgcaactcaggtgctcaagcagtggttgaaggaattggagatcacgggtgtgagtacatgactggaggcactgttgttatcctcggaaaaacagggcggaactttgctgctggcatgagtggaggcattgcctatgtttatgatgttgatgggaaattcagtgctcgctgcaacaatgagttagttgatctatatcatgtggaggaagaggatgacatcatcacattgaaaatgatgattgagcaacatcgtcgcaacactgagagtgttttggctagagatatactctccgattttgataaccttcttccaaaatttgtaaaagtatatccaagggactataagagggttctagaaagcatgaaggtggaaaaggctgttgctaagcatgcaaaggagcctaagatggcaaatggaatttctgtgacaactaagaaagtacaacctgatcagtcagcaagccgaccaacacatgttgccaatgccaaaaagtacaggggctttattacatatgagcgagagagtatttcatacagagatccaaaagagcgtgttagagattggaaggaagttgcaatcgaatctacacctggtccactattaaatacacaatctgctcgttgcatggactgtggcactcctttctgtcatcaggaaagctcaggtgctggttgtcctcttggaaataagatcccagaattcaatgaattagttcaccagaacagatggcgcgaagcattggatcgactacttgagacaaacaacttccctgaattcactggacgagtttgccctgctccttgtgaggggtcatgtgttcttgggattattgagaatccggtgtctatcaaaagtatagaatgtgcaatcatagacaaaggttttgaagagggatggatgattccacgacctccacttcaaagaacaggatcgaattggaggtttaatgatgtatggtgtgccaaacatgaagacagacaagattggcgttgtccagcgccgtgttaatttaatggctgaagagggtgtcacatttgtggtgaatgccaatgttggtagtgatcctttgtactcgattgaacgtctacgttctgaaaatgatgcggttattttggcttgtggagcaacaaaaccgagagatctcaccatccctggacgcgagctatctggagttcattttgcaatggaatttctccatgcaaatacgaaaagtttactcgacagcaacctggaggatggtaaatatatctccgcccgtgggaaaaaggtggtggttattggtggaggtgatacaggcacagattgcattggcacatctattaggcatggttgcaccagccttgtaaatcttgaactcctgtcaaaaccaccaagcactagagctgctgacaacccatggccccagtggccaagaattttccgtgttgactatgggcatcaagaagctgctaccaagtttgggaaggatccaagaacttacggagtcttgacaaagcgttttattggcgatggaaatggcaaggtgaaggcccttgaggtagtgcgtgtgaagtgggagaaagtagatggaagatttcaactcaaggagatggaaggatcagaagagattattgaggctgatctcgtcctcctagctatgggattcttgggtcctgaagcgacaatagctgagaaattgggtttggagaaggacaacagatcaaacttcaaagcgcagtttggagacttcgctaccagtgtcgatggtgtgtttgccgccggggactgcagacgtggacaatcactggtggtttgggccatcacggaggggcggcaggctgctgcagcggtagacaagtacttgtcaaggtatgatcagaatgctgctgctacaggcgacagcactccctccgggacagggctcgttcagccggttgcggcatagtagcataaactggagcaagttttacgtttgtcagtgtatcctgtggttccacacagcaaacaccgttcttgtagttgtctaaaagaaacagagaaatccgggctcattaaggaatgaaagcccttctatattttttttgacgatagataaacagttgaaagttttggtggctattgtctcttttttctgctgcatgtggttttgtagtccaaacaatgtacagtttcccctttcttaaatagatgtaaatttgtcgtgtgatatgtcggttattttctatgtgtttgcaagcgcgactgagccaccagtctgtatgaggccgagtctcggtttcggtcgacttataccgtt

SEQ ID NO: 32301 - DNA, 1635 bp, Zea Mays
tgcatattatgtgggaaagctcaggtgctggttgtcctcttggaaataagatcccagaattcaatgaattagttcaccagaacagatggcgcgaagcattggatcgactacttgagacaaacaacttccctgaattcactggacgagtttgccctgctccttgtgaggggtcatgtgttcttgggattattgagaatccggtgtctatcaaaagtatagaatgtgcaatcatagacaaaggttttgaagagggatggatgattccacgacctccacttcaaagaacaggatcgaattggaggtttaatgatgtatggtgtgccaaacatgaagacagacaagattggcgttgtccagcgccgtgttaatttaatggctgaagagggtgtcacatttgtggtgaatgccaatgttggtagtgatcctttgtactcgattgaacgtctacgttctgaaaatgatgcggttattttggcttgtggagcaacaaaaccgagagatctcaccatccctggacgcgagctatctggagttcattttgcaatggaatttctccatgcaaatacgaaaagtttactcgacagcaacctggaggatggtaaatatatctccgcccgtgggaaaaaggtggtggttattggtggaggtgatacaggcacagattgcattggcacatctattaggcatggttgcaccagccttgtaaatcttgaactcctgtcaaaaccaccaagcactagagctgctgacaacccatggccccagtggccaagaattttccgtgttgactatgggcatcaagaagctgctaccaagtttgggaaggatccaagaacttacggagtcttgacaaagcgttttattggcgatggaaatggcaaggtgaaggcccttgaggtagtgcgtgtgaagtgggagaaagtagatggaagatttcaactcaaggagatggaaggatcagaagagattattgaggctgatctcgtcctcctagctatgggattcttgggtcctgaagcgacaatagctgagaaattgggtttggagaaggacaacagatcaaacttcaaagcgcagtttggagacttcgctaccagtgtcgatggtgtgtttgccgccggggactgcagacgtggacaatcactggtggtttgggccatcacggaggggcggcaggctgctgcagcggtagacaagtacttgtcaaggtatgatcagaatgctgctgctacaggcgacagcactccctccgggacagggctcgttcagccggttgcggcatagtagcataaactggagcaagttttacgtttgtcagtgtatcctgtggttccacacagcaaacaccgttcttgtagttgtctaaaagaaacagagaaatccgggctcattaaggaatgaaagcccttctatattttttttgacgatagataaacagttgaaagttttggtggctattgtctcttttttctgctgcatgtggttttgtagtccaaacaatgtacagtttcccctttcttaaatagatgtaaatttgtcgtgtgatatgtcggttattttctatgtgtttgcaagcgcgactgagccaccagtctgtatgaggccgagtctcggtttcggtcgacttataccgtt

SEQ ID NO: 32302 - DNA, 1733 bp, Zea Mays
tgcatattatgtgggaaagctcaggtgctggttgtcctcttggaaataagatcccagaattcaatgaattagttcaccagaacagatggcgcgaagcattggatcgactacttgagacaaacaacttccctgaattcactggacgagtttgccctgctccttgtgaggggtcatgtgttcttgggattattgagaatccggtgtctatcaaaagtatagaatgtgcaatcatagacaaaggttttgaagagggatggatgattccacgacctccacttcaaagaacaggaaggaaggtggccattgttggcagtggaccatctggtttggctgctgcagatcaactaaataaaatgggccacttcgtaactgtgttcgaacgtgcagatcgaattggaggtttaatgatgtatggtgtgccaaacatgaagacagacaagattggcgttgtccagcgccgtgttaatttaatggctgaagagggtgtcacatttgtggtgaatgccaatgttggtagtgatcctttgtactcgattgaacgtctacgttctgaaaatgatgcggttattttggcttgtggagcaacaaaaccgagagatctcaccatccctggacgcgagctatctggagttcattttgcaatggaatttctccatgcaaatacgaaaagtttactcgacagcaacctggaggatggtaaatatatctccgcccgtgggaaaaaggtggtggttattggtggaggtgatacaggcacagattgcattggcacatctattaggcatggttgcaccagccttgtaaatcttgaactcctgtcaaaaccaccaagcactagagctgctgacaacccatggccccagtggccaagaattttccgtgttgactatgggcatcaagaagctgctaccaagtttgggaaggatccaagaacttacggagtcttgacaaagcgttttattggcgatggaaatggcaaggtgaaggcccttgaggtagtgcgtgtgaagtgggagaaagtagatggaagatttcaactcaaggagatggaaggatcagaagagattattgaggctgatctcgtcctcctagctatgggattcttgggtcctgaagcgacaatagctgagaaattgggtttggagaaggacaacagatcaaacttcaaagcgcagtttggagacttcgctaccagtgtcgatggtgtgtttgccgccggggactgcagacgtggacaatcactggtggtttgggccatcacggaggggcggcaggctgctgcagcggtagacaagtacttgtcaaggtatgatcagaatgctgctgctacaggcgacagcactccctccgggacagggctcgttcagccggttgcggcatagtagcataaactggagcaagttttacgtttgtcagtgtatcctgtggttccacacagcaaacaccgttcttgtagttgtctaaaagaaacagagaaatccgggctcattaaggaatgaaagcccttctatattttttttgacgatagataaacagttgaaagttttggtggctattgtctcttttttctgctgcatgtggttttgtagtccaaacaatgtacagtttcccctttcttaaatagatgtaaatttgtcgtgtgatatgtcggttattttctatgtgtttgcaagcgcgactgagccaccagtctgtatgaggccgagtctcggtttcggtcgacttataccgtt

SEQ ID NO: 32303 - DNA, 1577 bp, Zea Mays
ccgaggaaccatccgagttgcgaacaccacccacaatctcgtgtcactccctagtaaccacgcactcacttggccagtgccgctccacgcacgcacgcacagacatgggcaacaccgtgccgccgcgcgtgtcccgcgaggccaccggcggcaggaggggcgccgggaccgcgcgcaggcgcaggcgctccgagaacgttgccgtcaccgaggcggcgcctcctgccacgccgagccgcgtggtgggcacggcgcgcaagcaggacggcgacgttgaggaggaaacgacgcgcgcgggacgagctctgcgggcgggtggtggcgacggcgcggccgcgtccagcaaggtgctggcggtgaggatcgtgatggagaggaaggacgcggaggcgctggtggcgaggctgatggaggcgcagagcgcgcgggtgcgcaaggccaggatggccgagctcagaagcgagctacgggccgggagctgcagtggcgcggcggcgcgcgccgagacgctgggactgggaggcaaccgcatgctcccgccgatagactgatagaggagaacaggtgtgagcgcgcgcccagtggtgccacaccactagctttgagcgccggagcttgcagtttgctttagtacgtgaacaacttgcagtagtgttttaagttagacgtgaacaactttttagcttttacctaggacagtcgcggtttcaggtgagtagtgtatgattcgttggtcacccgggccgtgcctgtacatatgtgtaggagtgctgtggagatgattctatggcagcatggccagtctctagtctctacacaagtagtggtgcagctcagctagcttcttagttcatgatcactttctcgtctctatcgcctcgctcacggctatcgcttcatctccaagctttgttttctgaacggggtagccaagccaaacctgccacggcggcgaatgcatgcatcagcagcgagcatttggcggctgcactggccgttccttaccctttcacacgaggagaaagcaacggggcgggcaagtggtacgtcaggagctgagccagtggtcaccggggcttggtagatcagataactgctagaaacagtcgacctctgcgcaagtggcccgccgttttcacgcccatccgctccaaatttcttcctttctgatctaccttctcatgatctcatccatccccaagacggctgtcaaggtcagatgttatattagcaagcgtcaaaggggcggtttactcagagcttcagctcttcatttgtaaagctagatcgaaagcgttatttttttaaaaaaaaaagttttgaataagatgaccgtgtaataataaatacatcttggtcttggattagcattctatgtaagccaacataagtaccttggaacctgtatatggcttgtaatacaatacatcctttttagctttttaaactggctgttacctgagcatgtctatccttactgtaagctacgataaggctattcctaataggcagtatcatacttattaatgagatgcctttctttttgctgatgtggtacgacatttagtaagagggag

SEQ ID NO: 32304 - DNA, 2845 bp, Zea Mays
ggctgccgttacctttgttggcgttggaagttggacacagcccgcggtaccgcaccaccggcccggttcgcggtgcaataaattcgacgcgccgctgcctgtgcggctgtgcctgccgcgccgctcgtctcgacagacacacgcccacggagactcggagagggaggagggagggaggaggggagaggccgagagcacagggaacagacagacatggtcacgggatccatgaagcacctcgtgcaggtggagccggcaagggaggcggcggcggagggcggggcgccatcggcggggcccacgtaccgatgcgcggccggtggcaacgccgcgtcgccgcccgccgtgccggggctcgagtgctgctgggacatattccgcttgtccgtggagaagtgccccgacaacaagatgctgggccgccgcgaaatcgtccacggaaaggctggcagctacacatggctgacttacaagcaggtatacgacaccgtgctcgatgttgggtctgccatccggagctgtggcgtcggcaagggcggccggtgtggcatctatggagccaattctcctgagtgggtcatcagtatgcaggcctgcaatgcccatggcatctactgtgtgccactatatgacacgcttggtgccggggcagtagaattcgtattgtgccatgcagaggtacaaattgcttttgttgaggaaaagaagatcggagagatgctcaagacatttcccaatgcgaccaaatatctgaaaacacttgtaagcttcggtaaggttgatcctgggcacaaggaaaaagttgaacagaatggcttgtccatctactcatgggaagagtttctgcaactgggaggtaaagagaagtttgaacttccacccaaggaaaaggatgacatatgtacaataatgtacaccagtggaacaactggtgatcctaagggagtactaatctcgaacaagagcattgttaccattgtttcagcagtagatgagttcctcaacaactcaaacgagcagcttaacatggatgacgtttacatttcctatcttccgcttgctcatatatttgaccgggtgattgaagaggtgttcattcgtcatggtgcttcaattggattttggcgtggggatgtcaaactcttggttgaagacattggagaactcaaaccaacagttttttgtgctgttccacgtgttctagacagaatttatggaggattgcaagataaaattacagctggtggtttcctaaagaaaaccttgttcaatgttgcttacaaatacaaacaaggcaatatgttgaagggaaacaagcatgaagaggctgctgccatgtttgatcgcctggtcttcaccaaggtgaaacggggactaggtggaagggttcgcctgattctatctggcgcagctcccctatctagacatgttgaggagtatctgcgtgtggtaacatgctcccatgtccttcaaggatacgggctaacggaaacctgtgctgggtcctttgtttccctgccgaacaacatgtccatgctgggaactgtcggccctccagtcccgtatgtcgaagtacgcctggagtctgtccctgagatgggttatgatgcactgtcgagcgagacgcctcgtggggaaatttgcatcagaggggacaccttgttctcgggatactacaagcgagaggacctaaccaaagaagtcttggtcgatggctggttccacacaggtaccatcggtccctgttccagtattcctccagtgtctgatcggacgtgtccatgtcagcatcactgtgagtcaagaaaatgtcaagggaaagaaaatgtgaagggaactggtgctttcgtagccgtgctttgtcaacaatttgcattaactcccggaagatcattgataactgtcttgaaagagatcctgatttaacttgccatcagaaatgcctttgaaattttcccaagtctaacgtttgttcactgccaaatattaatatttactgcaggagacattggtgagtggcagtctgacggaagcatgaagatcattgaccgcaagaagaacatcttcaagctctcacagggagagtacgttgcggttgagaatctggagaacatctttggtcaaactcctgctgttgattcgatttgggtctacggcaacagcttcgagtcgagcctggtagcagttgtgaaccccaacacacaagcactggagcgctgggcagagtcgaacggggtaactggagaatttgccacgatatgcgaagaccctagagcgagagagttcatcttgggagagcttacaaagatgggtaaagaaaagaagctcaaaggctttgagctcatcagggctgttcatctggaccccgcaccgttcgacatggagcgcgaccttatcaccccgacgtacaagaagaagcggccacagctgctgaaacactatcagaccatcattgacggtatgtacaatagcatgaagtaggctctgcacggctccacctgttgcctcacggcatggagaatcaaaatgctttgctagccgtcacctcggcaagcagactccaatgtgaattgagattatttcattagattgtgtcattaaaaagttatgctacatgatgttagctaggttttttttatccctcctggctcctgaaattggcgtacaagctgcgtgaatgcacccgtgtcagtgttgccatctaaataccttagataagcgtatgccctgtgcctcgatttttttaattttaccttttaaaaaaacatatttacatcccctagtgatcaaaacttgacttcagactccaggggcgccgagataatatggcttatgatgccgagat

SEQ ID NO: 32305 - DNA, 1971 bp, Zea Mays
gcgccgctcgtctcgacagacacacgcccacggagactcggagagggaggagggagggaggaggggagaggccgagagcacagggaacagacagacatggtcacgggatccatgaagcacctcgtgcaggtggagccggcaagggaggcggcggcggagggcggggcgccatcggcggggcccacgtaccgatgcgcggccggtggcaacgccgcgtcgccgcccgccgtgccggggctcgagtgctgctgggacatattccgcttgtccgtggagaagtgccccgacaacaagatgctgggccgccgcgaaatcgtccacggaaaggctggcagctacacatggctgacttacaagcaggtatacgacaccgtgctcgatgttgggtctgccatccggagctgtggcgtcggcaagggcggccggtgtggcatctatggagccaattctcctgagtgggtcatcagtatgcaggcctgcaatgcccatggcatctactgtgtgccactatatgacacgcttggtgccggggcagtagaattcgtattgtgccatgcagaggtacaaattgcttttgttgaggaaaagaagatcggagagatgctcaagacatttcccaatgcgaccaaatatctgaaaacacttgtaagcttcggtaaggttgatcctgggcacaaggaaaaagttgaacagaatggcttgtccatctactcatgggaagagtttctgcaactgggaggtaaagagaagtttgaacttccacccaaggaaaaggatgacatatgtacaataatgtacaccagtggaacaactggtgatcctaagggagtactaatctcgaacaagagcattgttaccattgtttcagcagtagatgagttcctcaacaactcaaacgagcagcttaacatggatgacgtttacatttcctatcttccgcttgctcatatatttgaccgggtgattgaagaggtgttcattcgtcatggtgcttcaattggattttggcgtggggatgtcaaactcttggttgaagacattggagaactcaaaccaacagttttttgtgctgttccacgtgttctagacagaatttatggaggattgcaagataaaattacagctggtggtttcctaaagaaaaccttgttcaatgttgcttacaaatacaaacaaggcaatatgttgaagggaaacaagcatgaagaggctgctgccatgtttgatcgcctggtcttcaccaaggtgaaacggggactaggtggaagggttcgcctgattctatctggcgcagctcccctatctagacatgttgaggagtatctgcgtgtggtaacatgctcccatgtccttcaaggatacgggctaacggaaacctgtgctgggtcctttgtttccctgccgaacaacatgtccatgctgggaactgtcggccctccagtcccgtatgtcgaagtacgcctggagtctgtccctgagatgggttatgatgcactgtcgagcgagacgcctcgtggggaaatttgcatcagaggggacaccttgttctcgggatactacaagcgagaggacctaaccaaagaagtcttggtcgatggctggttccacacaggagacattggtgagtggcagtctgacggaagcatgaagatcattgaccgcaagaagaacatcttcaagctctcacagggagagtacgttgcggttgagaatctggagaacatctttggtcaaactcctgctgttgattcgatttgggtctacggcaacagcttcgagtcgagcctggtagcagttgtgaaccccaacacacaagcactggagcgctgggcagagtcgaacggggtaactggagaatttgccacgatatgcgaagaccctagagcgagagagttcatcttgggagagcttacaaagatgggtaaagaaaagaagtggcctcagcaaatgatcttatgtatcgtcgttctc

SEQ ID NO: 32306 - DNA, 2446 bp, Zea Mays
gcgccgctcgtctcgacagacacacgcccacggagactcggagagggaggagggagggaggaggggagaggccgagagcacagggaacagacagacatggtcacgggatccatgaagcacctcgtgcaggtggagccggcaagggaggcggcggcggagggcggggcgccatcggcggggcccacgtaccgatgcgcggccggtggcaacgccgcgtcgccgcccgccgtgccggggctcgagtgctgctgggacatattccgcttgtccgtggagaagtgccccgacaacaagatgctgggccgccgcgaaatcgtccacggaaaggctggcagctacacatggctgacttacaagcaggtatacgacaccgtgctcgatgttgggtctgccatccggagctgtggcgtcggcaagggcggccggtgtggcatctatggagccaattctcctgagtgggtcatcagtatgcaggcctgcaatgcccatggcatctactgtgtgccactatatgacacgcttggtgccggggcagtagaattcgtattgtgccatgcagaggtacaaattgcttttgttgaggaaaagaagatcggagagatgctcaagacatttcccaatgcgaccaaatatctgaaaagcttcggtaaggttgatcctgggcacaaggaaaaagttgaacagaatggcttgtccatctactcatgggaagagtttctgcaactgggaggtaaagagaagtttgaacttccacccaaggaaaaggatgacatatgtacaataatgtacaccagtggaacaactggtgatcctaagggagtactaatctcgaacaagagcattgttaccattgtttcagcagtagatgagttcctcaacaactcaaacgagcagcttaacatggatgacgtttacatttcctatcttccgcttgctcatatatttgaccgggtgattgaagaggtgttcattcgtcatggtgcttcaattggattttggcgtggggatgtcaaactcttggttgaagacattggagaactcaaaccaacagttttttgtgctgttccacgtgttctagacagaatttatggaggattgcaagataaaattacagctggtggtttcctaaagaaaaccttgttcaatgttgcttacaaatacaaacaaggcaatatgttgaagggaaacaagcatgaagaggctgctgccatgtttgatcgcctggtcttcaccaaggtgaaacggggactaggtggaagggttcgcctgattctatctggcgcagctcccctatctagacatgttgaggagtatctgcgtgtggtaacatgctcccatgtccttcaaggatacgggctaacggaaacctgtgctgggtcctttgtttccctgccgaacaacatgtccatgctgggaactgtcggccctccagtcccgtatgtcgaagtacgcctggagtctgtccctgagatgggttatgatgcactgtcgagcgagacgcctcgtggggaaatttgcatcagaggggacaccttgttctcgggatactacaagcgagaggacctaaccaaagaagtcttggtcgatggctggttccacacaggagacattggtgagtggcagtctgacggaagcatgaagatcattgaccgcaagaagaacatcttcaagctctcacagggagagtacgttgcggttgagaatctggagaacatctttggtcaaactcctgctgttgattcgatttgggtctacggcaacagcttcgagtcgagcctggtagcagttgtgaaccccaacacacaagcactggagcgctgggcagagtcgaacggggtaactggagaatttgccacgatatgcgaagaccctagagcgagagagttcatcttgggagagcttacaaagatgggtaaagaaaagaagctcaaaggctttgagctcatcagggctgttcatctggaccccgcaccgttcgacatggagcgcgaccttatcaccccgacgtacaagaagaagcggccacagctgctgaaacactatcagaccatcattgacggtatgtacaatagcatgaagtaggctctgcacggctccacctgttgcctcacggcatggagaatcaaaatgctttgctagccgtcacctcggcaagcagactccaatgtgaattgagattatttcattagattgtgtcattaaaaagttatgctacatgatgttagctaggttttttttatccctcctggctcctgaaattggcgtacaagctgcgtgaatgcacccgtgtcagtgttgccatctaaataccttagataagcgtatgccctgtgcctcgatttttttaattttaccttttaaaaaaacatatttacatcccctagtgatcaaaacttgacttcagactccaggggcgccgagataatatggcttatgatgccgagat

SEQ ID NO: 32307 - DNA, 1401 bp, Zea Mays
acggattgcctcctcgctactggtcgccaccggggaagccgcggctcccccgtcatccacgacttcgggaccatggccacctcgcactggcgctggcagatgggtctgctgtcccgtcactctgacctgctcaagacggccgacgacgacagggcgctcctctagtgtgccggcgccgagtttgcgctcacggctaacttgctcatgccgttggacgcgcccggcacacggtgcctcatggagttatccttgtatcggaggcagggcatcattaagttccacaacccttccccctcctcgtagaattgcttgtccctgttgatcgaagtgagactgaatcagggggcccgcactcgcacctcccacgacctctttccgccatggggctccggattccaccgtttgtcaggcatgagtagcgagcgatggactggcggatcccggtagagacctgaaccccgcgccaccaccatcgccacagcaggctacatgtttgttctcttgttctagacgcaagcagcagatgcgaaataggcatccgtctcatggtggggaaattgttcacagttgaggatgtcgtaattggtggcctattcgtgatatctcttcttctagagagtatgcaagacaaggatttgctttgggtcttgttgttgtgctcaaatcgattcgggcaatcaaggttcaggcaattatgaagttgtccctaatttatttgaacattcattttttatgaagggactggaagctaaggacaatattttggggcgccagtttggatttggagcaattgtgaggtctgaccgtgtttcacaacagtggacatgtgacaaaagctcacccatcgttaaggaatttgtgagtgtggatgtagaactcggtggcaagaaacgatacttgacagagcctgcagttgccgtgattttggaattagttaggaaggcatgatgctatcatatcagaagaatttttgctcaacttttggtgagcactggaagaggatagagtggtaatcattacctaatctaaaatataaatcataccccttcaattgtcaagctctcaagaacatctttgacactaattctgcctttctttgatagttactgttcttcttcaatgcaggtgaagacaatggcatagctatactgtcatgggcatcatagggagcgagaggcaacagccaggctgggataaggctagagaataagattgagatgagctgggataaggctagagaataagattgagatgagagaattgtggagagttggttagcagtagataagtccaagaaagtaggagttagttgagagtttgtatgagaagttggttagctatagggctatttataagccgcatggcagcagggaataaatcaagcaagatcattaccaaacc

SEQ ID NO: 32308 - DNA, 1214 bp, Zea Mays
ctcctcgctactggtcgccaccggggaagccgcggctcccccgtcatccacgacttcgggaccatggccacctcgcactggcgctggcagatgggtctgctgtcccgtcactctgacctgctcaagacggccgacgacgacagggcgctcctctagtgtgccggcgccgagtttgcgctcacggctaacttgctcatgccgttggacgcgcccggcacacggtgcctcatggagttatccttgtatcggaggcagggcatcattaagttccacaacccttccccctcctcgtagaattgcttgtccctgttgatcgaagtgagactgaatcagggggcccgcactcgcacctcccacgacctctttccgccatggggctccggattccaccgtttgtcaggcatgagtagcgagcgatggactggcggatcccggtagagacctgaaccccgcgccaccaccatcgccacagcaggctacatgtttgttctcttgttctagacgcaagcagcagatgcgaaataggcatccgtctcatggtggggaaattgttcacagttgaggatgtcgtaattggtggcctattcgtgatatctcttcttctagagagtatgcaagacaaggatttgctttgggtcttgttgttgtgctcaaatcgattcgggcaatcaaggaagctaaggacaatattttggggcgccagtttggatttggagcaattgtgaggtctgaccgtgtttcacaacagtggacatgtgacaaaagctcacccatcgttaaggaatttgtgagtgtggatgtagaactcggtggcaagaaacgatacttgacagagcctgcagttgccgtgattttggaattagttaggaaggcatgatgctatcatatcagaagaatttttgctcaacttttggtgagcactggaagaggatagagtggtgaagacaatggcatagctatactgtcatgggcatcatagggagcgagaggcaacagccaggctgggataaggctagagaataagattgagatgagctgggataaggctagagaataagattgagatgagagaattgtggagagttggttagcagtagataagtccaagaaagtaggagttagttgagagtttgtatgagaagttggttagctatagggctatttataagccgcatggcagcagggaataaatcaagcaagatcattaccaaacc

SEQ ID NO: 32309 - DNA, 1270 bp, Zea Mays
cctcgctactggtcgccaccggggaagccgcggctcccccgtcatccacgacttcgggaccatggccacctcgcactggcgctggcagatgggtctgctgtcccgtcactctgacctgctcaagacggccgacgacgacagggcgctcctctagtgtgccggcgccgagtttgcgctcacggctaacttgctcatgccgttggacgcgcccggcacacggtgcctcatggagttatccttgtatcggaggcagggcatcattaagttccacaacccttccccctcctcgtagaattgcttgtccctgttgatcgaagtgagactgaatcagggggcccgcactcgcacctcccacgacctctttccgccatggggctccggattccaccgtttgtcaggcatgagtagcgagcgatggactggcggatcccggtagagacctgaaccccgcgccaccaccatcgccacagcaggctacatgtttgttctcttgttctagacgcaagcagcagatgcgaaataggcatccgtctcatggtggggaaattgttcacagttgaggatgtcgtaattggtggcctattcgtgatatctcttcttctagagagtatgcaagacaaggatttgctttgggtcttgttgttgtgctcaaatcgattcgggcaatcaaggttcaggcaattatgaagttgtccctaatttatttgaacattcattttttatgaagggactgctaaggacaatattttggggcgccagtttggatttggagcaattgtgaggtctgaccgtgtttcacaacagtggacatgtgacaaaagctcacccatcgttaaggaatttgtgagtgtggatgtagaactcggtggcaagaaacgatacttgacagagcctgcagttgccgtgattttggaattagttaggaaggcatgatgctatcatatcagaagaatttttgctcaacttttggtgagcactggaagaggatagagtggtgaagacaatggcatagctatactgtcatgggcatcatagggagcgagaggcaacagccaggctgggataaggctagagaataagattgagatgagctgggataaggctagagaataagattgagatgagagaattgtggagagttggttagcagtagataagtccaagaaagtaggagttagttgagagtttgtatgagaagttggttagctatagggctatttataagccgcatggcagcagggaataaatcaagcaagatcattaccaaacc

SEQ ID NO: 32310 - DNA, 1217 bp, Zea Mays
gccaccggggaagccgcggctcccccgtcatccacgacttcgggaccatggccacctcgcactggcgctggcagatgggtctgctgtcccgtcactctgacctgctcaagacggccgacgacgacagggcgctcctctagtgtgccggcgccgagtttgcgctcacggctaacttgctcatgccgttggacgcgcccggcacacggtgcctcatggagttatccttgtatcggaggcagggcatcattaagttccacaacccttccccctcctcgtagaattgcttgtccctgttgatcgaagtgagactgaatcagggggcccgcactcgcacctcccacgacctctttccgccatggggctccggattccaccgtttgtcaggcatgagtagcgagcgatggactggcggatcccggtagagacctgaaccccgcgccaccaccatcgccacagcaggctacatgtttgttctcttgttctagacgcaagcagcagatgcgaaataggcatccgtctcatggtggggaaattgttcacagttgaggatgtcgtaattggtggcctattcgtgatatctcttcttctagagagtatgcaagacaaggatttgctttgggtcttgttgttgtgctcaaatcgattcgggcaatcaaggaagctaaggacaatattttggggcgccagtttggatttggagcaattgtgaggtctgaccgtgtttcacaacagtggacatgtgacaaaagctcacccatcgttaaggaatttgtgagtgtggatgtagaactcggtggcaagaaacgatacttgacagagcctgcagttgccgtgattttggaattagttaggaagtggtggaagatttgtgcaggcatgatgctatcatatcagaagaatttttgctcaacttttggtgagcactggaagaggatagagtggtgaagacaatggcatagctatactgtcatgggcatcatagggagcgagaggcaacagccaggctgggataaggctagagaataagattgagatgagctgggataaggctagagaataagattgagatgagagaattgtggagagttggttagcagtagataagtccaagaaagtaggagttagttgagagtttgtatgagaagttggttagctatagggctatttataagccgcatggcagcagggaataaatcaagcaagatcattaccaaacc

SEQ ID NO: 32311 - DNA, 2420 bp, Zea Mays
cccgcagccgcaggtcgcgccgtcgcggccgccccggtggactattccacccgccccacgcagaccacacccagtggctaggctcgcacggaaccgagcgcatgcagtgggcaagtcgcaagcgagagagcgcgctcggttttcttttcttactacttcccctgcacgtgcacggacgccactgctaactagctaatctagcagtcagcataggagactggttggagagaagagaacctcagtgcgcgaaaaaagaactcaagcctcaaggagggtatacgccgccgcgccgagtcgtccacgtccgaggaggaacgcacgcgctcacgcggcgccgatggatggaagcggtgccggcaccggcagcgccacgctgctgcggaagcggccgctgtccgtgaacacagcgtcgtcgacggcggcggcgattgagctcgggagcaagcaggccgccggggttgtggcggccatcgaggaggagccggtgagcccgacggggcggctgttccgggagccgaacttccgctgccacatcgtgtccgtgttcggcctcggcgcgccggtggacctgccggcgctgcgggccggggtcgccgccacgctcgcgcgccaccctcgcttctgcagcgtccaggtggtaaatgagaaggacgccagaccgaagtggatacggacagcggtgaacgtggacgaccacatcatcgtccccgagctgaaccccgccaccacgtcggccgacccggacaaggcgctggaggactacgtgtcgtccctgtcgacgcggcccatggcgcactcccggccgctgtgggaggtccacgtcctggacttccccaccgccgacgccgcggcggcgctggcgctccgcgcgcaccactccgtcggcgacggcgtctccatgctctccctcttcatggcctgcacccgcagcgccgccgacccgggcgcgctcccttccctcccgccggcccggcgcgcgggccccgtccacgctgtgcggcggcccgcgggcgcgctggcggcgctggccgcgtggctcctgtccttgctcgtgctggcgtggcgcacggcggtggacgtggcatgcttcgtcgcgacggcggcgtcgctgctgggcgacgcgcccacggtgctcaagggcaaggagggcaccgagttccagcccaggcgcttcgtgaaccgcacgctcagcctggacgacatcaagctcgtcaagaatgcagtgggctgcactgtaaacgacgttcttcttgggataacctctagcgctctgtctcggtattattaccggagaacaggtgaaagcgacagtaagaggagcatcacggtgcggtcggctgttctcgtcaacttacgggcgacgcccggcatacatgcactggcgagcatgatggagtccggcaacgacaacaacaacggcgccgcgaggtggggaaacaagctgggctacatgctgatccccttccacctggccaagcacgacgaccccacggagtacgtccgtacggcggccaaggtgacgcgcaggaagaagagctccatggagtcggccttcaccttctggagcggggacatggttctcagactcttcggcatcaagctgctgcgctctgctacggcatgttcacgcacaccaccctgtccttctccagcatggtcgggccgactgagcaggtgctgttctgcggcaaccccatcgtctacatcgcgcccagcacctacggccacccacatgccctgactgtgcactaccagagctacataaactccgtgaagctagtcctgtcggtagacgaagcgcagtttccggatggccgtcagctcctggacgacttcgccgagtccctcaggatcatccgcgaggcagctccaggaaaaccaggggacacgcaggatgctgcttccacttgaacgtagactatagccatcaggcagaagctccaagcattcttgtcgtgctccagttgtgtctgatcatgtgtgtgtgtgcgcgcgcgtgagcgcaattgagatctcgttgctggccgtcacagactttttgggtgcgcggcttgatagcactccaacagagggttcaggacttcaggttacttaatctttcaacttggataatgcgacgtgaaggcaatgatctttggaaacaaatgattaataagtttgcattagaaaggtccacttgtagtagctgcagacatcgcttttgattttttctaagaaaatgaaccgcaaagcctcccaccgacgacaaaggaaacagggcatacaaagtggagcaaacacgaaggcacatcagtacacgatactctctgcctactagggtatagggctctactgcctaccgacacgcgtcgtgttgggttcattcaaccagaattttctcaaccgcgtcgagctgaatttgcatgtatcctcactttttt

SEQ ID NO: 32312 - DNA, 2437 bp, Zea Mays
cccgcagccgcaggtcgcgccgtcgcggccgccccggtggactattccacccgccccacgcagaccacacccagtggctaggctcgcacggaaccgagcgcatgcagtgggcaagtcgcaagcgagagagcgcgctcggttttcttttcttactacttcccctgcacgtgcacggacgccactgctaactagctaatctagcagtcagcataggagactggttggagagaagagaacctcagtgcgcgaaaaaagaactcaagcctcaaggagggtatacgccgccgcgccgagtcgtccacgtccgaggaggaacgcacgcgctcacgcggcgccgatggatggaagcggtgccggcaccggcagcgccacgctgctgcggaagcggccgctgtccgtgaacacagcgtcgtcgacggcggcggcgattgagctcgggagcaagcaggccgccggggttgtggcggccatcgaggaggagccggtgagcccgacggggcggctgttccgggagccgaacttccgctgccacatcgtgtccgtgttcggcctcggcgcgccggtggacctgccggcgctgcgggccggggtcgccgccacgctcgcgcgccaccctcgcttctgcagcgtccaggtggtaaatgagaaggacgccagaccgaagtggatacggacagcggtgaacgtggacgaccacatcatcgtccccgagctgaaccccgccaccacgtcggccgacccggacaaggcgctggaggactacgtgtcgtccctgtcgacgcggcccatggcgcactcccggccgctgtgggaggtccacgtcctggacttccccaccgccgacgccgcggcggcgctggcgctccgcgcgcaccactccgtcggcgacggcgtctccatgctctccctcttcatggcctgcacccgcagcgccgccgacccgggcgcgctcccttccctcccgccggcccggcgcgcgggccccgtccacgctgtgcggcggcccgcgggcgcgctggcggcgctggccgcgtggctcctgtccttgctcgtgctggcgtggcgcacggcggtggacgtggcatgcttcgtcgcgacggcggcgtcgctgctgggcgacgcgcccacggtgctcaagggcaaggagggcaccgagttccagcccaggcgcttcgtgaaccgcacgctcagcctggacgacatcaagctcgtcaagaatgcagtgggctgcactgtaaacgacgttcttcttgggataacctctagcgctctgtctcggtattattaccggagaacagccaaaatctgcaggtgaaagcgacagtaagaggagcatcacggtgcggtcggctgttctcgtcaacttacgggcgacgcccggcatacatgcactggcgagcatgatggagtccggcaacgacaacaacaacggcgccgcgaggtggggaaacaagctgggctacatgctgatccccttccacctggccaagcacgacgaccccacggagtacgtccgtacggcggccaaggtgacgcgcaggaagaagagctccatggagtcggccttcaccttctggagcggggacatggttctcagactcttcggcatcaaggcagctgctgcgctctgctacggcatgttcacgcacaccaccctgtccttctccagcatggtcgggccgactgagcaggtgctgttctgcggcaaccccatcgtctacatcgcgcccagcacctacggccacccacatgccctgactgtgcactaccagagctacataaactccgtgaagctagtcctgtcggtagacgaagcgcagtttccggatggccgtcagctcctggacgacttcgccgagtccctcaggatcatccgcgaggcagctccaggaaaaccaggggacacgcaggatgctgcttccacttgaacgtagactatagccatcaggcagaagctccaagcattcttgtcgtgctccagttgtgtctgatcatgtgtgtgtgtgcgcgcgcgtgagcgcaattgagatctcgttgctggccgtcacagactttttgggtgcgcggcttgatagcactccaacagagggttcaggacttcaggttacttaatctttcaacttggataatgcgacgtgaaggcaatgatctttggaaacaaatgattaataagtttgcattagaaaggtccacttgtagtagctgcagacatcgcttttgattttttctaagaaaatgaaccgcaaagcctcccaccgacgacaaaggaaacagggcatacaaagtggagcaaacacgaaggcacatcagtacacgatactctctgcctactagggtatagggctctactgcctaccgacacgcgtcgtgttgggttcattcaaccagaattttctcaaccgcgtcgagctgaatttgcatgtatcctcactttttt

SEQ ID NO: 32313 - DNA, 2422 bp, Zea Mays
cccgcagccgcaggtcgcgccgtcgcggccgccccggtggactattccacccgccccacgcagaccacacccagtggctaggctcgcacggaaccgagcgcatgcagtgggcaagtcgcaagcgagagagcgcgctcggttttcttttcttactacttcccctgcacgtgcacggacgccactgctaactagctaatctagcagtcagcataggagactggttggagagaagagaacctcagtgcgcgaaaaaagaactcaagcctcaaggagggtatacgccgccgcgccgagtcgtccacgtccgaggaggaacgcacgcgctcacgcggcgccgatggatggaagcggtgccggcaccggcagcgccacgctgctgcggaagcggccgctgtccgtgaacacagcgtcgtcgacggcggcggcgattgagctcgggagcaagcaggccgccggggttgtggcggccatcgaggaggagccggtgagcccgacggggcggctgttccgggagccgaacttccgctgccacatcgtgtccgtgttcggcctcggcgcgccggtggacctgccggcgctgcgggccggggtcgccgccacgctcgcgcgccaccctcgcttctgcagcgtccaggtggtaaatgagaaggacgccagaccgaagtggatacggacagcggtgaacgtggacgaccacatcatcgtccccgagctgaaccccgccaccacgtcggccgacccggacaaggcgctggaggactacgtgtcgtccctgtcgacgcggcccatggcgcactcccggccgctgtgggaggtccacgtcctggacttccccaccgccgacgccgcggcggcgctggcgctccgcgcgcaccactccgtcggcgacggcgtctccatgctctccctcttcatggcctgcacccgcagcgccgccgacccgggcgcgctcccttccctcccgccggcccggcgcgcgggccccgtccacgctgtgcggcggcccgcgggcgcgctggcggcgctggccgcgtggctcctgtccttgctcgtgctggcgtggcgcacggcggtggacgtggcatgcttcgtcgcgacggcggcgtcgctgctgggcgacgcgcccacggtgctcaagggcaaggagggcaccgagttccagcccaggcgcttcgtgaaccgcacgctcagcctggacgacatcaagctcgtcaagaatgcagtgggctgcactgtaaacgacgttcttcttgggataacctctagcgctctgtctcggtattattaccggagaacaggtgaaagcgacagtaagaggagcatcacggtgcggtcggctgttctcgtcaacttacgggcgacgcccggcatacgcactggcgagcatgatggagtccggcaacgacaacaacaacggcgccgcgaggtggggaaacaagctgggctacatgctgatccccttccacctggccaagcacgacgaccccacggagtacgtccgtacggcggccaaggtgacgcgcaggaagaagagctccatggagtcggccttcaccttctggagcggggacatggttctcagactcttcggcatcaaggcagctgctgcgctctgctacggcatgttcacgcacaccaccctgtccttctccagcatggtcgggccgactgagcaggtgctgttctgcggcaaccccatcgtctacatcgcgcccagcacctacggccacccacatgccctgactgtgcactaccagagctacataaactccgtgaagctagtcctgtcggtagacgaagcgcagtttccggatggccgtcagctcctggacgacttcgccgagtccctcaggatcatccgcgaggcagctccaggaaaaccaggggacacgcaggatgctgcttccacttgaacgtagactatagccatcaggcagaagctccaagcattcttgtcgtgctccagttgtgtctgatcatgtgtgtgtgtgcgcgcgcgtgagcgcaattgagatctcgttgctggccgtcacagactttttgggtgcgcggcttgatagcactccaacagagggttcaggacttcaggttacttaatctttcaacttggataatgcgacgtgaaggcaatgatctttggaaacaaatgattaataagtttgcattagaaaggtccacttgtagtagctgcagacatcgcttttgattttttctaagaaaatgaaccgcaaagcctcccaccgacgacaaaggaaacagggcatacaaagtggagcaaacacgaaggcacatcagtacacgatactctctgcctactagggtatagggctctactgcctaccgacacgcgtcgtgttgggttcattcaaccagaattttctcaaccgcgtcgagctgaatttgcatgtatcctcactttttt

SEQ ID NO: 32314 - DNA, 1242 bp, Zea Mays
gtagttggttccgtagttgagtcgtggtcgcgttctttgggtgggttcgtgccttggcgtcgctgtattgttatttatttctctcgaactcggccggtctcctttggttttggtgtgagctgtaccgccacatctttcagcacctgaccgtcgaggatcgatcaggcgggcagaagcggtcgtcgccggacaagacgcataggtccaccatggatggcgtctaccaccatcaccaccaccaagagtcgccgttgacgggcaacggcgtcgccaccgccggtgagaagctaggcgtggagcggttcgagctgccgctgatctacatctcgctgtcgcggaaggagaaggaagacgatttccttgcgatgaagggcaccaagctgccccagcggcccaagaaaagggctaagaacgtggacaagaccctccaatttgtcttcccgggtatgtggttgtccgatttgacgaggggacggtacgaggtgcgggagaagaaatgcgtgaagaagaagcgaagagggctgaaagggatggagagcatggacagcgactcggagtaataaggtggaggcgcggcgcagccatcttccatgggggtgggagtcgaggaagaaggggccctagagaaggaggaaaggaggagacgttgagggcaagagtgagcggtcgcgcctgctcaccttgagccgccgccgcgctggaagcgtcggaggacggcggtgcttgccacacacagggctgtgtttctggcggtcgtgaggtttttttgttccttgatgctgagctgcgtctccgcggccgctgtttgcagcatgtaaccctgaaactctgcgatccgtctatctctgccttcttcattttttctcatgcgctttcgagccacctgaaacgagacggttggattcattcgattgcaccggtgacggtaaggtgaaaacgacacaccaccggtggctagttgttggactgggcttgggttcctctgaagggaatgggccctggctcttttagtcgcattgcgcaagttgtgaagcccgggaaatgttagaatatttcaagtgcgccttctgactatcttgccctacttgctgcctccggctagataaataaaaaaaacggcaaacgcttgtcgctgactcgcagtggctgagatctcgatgagcacgcacgactagatccagccagagaggcatgtgggggtttttattttaggagcttgacaatgatctggcggatgccaac

SEQ ID NO: 32315 - DNA, 1138 bp, Zea Mays
tgggatgttgtcaatctgatgaatgaattgcatattttaaggaccgtcgaggatcgatcaggcgggcagaagcggtcgtcgccggacaagacgcataggtccaccatggatggcgtctaccaccatcaccaccaccaagagtcgccgttgacgggcaacggcgtcgccaccgccggtgagaagctaggcgtggagcggttcgagctgccgctgatctacatctcgctgtcgcggaaggagaaggaagacgatttccttgcgatgaagggcaccaagctgccccagcggcccaagaaaagggctaagaacgtggacaagaccctccaatttgtcttcccgggtatgtggttgtccgatttgacgaggggacggtacgaggtgcgggagaagaaatgcgtgaagaagaagcgaagagggctgaaagggatggagagcatggacagcgactcggagtaataaggtggaggcgcggcgcagccatcttccatgggggtgggagtcgaggaagaaggggccctagagaaggaggaaaggaggagacgttgagggcaagagtgagcggtcgcgcctgctcaccttgagccgccgccgcgctggaagcgtcggaggacggcggtgcttgccacacacagggctgtgtttctggcggtcgtgaggtttttttgttccttgatgctgagctgcgtctccgcggccgctgtttgcagcatgtaaccctgaaactctgcgatccgtctatctctgccttcttcattttttctcatgcgctttcgagccacctgaaacgagacggttggattcattcgattgcaccggtgacggtaaggtgaaaacgacacaccaccggtggctagttgttggactgggcttgggttcctctgaagggaatgggccctggctcttttagtcgcattgcgcaagttgtgaagcccgggaaatgttagaatatttcaagtgcgccttctgactatcttgccctacttgctgcctccggctagataaataaaaaaaacggcaaacgcttgtcgctgactcgcagtggctgagatctcgatgagcacgcacgactagatccagccagagaggcatgtgggggtttttattttaggagcttgacaatgatctggcggatgccaac

SEQ ID NO: 32316 - DNA, 1272 bp, Zea Mays
ctttactgcactagaagtagagtagatgggttataaatatacaaatctcagcttcctatccattctttctatttagagtcctaggcaccacatagtatatagcagcagtgctttgctcagtccactttgttgaggctgggttgagagtgtaggagtaaagcctcaagtctctttggaccgtcgaggatcgatcaggcgggcagaagcggtcgtcgccggacaagacgcataggtccaccatggatggcgtctaccaccatcaccaccaccaagagtcgccgttgacgggcaacggcgtcgccaccgccggtgagaagctaggcgtggagcggttcgagctgccgctgatctacatctcgctgtcgcggaaggagaaggaagacgatttccttgcgatgaagggcaccaagctgccccagcggcccaagaaaagggctaagaacgtggacaagaccctccaatttgtcttcccgggtatgtggttgtccgatttgacgaggggacggtacgaggtgcgggagaagaaatgcgtgaagaagaagcgaagagggctgaaagggatggagagcatggacagcgactcggagtaataaggtggaggcgcggcgcagccatcttccatgggggtgggagtcgaggaagaaggggccctagagaaggaggaaaggaggagacgttgagggcaagagtgagcggtcgcgcctgctcaccttgagccgccgccgcgctggaagcgtcggaggacggcggtgcttgccacacacagggctgtgtttctggcggtcgtgaggtttttttgttccttgatgctgagctgcgtctccgcggccgctgtttgcagcatgtaaccctgaaactctgcgatccgtctatctctgccttcttcattttttctcatgcgctttcgagccacctgaaacgagacggttggattcattcgattgcaccggtgacggtaaggtgaaaacgacacaccaccggtggctagttgttggactgggcttgggttcctctgaagggaatgggccctggctcttttagtcgcattgcgcaagttgtgaagcccgggaaatgttagaatatttcaagtgcgccttctgactatcttgccctacttgctgcctccggctagataaataaaaaaaacggcaaacgcttgtcgctgactcgcagtggctgagatctcgatgagcacgcacgactagatccagccagagaggcatgtgggggtttttattttaggagcttgacaatgatctggcggatgccaac

SEQ ID NO: 32317 - DNA, 1228 bp, Zea Mays
aagaagggtcacagaaggacatctcatcaattgcggcgtgctcgtatgggtcccacacgtcagccggctgttggggattgtcgagctggagccactgacaagtgggtccccgatggacacgtacgtatctgtcgctggcttaggttaggaccacatgattgtggcccggatagagctcatcgagggagaaaaaaaagaaaggagagaaaaaaaaaagaaaagaaaagaaaagaaaagaagaaaagggcggtgcgctcccgtctttgtatcacgtcgctggttccccccaccccctgtttattctgattggcaaattgcaacggccaatttgtcaacagcaaggaccagcgcgaatcttgtaacgtgaaaccctagttgttttgttaacctatacgcaatggctgtgtggctggttcgtgcctgggtttggtactgcatgccccgtgtggtcagccgggctctcctttaccactcacgcacacaaaaaagataatgaagcgaagagggctgaaagggatggagagcatggacagcgactcggagtaataaggtggaggcgcggcgcagccatcttccatgggggtgggagtcgaggaagaaggggccctagagaaggaggaaaggaggagacgttgagggcaagagtgagcggtcgcgcctgctcaccttgagccgccgccgcgctggaagcgtcggaggacggcggtgcttgccacacacagggctgtgtttctggcggtcgtgaggtttttttgttccttgatgctgagctgcgtctccgcggccgctgtttgcagcatgtaaccctgaaactctgcgatccgtctatctctgccttcttcattttttctcatgcgctttcgagccacctgaaacgagacggttggattcattcgattgcaccggtgacggtaaggtgaaaacgacacaccaccggtggctagttgttggactgggcttgggttcctctgaagggaatgggccctggctcttttagtcgcattgcgcaagttgtgaagcccgggaaatgttagaatatttcaagtgcgccttctgactatcttgccctacttgctgcctccggctagataaataaaaaaaacggcaaacgcttgtcgctgactcgcagtggctgagatctcgatgagcacgcacgactagatccagccagagaggcatgtgggggtttttattttaggagcttgacaatgatctggcggatgccaac

SEQ ID NO: 32318 - DNA, 1619 bp, Zea Mays
agcgtccatacacaacggaataaaaccactaattgtctgacgaaagcgatagcatgaccatcaatcaggcagtgagattgaaagcgaaggaaaataggaaaagaggttttgcttcaaagaaacctcttcgacccgcgcgctcccacccaccagtgaagaaaaagagaagcccacacgcgacgcgaggttattgagcggtagggaaggaggagcaagaaggccggccaagcggaggcatcagcatcacatcgagcatgctggagctcctgctcgtggggtgcagcggcgtggtggtgctcctccacggcgccagcctcttcctccgcgcgctcttcgccccgcgccacgccgtcgccaggcccatcagcttcctcgggttcgtggcctgatcgttcgcaatggccatcgggcgcggactgcggagatgatcgtttcgagtagctgccaccgaagatccatcgactgatgcagctgtgtgtgtgtgcccacaagttctcgttcgtttgtgtgtcagtgtgtgtggcatagccgtcggttcagacgttggcaccggccagggaaggggagcgccgatgttgttcagtgatataccaaacccacggcagggagtaaaatacaatttcagtccttaaacttatcggactatattattccggttcataaacttgtaaagtatatcttttaaagccttaatcgttattcaggtctatatgaggttcaaatcggattgaaacagctccgcctctgctcttccatgttcgtcgtcgggcaggtggtgatgggcctgccgcccttcttccacatctacgcatcaccggcatctgctccgccacgctgcggcacaagagatcccctcagctccaggtggaggagacgtacgggctcacggagcacagctgcatcacgctgacacacgccggcggcggcgaggacgtggggtcgacggtgcaggtcgccaagaagaagccggtcggaatcatcctgcctaacctgacctggaggtgaagttcgtggacctcgacacggggcggtcgctgcccaagaacacgccgggggagatctgcgtgcagagccaggccgtgacgcacggctacttacactacaggaggaaggaggagacggagcgcaccatcgacgccgcggggtggctccacaccagcgacatcggatacatatcttcgtaaatggttaaagtcctaattatttttaattcaaaaataaatagaattagggcacgatattaatccgattcgattattacattttatggggtaaattttatagtatattctcaccgtaccacgtacatggacgatgacaacatgttcatcgtggaccaaatcaaggagctcatcaattcaagggcttccaggtctcactcgtccgtcgaggacgccatcgtcttcggataagcgaccgaccacgaccggaccgccgacgaggtcccgacatcgttcggggtgcggtgacgaggaagaagagaaataccctcgctccattctagacataacagagaccgaacagtaattaaggttttaaaaaataagctttaaaagtttatggacaagaatgatatagttccataaatttaagtaccaaaattgtattttactcacgag

SEQ ID NO: 32319 - DNA, 1199 bp, Zea Mays
atcccagacttcaatgtgacagatgaacttggacagccgctacagacaccttgcattttaagcttaattgttcctatttctttgaaaggatagtgttctagtgaggcaaggaaaccaaaatcttcatatcagcaacaagaccacacacaacgggaggaagggaaagacacacagatcgaatattcaatgtcaccactttcatcttgaatagttggtcgaatgagtctccaacaattttttttatcatggcaactatttttgaatcatcctagggggaaacagtaaagaaatattgtgggcactggcttggaaacagtgtgctggtcacaatttctacaaaagtttgtaattgcctcgacctggtgttgatgggtgcgcaccggattttgtctacaactgcagcagagggtctcagaaagaacacatgtgacaccaagcatgctgactggtccctacacaaagtagtcttgccacacaatagtgatgaattcgcatgcaagggagtcatcctctctttgcttcccaacatcgccgttcccttgatatgccagtatactttttgcgggagtggtgcaaacaggtctgcagtaatcaacagaaaagataatgagaataatttggagaatatacttgctctaccaagctctaccaaatccattccacggagctaggggtcctctattggggagcatgtagaatgatcatcgttgacccaacaatgcagagatcatagcccagcacgcccatccgatgcaacttgcaacttctcattcagtgtgaaatgtgctagaacagcactagtggagcatgttgtcgccccagggaacgccgacacgcctgggtcgtcgcccatcaacagcgccaacagctccgattgcagccgctgcaccaccgactgaccattcgcgcccttcccggcccccgctgatgccgactttggtcctggtgccgccgtagatgcagcagagacattctatgtccctagtgaggacacggggagcggggggtgacggcgaagtttcggggcgcaggggcagcggtcgcggcgcgggcgagatttccaggggaatcgcgggtggggcggcatggacgaactcggtgaatgtctgtcacgacgtggggatcagcgacaatctcgggtgtggggtttgtttcagaagccactgactcgtgacaggggattggcgacaatcgcggag

SEQ ID NO: 32320 - DNA, 3984 bp, Zea Mays
atcaaattagaatcaattggtggtgttgtactagttattttgaaatctctactactccttgagatggtaaggagggcgtccacaccctcaccatggctccgccctcctcccccgctaatcaccacgccgcgcacgcgccgcgcgaggcccgtcttcgttcccccaccgctaatctcgccgcggcatccatggcgccgccctcgccctccccccacatgtccacgccggcgccccctccctcgcgccccacctcaatctcctccattgcgcgcccgagaacgcgcaaatcccccattcccgcgcctctccctcgcgcctcgatggaatcgccacggcatccatggtagggtcctcaggatccacctccaccgcgtcgccacagtccgcaggggccgagggtgccccgacggtggggacctagactgtggtcaggtgcacgcgtattcaagcaggcgctcttgcttttcgtccacaacaagttctccatgtgccctgggcacgcgacacatgttcggggtggtgggcattaccgtcacctccctcacgtcccgtgccgccgcggccgaggtctgcttcctcgccttccgcaacgagcagtccgcggggtacgccgccgcctacgacttcctgacgggctccccgggcgccctcctcatcgtctccggcccaagatacatccacgggctcgccggcctctcccacgccaccgccaacgcctggtcgctcctcatgagctccggatcctgcgaccaggctgacgccggcaggggcgacttccaggagctcgaccagatcgctgccaccaagcccttcgccaagctcgccgtcaaggcaacaaccatcctcaacgtatctaggtcttccctgccaacaagaacaaatggcacgcccgccgtgccgatttgaggtggttttggaggtgaggaggggtacgatttcggtgaccctaggccttgcgggtccggtggatggaagcggtggagctgccattaccagctaaggtggagttcaggaagccaaggtgagaccgctgctgaggtaatggagcgcatccagagaaaacttagagttcatgatgatgaattgtccaaggtcgatttgctatccaacaattttgcattatttctggctacctattggtcttgctgccacaccggagttgccatcttagcttttgtcgtcctgtccccttcctatcagggcaatatgacttgctccccttcctgtcaagctacatgcttcgaccagctgaggcactgaaatgaaactaaattattgttgcaaacctctctgccatcttgtgcgtgcactatgcaaaatcacaaggcgggcttagtttctctaacactgataatgcttatttgatcagttgaagcttgcattcatttccatgaacaaacaagagtacctccaagacactaacgttgtatcaacatgtttttaggcaagtgatttctttataatgcttacatgcataccttctcttgttcactatgttcatacacgatgctttgctttttactatacgagagatgtatatggtgcttgggaacaataccttggcttggagcacactgatacaacattgaaacaataccttggcttgggatcaataccggcaaggacccaacaagcccaagagggcacccaacgcttacttcgtgttcatgtgagatgcgagtttgtccccacctctttttaaattttttatggatgcttgttggttcgatctatttttggatgcattactatctatattattctattacgaagcaaaagtggcgccttcgtgttaccatgcccctaccgggtgtgggtacgagtgaagattttgacccgtgggtgcaacccgcacccgacccaaagttttgcgggtgtgggtttctatttcaacccgtgggtgacccgcacctgacccaaaatatggttcattctttattttgcggaaaaataagtaagatacaatagtaattattttgaataagtaacttggctaatgattcatgaaatgttttgttgttgctcaatgtgaaaaggtttaaaatacgtacatataaattgactattattgctatttaattgattattgctcaattattgtttaaaagtgtacacttagtaaaacccgcgggtgacccgaaacccgacgggttcgggcgcgcgtttggaatggcactcgtgggtgccatcatgggtgggtttcggtagtcttcacgggtgtgcatgccccctgcccgcggatgcccaccactgcagtaccctgctgctgtgtatagcacacaaatgcattctacaagatcacagatagtcaataacataaaaaaaccagtgtgcgatgtactaactatggtcaactctttctgcatttagttttgtacattaacaacattaatgtggtttatgtcaagtacatttcttaattaactaccttcatctaacacaatattcagggaataggtatatatgaatgttcgacagttcctagaatgctagcattgtagttgttgatgctttggaaacaaaaggcagcatcaaactactaaatactaataatgagagttgtttaccagtaaaattggaaatttataatctgaggcatagtaataagtttgttacacataattaccatctcttttgttttctgtagaaaagctcaaaagcattataaaagctaagtaatgtactccgatgttgatcctgttttgtcgcctatttcaagagactgacattccatagaagagggcaatggaggacgacacatttattttttgttctttgcactatctagcagactatcatcaatgctctaaaatgcagaggttagctggacaatcattttgggaggatgagaaaggaatatcatatgaatcaaatggtctataatgttctaactgatggcctagcaaggattctaatgcttagcttctgtttccatatcaagtttatgtcataattacttttttaatgtgttggatttattttcgaacttagggcgtgttcatttatgtgtcgcattcatggttcaaaattgatttgggtttggtgttcatttatcttgcatgtgttgcaatgaaggaggaatgggtggagggacgagcaagatgtcaatgttctattgaaacaaactgccttaattattaggctatcactactgaaacaaactacctctgtcgtcaacctactaacttccatattcttcacactcagctttgcaaaatttacttgactggctttttttggcttaaaatataactcagggagacgtgattttgggacgatcaaactgttgggattgcgcttggacattccgggcagcgtgcacccaagattgaccaagctgattcgacggtgctaggacaaagatcctgatgcgtgtctgacttttgcagagattactatagaactccaagatagtctacaccatatcgaggcacccaagggagccagccgtcgttcttgagcaaagatgtagaagaaataagaggaagaaaaagaataagaatacatacgtagggcaaggtttcctacttttttgtgtgttacacaagttgcagtatgagtgtttgtggtgtatgtcatagttataaatatttcaaggccaaggaatacctagctacgacaaagatggggatggctaggaaagaaaaccaattgtgggacaatgataattgatatcaatgtcagccccttatatgctacacctgcaacctgtaatcataccgtcaactgcacctgacatccgtgcatcagaagtttttaattctgatgatttagattatgtctataaatctgttgaggatggcatggaacatatttttacttcaacaacacaactccaatttggtcatgatttgtgcttgaatgaagaagtcaagatttccttttgactcagcctgtttttctgaattactggtttgttacaaaattgtagatataatagggaactaatttgtgttgttttttatcagagatgcaggagctcta

SEQ ID NO: 32321 - DNA, 2695 bp, Zea Mays
ctagttattttgaaatctctactactccttgagatggtaaggagggcgtccacaccctcaccatggctccgccctcctcccccgctaatcaccacgccgcgcacgcgccgcgcgaggcccgtcttcgttcccccaccgctaatctcgccgcggcatccatggcgccgccctcgccctccccccacatgtccacgccggcgccccctccctcgcgccccacctcaatctcctccattgcgcgcccgagaacgcgcaaatcccccattcccgcgcctctccctcgcgcctcgatggaatcgccacggcatccatggtagggtcctcaggatccacctccaccgcgtcgccacagtccgcaggggccgagggtgccccgacggtggggacctagactgtggtcaggtgcacgcgtattcaagcaggcgctcttgcttttcgtccacaacaagttctccatgtgccctgggcacgcgacacatgttcggggtggtgggcattaccgtcacctccctcacgtcccgtgccgccgcggccgaggtctgcttcctcgccttccgcaacgagcagtccgcggggtacgccgccgcctacgacttcctgacgggctccccgggcgccctcctcatcgtctccggcccaagatacatccacgggctcgccggcctctcccacgccaccgccaacgcctggtcgctcctcatgagctccggatcctgcgaccaggctgacgccggcaggggcgacttccaggagctcgaccagatcgctgccaccaagcccttcgccaagctcgccgtcaaggcaacaaccatcctcaacgtatctaggtcttccctgccaacaagaacaaatggcacgcccgccgtgccgatttgaggtggttttggaggtgaggaggggtacgatttcggtgaccctaggccttgcgggtccggtggatggaagcggtggagctgccattaccagctaaggtggagttcaggaagccaaggtaacgacagcaaaaatatctcttctggcgtgtaaccgtgtattgtgaagttgccataggttcagcgagaaacactgaagaacttactgttctggctatggttgctgaaaagtttggtcatcagcagttggatttgttaccagttggtgtatctcttgtgcttcgccatatgagtctactctctattctatgttttgatatggtgcagttgaatttttcttgagatatggtgcagttggtgtatctcttgtgcttcgcaattgcatgataaatagcatgttcaacggatatcattttaatttccaagaaatactttgtaagttcctcaacatatatactgcacagagaactaagccccagcaactgaataatcatctattacatgttaaaaaatatgattctcgtgatctctccgtttatatattatagaattaagatgtatacaattatactgaccgttctatctattctattgaaaaatacaattatatttacgaagattcatctgtgatacttatgtatagttgtcttgcataacattgcatctgtcaattttggaacaaatcccagaggaagagaataatcttggcccacatgatcgattggttcatgtttaccatttcatgaaagaccctaaccagaatcatcaaattcagaatttgagagatccctttgtatggttatttgggaaggtgagaccgctgctgaggtaatggagcgcatccagagaaaacttagagttcatgatgatgaattgtccaagttgaagcttgcattcatttccatgaacaaacaagagtacctccaagacactaacgttgtatcaacatgtttttagagatgtatatggtgcttgggaacaataccttggcttggagcacactgatacaacattgaaacaataccttggcttgggatcaataccggcaaggacccaacaagcccaagagggcacccaacgcttacttcgtgttcatggagacgtgattttgggacgatcaaactgttgggattgcgcttggacattccgggcagcgtgcacccaagattgaccaagctgattcgacggtgctaggacaaagatcctgatgcgtgtctgacttttgcagagattactatagaactccaagatagtctacaccatatcgaggcacccaagggagccagccgtcgttcttgagcaaagatgtagaagaaataagaggaagaaaaagaataagaatacatacgtagggcaaggtttcctacttttttgtgtgttacacaagttgcagtatgagtgtttgtggtgtatgtcatagttataaatatttcaaggccaaggaatacctagctacgacaaagatggggatggctaggaaagaaaaccaattgtgggacaatgataattgatatcaatgtcagccccttatatgctacacctgcaacctgtaatcataccgtcaactgcacctgacatccgtgcatcagaagtttttaattctgatgatttagattatgtctataaatctgttgaggatggcatggaacatatttttacttcaacaacacaactccaatttggtcatgatttgtgcttgaatgaagaagtcaagatttccttttgactcagcctgtttttctgaattactggtttgttacaaaattgtagatataatagggaactaatttgtgttgttttttatcagagatgcaggagctcta

SEQ ID NO: 32322 - DNA, 2861 bp, Zea Mays
ggcgtccacaccctcaccatggctccgccctcctcccccgctaatcaccacgccgcgcacgcgccgcgcgaggcccgtcttcgttcccccaccgctaatctcgccgcggcatccatggcgccgccctcgccctccccccacatgtccacgccggcgccccctccctcgcgccccacctcaatctcctccattgcgcgcccgagaacgcgcaaatcccccattcccgcgcctctccctcgcgcctcgatggaatcgccacggcatccatggtagggtcctcaggatccacctccaccgcgtcgccacagtccgcaggggccgagggtgccccgacggtggggacctagactgtggtcaggtgcacgcgtattcaagcaggcgctcttgcttttcgtccacaacaagttctccatgtgccctgggcacgcgacacatgttcggggtggtgggcattaccgtcacctccctcacgtcccgtgccgccgcggccgaggtctgcttcctcgccttccgcaacgagcagtccgcggggtacgccgccgcctacgacttcctgacgggctccccgggcgccctcctcatcgtctccggcccaagatacatccacgggctcgccggcctctcccacgccaccgccaacgcctggtcgctcctcatgagctccggatcctgcgaccaggctgacgccggcaggggcgacttccaggagctcgaccagatcgctgccaccaagcccttcgccaagctcgccgtcaaggcaacaaccatcctcaacgtatctaggtcttccctgccaacaagaacaaatggcacgcccgccgtgccgatttgaggtggttttggaggtgaggaggggtacgatttcggtgaccctaggccttgcgggtccggtggatggaagcggtggagctgccattaccagctaaggtggagttcaggaagccaaggtaacgacagcaaaaatatctcttctggcgtgtaaccgtgtattgtgaagttgccataggttcagcgagaaacactgaagaacttactgttctggctatggttgctgaaaagtttggtcatcagcagttggatttgttaccagttggtgtatctcttgtgcttcgccatatgagtctactctctattctatgttttgatatggtgcagttgaatttttcttgagatatggtgcagttggtgtatctcttgtgcttcgcaattgcatgataaatagcatgttcaacggatatcattttaatttccaagaaatactttgtaagttcctcaacatatatactgcacagagaactaagccccagcaactgaataatcatctattacatgttaaaaaatatgattctcgtgatctctccgtttatatattatagaattaagatgtatacaattatactgaccgttctatctattctattgaaaaatacaattatatttacgaagattcatctgtgatacttatgtatagttgtcttgcataacattgcatctgtcaattttggaacaaatcccagaggaagagaataatcttggcccacatgatcgattggttcatgtttaccatttcatgaaagaccctaaccagaatcatcaaattcagaatttgagagatccctttgtatggttatttgggaaggtgagaccgctgctgaggtaatggagcgcatccagagaaaacttagagttcatgatgatgaattgtccaaggtcgatttgctatccaacaattttgcattatttctggctacctattggtcttgctgccacaccggagttgccatcttagcttttgtcgtcctgtccccttcctatcagggcaatatgacttgctccccttcctgtcaagctacatgcttcgaccagctgagttgaagcttgcattcatttccatgaacaaacaagagtacctccaagacactaacgttgtatcaacatgtttttagatgtatatggtgcttgggaacaataccttggcttggagcacactgatacaacattgaaacaataccttggcttgggatcaataccggcaaggacccaacaagcccaagagggcacccaacgcttacttcgtgttcatggattgcgcttggacattccgggcagcgtgcacccaagattgaccaagctgattcgacggtgctaggacaaagatcctgatgcgtgtctgacttttgcagagattactatagaactccaagatagtctacaccatatcgaggcacccaagggagccagccgtcgttcttgagcaaagatgtagaagaaataagaggaagaaaaagaataagaatacatacgtagggcaaggtttcctacttttttgtgtgttacacaagttgcagtatgagtgtttgtggtgtatgtcatagttataaatatttcaaggccaagtaagtataaaaaccgaccttagctcagttggtagagcggaggactgtagtggattccccatgtcatttgttcttgttggcagggaatacctagctacgacaaagatggggatggctaggaaagaaaaccaattgtgggacaatgataattgatatcaatgtcagccccttatatgctacacctgcaacctgtaatcataccgtcaactgcacctgacatccgtgcatcagaagtttttaattctgatgatttagattatgtctataaatctgttgaggatggcatggaacatatttttacttcaacaacacaactccaatttggtcatgatttgtgcttgaatgaagaagtcaagatttccttttgactcagcctgtttttctgaattactggtttgttacaaaattgtagatataatagggaactaatttgtgttgttttttatcagagatgcaggagctcta

SEQ ID NO: 32323 - DNA, 2289 bp, Zea Mays
ggcgtccacaccctcaccatggctccgccctcctcccccgctaatcaccacgccgcgcacgcgccgcgcgaggcccgtcttcgttcccccaccgctaatctcgccgcggcatccatggcgccgccctcgccctccccccacatgtccacgccggcgccccctccctcgcgccccacctcaatctcctccattgcgcgcccgagaacgcgcaaatcccccattcccgcgcctctccctcgcgcctcgatggaatcgccacggcatccatggtagggtcctcaggatccacctccaccgcgtcgccacagtccgcaggggccgagggtgccccgacggtggggacctagactgtggtcaggtgcacgcgtattcaagcaggcgctcttgcttttcgtccacaacaagttctccatgtgccctgggcacgcgacacatgttcggggtggtgggcattaccgtcacctccctcacgtcccgtgccgccgcggccgaggtctgcttcctcgccttccgcaacgagcagtccgcggggtacgccgccgcctacgacttcctgacgggctccccgggcgccctcctcatcgtctccggcccaagatacatccacgggctcgccggcctctcccacgccaccgccaacgcctggtcgctcctcatgagctccggatcctgcgaccaggctgacgccggcaggggcgacttccaggagctcgaccagatcgctgccaccaagcccttcgccaagctcgccgtcaaggcaacaaccatcctcaacgtatctaggtcttccctgccaacaagaacaaatggcacgcccgccgtgccgatttgaggtggttttggaggtgaggaggggtacgatttcggtgaccctaggccttgcgggtccggtggatggaagcggtggagctgccattaccagctaaggtggagttcaggaagccaaggtgagaccgctgctgaggtaatggagcgcatccagagaaaacttagagttcatgatgatgaattgtccaaggtcgatttgctatccaacaattttgcattatttctggctacctattggtcttgctgccacaccggagttgccatcttagcttttgtcgtcctgtccccttcctatcagggcaatatgacttgctccccttcctgtcaagctacatgcttcgaccagctgagttgaagcttgcattcatttccatgaacaaacaagagtacctccaagacactaacgttgtatcaacatgtttttaggcaagtgatttctttataatgcttacatgcataccttctcttgttcactatgttcatacacgatgctttgctttttactatacgagagatgtatatggtgcttgggaacaataccttggcttggagcacactgatacaacattgaaacaataccttggcttgggatcaataccggcaaggacccaacaagcccaagagggcacccaacgcttacttcgtgttcatggagacgtgattttgggacgatcaaactgttgggattgcgcttggacattccgggcagcgtgcacccaagattgaccaagctgattcgacggtgctaggacaaagatcctgatgcgtgtctgacttttgcagagattactatagaactccaagatagtctacaccatatcgaggcacccaagggagccagccgtcgttcttgagcaaagatgtagaagaaataagaggaagaaaaagaataagaatacatacgtagggcaaggtttcctacttttttgtgtgttacacaagttgcagtatgagtgtttgtggtgtatgtcatagttataaatatttcaaggccaagtaagtataaaaaccgaccttagctcagttggtagagcggaggactgtagtggattccccatgtcatttgttcttgttggcagggaatacctagctacgacaaagatggggatggctaggaaagaaaaccaattgtgggacaatgataattgatatcaatgtcagccccttatatgctacacctgcaacctgtaatcataccgtcaactgcacctgacatccgtgcatcagaagtttttaattctgatgatttagattatgtctataaatctgttgaggatggcatggaacatatttttacttcaacaacacaactccaatttggtcatgatttgtgcttgaatgaagaagtcaagatttccttttgactcagcctgtttttctgaattactggtttgttacaaaattgtagatataatagggaactaatttgtgttgttttttatcagagatgcaggagctcta

SEQ ID NO: 32324 - DNA, 2611 bp, Zea Mays
cacaccctcaccatggctccgccctcctcccccgctaatcaccacgccgcgcacgcgccgcgcgaggcccgtcttcgttcccccaccgctaatctcgccgcggcatccatggcgccgccctcgccctccccccacatgtccacgccggcgccccctccctcgcgccccacctcaatctcctccattgcgcgcccgagaacgcgcaaatcccccattcccgcgcctctccctcgcgcctcgatggaatcgccacggcatccatggtagggtcctcaggatccacctccaccgcgtcgccacagtccgcaggggccgagggtgccccgacggtggggacctagactgtggtcaggtgcacgcgtattcaagcaggcgctcttgcttttcgtccacaacaagttctccatgtgccctgggcacgcgacacatgttcggggtggtgggcattaccgtcacctccctcacgtcccgtgccgccgcggccgaggtctgcttcctcgccttccgcaacgagcagtccgcggggtacgccgccgcctacgacttcctgacgggctccccgggcgccctcctcatcgtctccggcccaagatacatccacgggctcgccggcctctcccacgccaccgccaacgcctggtcgctcctcatgagctccggatcctgcgaccaggctgacgccggcaggggcgacttccaggagctcgaccagatcgctgccaccaagcccttcgccaagctcgccgtcaaggcaacaaccatcctcaacgtatctaggtcttccctgccaacaagaacaaatggcacgcccgccgtgccgatttgaggtggttttggaggtgaggaggggtacgatttcggtgaccctaggccttgcgggtccggtggatggaagcggtggagctgccattaccagctaaggtggagttcaggaagccaaggtaacgacagcaaaaatatctcttctggcgtgtaaccgtgtattgtgaagttgccataggttcagcgagaaacactgaagaacttactgttctggctatggttgctgaaaagtttggtcatcagcagttggatttgttaccagttggtgtatctcttgtgcttcgccatatgagtctactctctattctatgttttgatatggtgcagttgaatttttcttgagatatggtgcagttggtgtatctcttgtgcttcgcaattgcatgataaatagcatgttcaacggatatcattttaatttccaagaaatactttgtaagttcctcaacatatatactgcacagagaactaagccccagcaactgaataatcatctattacatgttaaaaaatatgattctcgtgatctctccgtttatatattatagaattaagatgtatacaattatactgaccgttctatctattctattgaaaaatacaattatatttacgaagattcatctgtgatacttatgtatagttgtcttgcataacattgcatctgtcaattttggaacaaatcccagaggaagagaataatcttggcccacatgatcgattggttcatgtttaccatttcatgaaagaccctaaccagaatcatcaaattcagaatttgagagatccctttgtatggttatttgggaaggtgagaccgctgctgaggtaatggagcgcatccagagaaaacttagagttcatgatgatgaattgtccaagttgaagcttgcattcatttccatgaacaaacaagagtacctccaagacactaacgttgtatcaacatgtttttagatgtatatggtgcttgggaacaataccttggcttggagcacactgatacaacattgaaacaataccttggcttgggatcaataccggcaaggacccaacaagcccaagagggcacccaacgcttacttcgtgttcatggattgcgcttggacattccgggcagcgtgcacccaagattgaccaagctgattcgacggtgctaggacaaagatcctgatgcgtgtctgacttttgcagagattactatagaactccaagatagtctacaccatatcgaggcacccaagggagccagccgtcgttcttgagcaaagatgtagaagaaataagaggaagaaaaagaataagaatacatacgtagggcaaggtttcctacttttttgtgtgttacacaagttgcagtatgagtgtttgtggtgtatgtcatagttataaatatttcaaggccaaggaatacctagctacgacaaagatggggatggctaggaaagaaaaccaattgtgggacaatgataattgatatcaatgtcagccccttatatgctacacctgcaacctgtaatcataccgtcaactgcacctgacatccgtgcatcagaagtttttaattctgatgatttagattatgtctataaatctgttgaggatggcatggaacatatttttacttcaacaacacaactccaatttggtcatgatttgtgcttgaatgaagaagtcaagatttccttttgactcagcctgtttttctgaattactggtttgttacaaaattgtagatataatagggaactaatttgtgttgttttttatcagagatgcaggagctcta

SEQ ID NO: 32325 - DNA, 2913 bp, Zea Mays
cacaccctcaccatggctccgccctcctcccccgctaatcaccacgccgcgcacgcgccgcgcgaggcccgtcttcgttcccccaccgctaatctcgccgcggcatccatggcgccgccctcgccctccccccacatgtccacgccggcgccccctccctcgcgccccacctcaatctcctccattgcgcgcccgagaacgcgcaaatcccccattcccgcgcctctccctcgcgcctcgatggaatcgccacggcatccatggtagggtcctcaggatccacctccaccgcgtcgccacagtccgcaggggccgagggtgccccgacggtggggacctagactgtggtcaggtgcacgcgtattcaagcaggcgctcttgcttttcgtccacaacaagttctccatgtgccctgggcacgcgacacatgttcggggtggtgggcattaccgtcacctccctcacgtcccgtgccgccgcggccgaggtctgcttcctcgccttccgcaacgagcagtccgcggggtacgccgccgcctacgacttcctgacgggctccccgggcgccctcctcatcgtctccggcccaagatacatccacgggctcgccggcctctcccacgccaccgccaacgcctggtcgctcctcatgagctccggatcctgcgaccaggctgacgccggcaggggcgacttccaggagctcgaccagatcgctgccaccaagcccttcgccaagctcgccgtcaaggcaacaaccatcctcaacgtatctaggtcttccctgccaacaagaacaaatggcacgcccgccgtgccgatttgaggtggttttggaggtgaggaggggtacgatttcggtgaccctaggccttgcgggtccggtggatggaagcggtggagctgccattaccagctaaggtggagttcaggaagccaaggtaacgacagcaaaaatatctcttctggcgtgtaaccgtgtattgtgaagttgccataggttcagcgagaaacactgaagaacttactgttctggctatggttgctgaaaagtttggtcatcagcagttggatttgttaccagttggtgtatctcttgtgcttcgccatatgagtctactctctattctatgttttgatatggtgcagttgaatttttcttgagatatggtgcagttggtgtatctcttgtgcttcgcaattgcatgataaatagcatgttcaacggatatcattttaatttccaagaaatactttgtaagttcctcaacatatatactgcacagagaactaagccccagcaactgaataatcatctattacatgttaaaaaatatgattctcgtgatctctccgtttatatattatagaattaagatgtatacaattatactgaccgttctatctattctattgaaaaatacaattatatttacgaagattcatctgtgatacttatgtatagttgtcttgcataacattgcatctgtcaattttggaacaaatcccagaggaagagaataatcttggcccacatgatcgattggttcatgtttaccatttcatgaaagaccctaaccagaatcatcaaattcagaatttgagagatccctttgtatggttatttgggaaggtgagaccgctgctgaggtaatggagcgcatccagagaaaacttagagttcatgatgatgaattgtccaagttgaagcttgcattcatttccatgaacaaacaagagtacctccaagacactaacgttgtatcaacatgtttttaggcaagtgatttctttataatgcttacatgcataccttctcttgttcactatgttcatacacgatgctttgctttttactatacgagagatgtatatggtgcttgggaacaataccttggcttggagcacactgatacaacattgaaacaataccttggcttgggatcaataccggcaaggacccaacaagcccaagagggcacccaacgcttacttcgtgttcatgaggaatgggtggagggacgagcaagatgtcaatgttctattgaaacaaactgccttaattattaggctatcactactgaaacaaactacctctgtcgtcaacctactaacttccatattcttcacactcagctttgcaaaatttacttgactggctttttttggcttaaaatataactcagggagacgtgattttgggacgatcaaactgttgggattgcgcttggacattccgggcagcgtgcacccaagattgaccaagctgattcgacggtgctaggacaaagatcctgatgcgtgtctgacttttgcagagattactatagaactccaagatagtctacaccatatcgaggcacccaagggagccagccgtcgttcttgagcaaagatgtagaagaaataagaggaagaaaaagaataagaatacatacgtagggcaaggtttcctacttttttgtgtgttacacaagttgcagtatgagtgtttgtggtgtatgtcatagttataaatatttcaaggccaaggaatacctagctacgacaaagatggggatggctaggaaagaaaaccaattgtgggacaatgataattgatatcaatgtcagccccttatatgctacacctgcaacctgtaatcataccgtcaactgcacctgacatccgtgcatcagaagtttttaattctgatgatttagattatgtctataaatctgttgaggatggcatggaacatatttttacttcaacaacacaactccaatttggtcatgatttgtgcttgaatgaagaagtcaagatttccttttgactcagcctgtttttctgaattactggtttgttacaaaattgtagatataatagggaactaatttgtgttgttttttatcagagatgcaggagctcta

SEQ ID NO: 32326 - DNA, 2206 bp, Zea Mays
caccctcaccatggctccgccctcctcccccgctaatcaccacgccgcgcacgcgccgcgcgaggcccgtcttcgttcccccaccgctaatctcgccgcggcatccatggcgccgccctcgccctccccccacatgtccacgccggcgccccctccctcgcgccccacctcaatctcctccattgcgcgcccgagaacgcgcaaatcccccattcccgcgcctctccctcgcgcctcgatggaatcgccacggcatccatggtagggtcctcaggatccacctccaccgcgtcgccacagtccgcaggggccgagggtgccccgacggtggggacctagactgtggtcaggtgcacgcgtattcaagcaggcgctcttgcttttcgtccacaacaagttctccatgtgccctgggcacgcgacacatgttcggggtggtgggcattaccgtcacctccctcacgtcccgtgccgccgcggccgaggtctgcttcctcgccttccgcaacgagcagtccgcggggtacgccgccgcctacgacttcctgacgggctccccgggcgccctcctcatcgtctccggcccaagatacatccacgggctcgccggcctctcccacgccaccgccaacgcctggtcgctcctcatgagctccggatcctgcgaccaggctgacgccggcaggggcgacttccaggagctcgaccagatcgctgccaccaagcccttcgccaagctcgccgtcaaggcaacaaccatcctcaacgtatctaggtcttccctgccaacaagaacaaatggcacgcccgccgtgccgatttgaggtggttttggaggtgaggaggggtacgatttcggtgaccctaggccttgcgggtccggtggatggaagcggtggagctgccattaccagctaaggtggagttcaggaagccaagaatttgagagatccctttgtatggttatttgggaaggtgagaccgctgctgaggtaatggagcgcatccagagaaaacttagagttcatgatgatgaattgtccaagttgaagcttgcattcatttccatgaacaaacaagagtacctccaagacactaacgttgtatcaacatgtttttaggcaagtgatttctttataatgcttacatgcataccttctcttgttcactatgttcatacacgatgctttgctttttactatacgagagatgtatatggtgcttgggaacaataccttggcttggagcacactgatacaacattgaaacaataccttggcttgggatcaataccggcaaggacccaacaagcccaagagggcacccaacgcttacttcgtgttcatctttgcaaaatttacttgactggctttttttggcttaaaatataactcagggagacgtgattttgggacgatcaaactgttgggattgcgcttggacattccgggcagcgtgcacccaagattgaccaagctgattcgacggtgctaggacaaagatcctgatgcgtgtctgacttttgcagagattactatagaactccaagatagtctacaccatatcgaggcacccaagggagccagccgtcgttcttgagcaaagatgtagaagaaataagaggaagaaaaagaataagaatacatacgtagggcaaggtttcctacttttttgtgtgttacacaagttgcagtatgagtgtttgtggtgtatgtcatagttataaatatttcaaggccaagtaagtataaaaaccgaccttagctcagttggtagagcggaggactgtagtggattccccatgtcatttgttcttgttggcagggaatacctagctacgacaaagatggggatggctaggaaagaaaaccaattgtgggacaatgataattgatatcaatgtcagccccttatatgctacacctgcaacctgtaatcataccgtcaactgcacctgacatccgtgcatcagaagtttttaattctgatgatttagattatgtctataaatctgttgaggatggcatggaacatatttttacttcaacaacacaactccaatttggtcatgatttgtgcttgaatgaagaagtcaagatttccttttgactcagcctgtttttctgaattactggtttgttacaaaattgtagatataatagggaactaatttgtgttgttttttatcagagatgcaggagctcta

SEQ ID NO: 32327 - DNA, 3621 bp, Zea Mays
ctcaccatggctccgccctcctcccccgctaatcaccacgccgcgcacgcgccgcgcgaggcccgtcttcgttcccccaccgctaatctcgccgcggcatccatggcgccgccctcgccctccccccacatgtccacgccggcgccccctccctcgcgccccacctcaatctcctccattgcgcgcccgagaacgcgcaaatcccccattcccgcgcctctccctcgcgcctcgatggaatcgccacggcatccatggtagggtcctcaggatccacctccaccgcgtcgccacagtccgcaggggccgagggtgccccgacggtggggacctagactgtggtcaggtgcacgcgtattcaagcaggcgctcttgcttttcgtccacaacaagttctccatgtgccctgggcacgcgacacatgttcggggtggtgggcattaccgtcacctccctcacgtcccgtgccgccgcggccgaggtctgcttcctcgccttccgcaacgagcagtccgcggggtacgccgccgcctacgacttcctgacgggctccccgggcgccctcctcatcgtctccggcccaagatacatccacgggctcgccggcctctcccacgccaccgccaacgcctggtcgctcctcatgagctccggatcctgcgaccaggctgacgccggcaggggcgacttccaggagctcgaccagatcgctgccaccaagcccttcgccaagctcgccgtcaaggcaacaaccatcctcaacgtatctaggtcttccctgccaacaagaacaaatggcacgcccgccgtgccgatttgaggtggttttggaggtgaggaggggtacgatttcggtgaccctaggccttgcgggtccggtggatggaagcggtggagctgccattaccagctaaggtggagttcaggaagccaaggtgagaccgctgctgaggtaatggagcgcatccagagaaaacttagagttcatgatgatgaattgtccaagttgaagcttgcattcatttccatgaacaaacaagagtacctccaagacactaacgttgtatcaacatgtttttaggcaagtgatttctttataatgcttacatgcataccttctcttgttcactatgttcatacacgatgctttgctttttactatacgagagatgtatatggtgcttgggaacaataccttggcttggagcacactgatacaacattgaaacaataccttggcttgggatcaataccggcaaggacccaacaagcccaagagggcacccaacgcttacttcgtgttcatgtgagatgcgagtttgtccccacctctttttaaattttttatggatgcttgttggttcgatctatttttggatgcattactatctatattattctattacgaagcaaaagtggcgccttcgtgttaccatgcccctaccgggtgtgggtacgagtgaagattttgacccgtgggtgcaacccgcacccgacccaaagttttgcgggtgtgggtttctatttcaacccgtgggtgacccgcacctgacccaaaatatggttcattctttattttgcggaaaaataagtaagatacaatagtaattattttgaataagtaacttggctaatgattcatgaaatgttttgttgttgctcaatgtgaaaaggtttaaaatacgtacatataaattgactattattgctatttaattgattattgctcaattattgtttaaaagtgtacacttagtaaaacccgcgggtgacccgaaacccgacgggttcgggcgcgcgtttggaatggcactcgtgggtgccatcatgggtgggtttcggtagtcttcacgggtgtgcatgccccctgcccgcggatgcccaccactgcagtaccctgctgctgtgtatagcacacaaatgcattctacaagatcacagatagtcaataacataaaaaaaccagtgtgcgatgtactaactatggtcaactctttctgcatttagttttgtacattaacaacattaatgtggtttatgtcaagtacatttcttaattaactaccttcatctaacacaatattcagggaataggtatatatgaatgttcgacagttcctagaatgctagcattgtagttgttgatgctttggaaacaaaaggcagcatcaaactactaaatactaataatgagagttgtttaccagtaaaattggaaatttataatctgaggcatagtaataagtttgttacacataattaccatctcttttgttttctgtagaaaagctcaaaagcattataaaagctaagtaatgtactccgatgttgatcctgttttgtcgcctatttcaagagactgacattccatagaagagggcaatggaggacgacacatttattttttgttctttgcactatctagcagactatcatcaatgctctaaaatgcagaggttagctggacaatcattttgggaggatgagaaaggaatatcatatgaatcaaatggtctataatgttctaactgatggcctagcaaggattctaatgcttagcttctgtttccatatcaagtttatgtcataattacttttttaatgtgttggatttattttcgaacttagggcgtgttcatttatgtgtcgcattcatggttcaaaattgatttgggtttggtgttcatttatcttgcatgtgttgcaatgaaggaggaatgggtggagggacgagcaagatgtcaatgttctattgaaacaaactgccttaattattaggctatcactactgaaacaaactacctctgtcgtcaacctactaacttccatattcttcacactcagctttgcaaaatttacttgactggctttttttggcttaaaatataactcagggagacgtgattttgggacgatcaaactgttgggattgcgcttggacattccgggcagcgtgcacccaagattgaccaagctgattcgacggtgctaggacaaagatcctgatgcgtgtctgacttttgcagagattactatagaactccaagatagtctacaccatatcgaggcacccaagggagccagccgtcgttcttgagcaaagatgtagaagaaataagaggaagaaaaagaataagaatacatacgtagggcaaggtttcctacttttttgtgtgttacacaagttgcagtatgagtgtttgtggtgtatgtcatagttataaatatttcaaggccaaggaatacctagctacgacaaagatggggatggctaggaaagaaaaccaattgtgggacaatgataattgatatcaatgtcagccccttatatgctacacctgcaacctgtaatcataccgtcaactgcacctgacatccgtgcatcagaagtttttaattctgatgatttagattatgtctataaatctgttgaggatggcatggaacatatttttacttcaacaacacaactccaatttggtcatgatttgtgcttgaatgaagaagtcaagatttccttttgactcagcctgtttttctgaattactggtttgttacaaaattgtagatataatagggaactaatttgtgttgttttttatcagagatgcaggagctcta

SEQ ID NO: 32328 - DNA, 3418 bp, Zea Mays
ctcaccatggctccgccctcctcccccgctaatcaccacgccgcgcacgcgccgcgcgaggcccgtcttcgttcccccaccgctaatctcgccgcggcatccatggcgccgccctcgccctccccccacatgtccacgccggcgccccctccctcgcgccccacctcaatctcctccattgcgcgcccgagaacgcgcaaatcccccattcccgcgcctctccctcgcgcctcgatggaatcgccacggcatccatggtagggtcctcaggatccacctccaccgcgtcgccacagtccgcaggggccgagggtgccccgacggtggggacctagactgtggtcaggtgcacgcgtattcaagcaggcgctcttgcttttcgtccacaacaagttctccatgtgccctgggcacgcgacacatgttcggggtggtgggcattaccgtcacctccctcacgtcccgtgccgccgcggccgaggtctgcttcctcgccttccgcaacgagcagtccgcggggtacgccgccgcctacgacttcctgacgggctccccgggcgccctcctcatcgtctccggcccaagatacatccacgggctcgccggcctctcccacgccaccgccaacgcctggtcgctcctcatgagctccggatcctgcgaccaggctgacgccggcaggggcgacttccaggagctcgaccagatcgctgccaccaagcccttcgccaagctcgccgtcaaggcaacaaccatcctcaacgtatctaggtcttccctgccaacaagaacaaatggcacgcccgccgtgccgatttgaggtggttttggaggtgaggaggggtacgatttcggtgaccctaggccttgcgggtccggtggatggaagcggtggagctgccattaccagctaaggtggagttcaggaagccaaggtaacgacagcaaaaatatctcttctggcgtgtaaccgtgtattgtgaagttgccataggttcagcgagaaacactgaagaacttactgttctggctatggttgctgaaaagtttggtcatcagcagttggatttgttaccagttggtgtatctcttgtgcttcgccatatgagtctactctctattctatgttttgatatggtgcagttgaatttttcttgagatatggtgcagttggtgtatctcttgtgcttcgcaattgcatgataaatagcatgttcaacggatatcattttaatttccaagaaatactttgtaagttcctcaacatatatactgcacagagaactaagccccagcaactgaataatcatctattacatgttaaaaaatatgattctcgtgatctctccgtttatatattatagaattaagatgtatacaattatactgaccgttctatctattctattgaaaaatacaattatatttacgaagattcatctgtgatacttatgtatagttgtcttgcataacattgcatctgtcaattttggaacaaatcccagaggaagagaataatcttggcccacatgatcgattggttcatgtttaccatttcatgaaagaccctaaccagaatcatcaaattcagaatttgagagatccctttgtatggttatttgggaaggtgagaccgctgctgaggtaatggagcgcatccagagaaaacttagagttcatgatgatgaattgtccaagttgaagcttgcattcatttccatgaacaaacaagagtacctccaagacactaacgttgtatcaacatgtttttaggcaagtgatttctttataatgcttacatgcataccttctcttgttcactatgttcatacacgatgctttgctttttactatacgagagatgtatatggtgcttgggaacaataccttggcttggagcacactgatacaacattgaaacaataccttggcttgggatcaataccggcaaggacccaacaagcccaagagggcacccaacgcttacttcgtgttcataaaagctcaaaagcattataaaagctaagtaatgtactccgatgttgatcctgttttgtcgcctatttcaagagactgacattccatagaagagggcaatggaggacgacacatttattttttgttctttgcactatctagcagactatcatcaatgctctaaaatgcagaggttagctggacaatcattttgggaggatgagaaaggaatatcatatgaatcaaatggtctataatgttctaactgatggcctagcaaggattctaatgcttagcttctgtttccatatcaagtttatgtcataattacttttttaatgtgttggatttattttcgaacttagggcgtgttcatttatgtgtcgcattcatggttcaaaattgatttgggtttggtgttcatttatcttgcatgtgttgcaatgaaggaggaatgggtggagggacgagcaagatgtcaatgttctattgaaacaaactgccttaattattaggctatcactactgaaacaaactacctctgtcgtcaacctactaacttccatattcttcacactcagctttgcaaaatttacttgactggctttttttggcttaaaatataactcagggagacgtgattttgggacgatcaaactgttgggattgcgcttggacattccgggcagcgtgcacccaagattgaccaagctgattcgacggtgctaggacaaagatcctgatgcgtgtctgacttttgcagagattactatagaactccaagatagtctacaccatatcgaggcacccaagggagccagccgtcgttcttgagcaaagatgtagaagaaataagaggaagaaaaagaataagaatacatacgtagggcaaggtttcctacttttttgtgtgttacacaagttgcagtatgagtgtttgtggtgtatgtcatagttataaatatttcaaggccaagtaagtataaaaaccgaccttagctcagttggtagagcggaggactgtagtggattccccatgtcatttgttcttgttggcagggaatacctagctacgacaaagatggggatggctaggaaagaaaaccaattgtgggacaatgataattgatatcaatgtcagccccttatatgctacacctgcaacctgtaatcataccgtcaactgcacctgacatccgtgcatcagaagtttttaattctgatgatttagattatgtctataaatctgttgaggatggcatggaacatatttttacttcaacaacacaactccaatttggtcatgatttgtgcttgaatgaagaagtcaagatttccttttgactcagcctgtttttctgaattactggtttgttacaaaattgtagatataatagggaactaatttgtgttgttttttatcagagatgcaggagctcta

SEQ ID NO: 32329 - DNA, 1810 bp, Zea Mays
atggctccgccctcctcccccgctaatcaccacgccgcgcacgcgccgcgcgaggcccgtcttcgttcccccaccgctaatctcgccgcggcatccatggcgccgccctcgccctccccccacatgtccacgccggcgccccctccctcgcgccccacctcaatctcctccattgcgcgcccgagaacgcgcaaatcccccattcccgcgcctctccctcgcgcctcgatggaatcgccacggcatccatggtagggtcctcaggatccacctccaccgcgtcgccacagtccgcaggggccgagggtgccccgacggtggggacctagactgtggtcaggtgcacgcgtattcaagcaggcgctcttgcttttcgtccacaacaagttctccatgtgccctgggcacgcgacacatgttcggggtggtgggcattaccgtcacctccctcacgtcccgtgccgccgcggccgaggtctgcttcctcgccttccgcaacgagcagtccgcggggtacgccgccgcctacgacttcctgacgggctccccgggcgccctcctcatcgtctccggcccaagatacatccacgggctcgccggcctctcccacgccaccgccaacgcctggtcgctcctcatgagctccggatcctgcgaccaggctgacgccggcaggggcgacttccaggagctcgaccagatcgctgccaccaagcccttcgccaagctcgccgtcaaggcaacaaccatcctcaacgtatctaggtcttccctgccaacaagaacaaatggcacgcccgccgtgccgatttgaggtggttttggaggtgaggaggggtacgatttcggtgaccctaggccttgcgggtccggtggatggaagcggtggagctgccattaccagctaaggtggagttcaggaagccaaggtgagaccgctgctgaggtaatggagcgcatccagagaaaacttagagttcatgatgatgaattgtccaagggagacgtgattttgggacgatcaaactgttgggattgcgcttggacattccgggcagcgtgcacccaagattgaccaagctgattcgacggtgctaggacaaagatcctgatgcgtgtctgacttttgcagagattactatagaactccaagatagtctacaccatatcgaggcacccaagggagccagccgtcgttcttgagcaaagatgtagaagaaataagaggaagaaaaagaataagaatacatacgtagggcaaggtttcctacttttttgtgtgttacacaagttgcagtatgagtgtttgtggtgtatgtcatagttataaatatttcaaggccaagtaagtataaaaaccgaccttagctcagttggtagagcggaggactgtagtggattccccatgtcatttgttcttgttggcagggaatacctagctacgacaaagatggggatggctaggaaagaaaaccaattgtgggacaatgataattgatatcaatgtcagccccttatatgctacacctgcaacctgtaatcataccgtcaactgcacctgacatccgtgcatcagaagtttttaattctgatgatttagattatgtctataaatctgttgaggatggcatggaacatatttttacttcaacaacacaactccaatttggtcatgatttgtgcttgaatgaagaagtcaagatttccttttgactcagcctgtttttctgaattactggtttgttacaaaattgtagatataatagggaactaatttgtgttgttttttatcagagatgcaggagctcta

SEQ ID NO: 32330 - DNA, 2074 bp, Zea Mays
atggctccgccctcctcccccgctaatcaccacgccgcgcacgcgccgcgcgaggcccgtcttcgttcccccaccgctaatctcgccgcggcatccatggcgccgccctcgccctccccccacatgtccacgccggcgccccctccctcgcgccccacctcaatctcctccattgcgcgcccgagaacgcgcaaatcccccattcccgcgcctctccctcgcgcctcgatggaatcgccacggcatccatggtagggtcctcaggatccacctccaccgcgtcgccacagtccgcaggggccgagggtgccccgacggtggggacctagactgtggtcaggtgcacgcgtattcaagcaggcgctcttgcttttcgtccacaacaagttctccatgtgccctgggcacgcgacacatgttcggggtggtgggcattaccgtcacctccctcacgtcccgtgccgccgcggccgaggtctgcttcctcgccttccgcaacgagcagtccgcggggtacgccgccgcctacgacttcctgacgggctccccgggcgccctcctcatcgtctccggcccaagatacatccacgggctcgccggcctctcccacgccaccgccaacgcctggtcgctcctcatgagctccggatcctgcgaccaggctgacgccggcaggggcgacttccaggagctcgaccagatcgctgccaccaagcccttcgccaagctcgccgtcaaggcaacaaccatcctcaacgtatctaggtcttccctgccaacaagaacaaatggcacgcccgccgtgccgatttgaggtggttttggaggtgaggaggggtacgatttcggtgaccctaggccttgcgggtccggtggatggaagcggtggagctgccattaccagctaaggtggagttcaggaagccaaggtgagaccgctgctgaggtaatggagcgcatccagagaaaacttagagttcatgatgatgaattgtccaagttgaagcttgcattcatttccatgaacaaacaagagtacctccaagacactaacgttgtatcaacatgtttttagagatgtatatggtgcttgggaacaataccttggcttggagcacactgatacaacattgaaacaataccttggcttgggatcaataccggcaaggacccaacaagcccaagagggcacccaacgcttacttcgtgttcatctttgcaaaatttacttgactggctttttttggcttaaaatataactcagggagacgtgattttgggacgatcaaactgttgggattgcgcttggacattccgggcagcgtgcacccaagattgaccaagctgattcgacggtgctaggacaaagatcctgatgcgtgtctgacttttgcagagattactatagaactccaagatagtctacaccatatcgaggcacccaagggagccagccgtcgttcttgagcaaagatgtagaagaaataagaggaagaaaaagaataagaatacatacgtagggcaaggtttcctacttttttgtgtgttacacaagttgcagtatgagtgtttgtggtgtatgtcatagttataaatatttcaaggccaagtaagtataaaaaccgaccttagctcagttggtagagcggaggactgtagtggattccccatgtcatttgttcttgttggcagggaatacctagctacgacaaagatggggatggctaggaaagaaaaccaattgtgggacaatgataattgatatcaatgtcagccccttatatgctacacctgcaacctgtaatcataccgtcaactgcacctgacatccgtgcatcagaagtttttaattctgatgatttagattatgtctataaatctgttgaggatggcatggaacatatttttacttcaacaacacaactccaatttggtcatgatttgtgcttgaatgaagaagtcaagatttccttttgactcagcctgtttttctgaattactggtttgttacaaaattgtagatataatagggaactaatttgtgttgttttttatcagagatgcaggagctcta

SEQ ID NO: 32331 - DNA, 2991 bp, Zea Mays
atggctccgccctcctcccccgctaatcaccacgccgcgcacgcgccgcgcgaggcccgtcttcgttcccccaccgctaatctcgccgcggcatccatggcgccgccctcgccctccccccacatgtccacgccggcgccccctccctcgcgccccacctcaatctcctccattgcgcgcccgagaacgcgcaaatcccccattcccgcgcctctccctcgcgcctcgatggaatcgccacggcatccatggtagggtcctcaggatccacctccaccgcgtcgccacagtccgcaggggccgagggtgccccgacggtggggacctagactgtggtcaggtgcacgcgtattcaagcaggcgctcttgcttttcgtccacaacaagttctccatgtgccctgggcacgcgacacatgttcggggtggtgggcattaccgtcacctccctcacgtcccgtgccgccgcggccgaggtctgcttcctcgccttccgcaacgagcagtccgcggggtacgccgccgcctacgacttcctgacgggctccccgggcgccctcctcatcgtctccggcccaagatacatccacgggctcgccggcctctcccacgccaccgccaacgcctggtcgctcctcatgagctccggatcctgcgaccaggctgacgccggcaggggcgacttccaggagctcgaccagatcgctgccaccaagcccttcgccaagctcgccgtcaaggcaacaaccatcctcaacgtatctaggtcttccctgccaacaagaacaaatggcacgcccgccgtgccgatttgaggtggttttggaggtgaggaggggtacgatttcggtgaccctaggccttgcgggtccggtggatggaagcggtggagctgccattaccagctaaggtggagttcaggaagccaaggtaacgacagcaaaaatatctcttctggcgtgtaaccgtgtattgtgaagttgccataggttcagcgagaaacactgaagaacttactgttctggctatggttgctgaaaagtttggtcatcagcagttggatttgttaccagttggtgtatctcttgtgcttcgccatatgagtctactctctattctatgttttgatatggtgcagttgaatttttcttgagatatggtgcagttggtgtatctcttgtgcttcgcaattgcatgataaatagcatgttcaacggatatcattttaatttccaagaaatactttgtaagttcctcaacatatatactgcacagagaactaagccccagcaactgaataatcatctattacatgttaaaaaatatgattctcgtgatctctccgtttatatattatagaattaagatgtatacaattatactgaccgttctatctattctattgaaaaatacaattatatttacgaagattcatctgtgatacttatgtatagttgtcttgcataacattgcatctgtcaattttggaacaaatcccagaggaagagaataatcttggcccacatgatcgattggttcatgtttaccatttcatgaaagaccctaaccagaatcatcaaattcagaatttgagagatccctttgtatggttatttgggaaggtgagaccgctgctgaggtaatggagcgcatccagagaaaacttagagttcatgatgatgaattgtccaaggtcgatttgctatccaacaattttgcattatttctggctacctattggtcttgctgccacaccggagttgccatcttagcttttgtcgtcctgtccccttcctatcagggcaatatgacttgctccccttcctgtcaagctacatgcttcgaccagctgaggcactgaaatgaaactaaattattgttgcaaacctctctgccatcttgtgcgtgcactatgcaaaatcacaaggcgggcttagtttctctaacactgataatgcttatttgatcagttgaagcttgcattcatttccatgaacaaacaagagtacctccaagacactaacgttgtatcaacatgtttttagatgtatatggtgcttgggaacaataccttggcttggagcacactgatacaacattgaaacaataccttggcttgggatcaataccggcaaggacccaacaagcccaagagggcacccaacgcttacttcgtgttcatggagacgtgattttgggacgatcaaactgttgggattgcgcttggacattccgggcagcgtgcacccaagattgaccaagctgattcgacggtgctaggacaaagatcctgatgcgtgtctgacttttgcagagattactatagaactccaagatagtctacaccatatcgaggcacccaagggagccagccgtcgttcttgagcaaagatgtagaagaaataagaggaagaaaaagaataagaatacatacgtagggcaaggtttcctacttttttgtgtgttacacaagttgcagtatgagtgtttgtggtgtatgtcatagttataaatatttcaaggccaagtaagtataaaaaccgaccttagctcagttggtagagcggaggactgtagtggattccccatgtcatttgttcttgttggcagggaatacctagctacgacaaagatggggatggctaggaaagaaaaccaattgtgggacaatgataattgatatcaatgtcagccccttatatgctacacctgcaacctgtaatcataccgtcaactgcacctgacatccgtgcatcagaagtttttaattctgatgatttagattatgtctataaatctgttgaggatggcatggaacatatttttacttcaacaacacaactccaatttggtcatgatttgtgcttgaatgaagaagtcaagatttccttttgactcagcctgtttttctgaattactggtttgttacaaaattgtagatataatagggaactaatttgtgttgttttttatcagagatgcaggagctcta

SEQ ID NO: 32332 - DNA, 2574 bp, Zea Mays
atggctccgccctcctcccccgctaatcaccacgccgcgcacgcgccgcgcgaggcccgtcttcgttcccccaccgctaatctcgccgcggcatccatggcgccgccctcgccctccccccacatgtccacgccggcgccccctccctcgcgccccacctcaatctcctccattgcgcgcccgagaacgcgcaaatcccccattcccgcgcctctccctcgcgcctcgatggaatcgccacggcatccatggtagggtcctcaggatccacctccaccgcgtcgccacagtccgcaggggccgagggtgccccgacggtggggacctagactgtggtcaggtgcacgcgtattcaagcaggcgctcttgcttttcgtccacaacaagttctccatgtgccctgggcacgcgacacatgttcggggtggtgggcattaccgtcacctccctcacgtcccgtgccgccgcggccgaggtctgcttcctcgccttccgcaacgagcagtccgcggggtacgccgccgcctacgacttcctgacgggctccccgggcgccctcctcatcgtctccggcccaagatacatccacgggctcgccggcctctcccacgccaccgccaacgcctggtcgctcctcatgagctccggatcctgcgaccaggctgacgccggcaggggcgacttccaggagctcgaccagatcgctgccaccaagcccttcgccaagctcgccgtcaaggcaacaaccatcctcaacgtatctaggtcttccctgccaacaagaacaaatggcacgcccgccgtgccgatttgaggtggttttggaggtgaggaggggtacgatttcggtgaccctaggccttgcgggtccggtggatggaagcggtggagctgccattaccagctaaggtggagttcaggaagccaagaggaagagaataatcttggcccacatgatcgattggttcatgtttaccatttcatgaaagaccctaaccagaatcatcaaattcagaatttgagagatccctttgtatggttatttgggaaggtgagaccgctgctgaggtaatggagcgcatccagagaaaacttagagttcatgatgatgaattgtccaaggtaatatattatattattactatttatcatagaatgaatttacccagatctcccttccccctcccttaaatatgaatatagcgtggattgaatctaatctgtttattgctccaacttaatatggtgttattttattttggttgtcaaggtcgatttgctatccaacaattttgcattatttctggctacctattggtcttgctgccacaccggagttgccatcttagcttttgtcgtcctgtccccttcctatcagggcaatatgacttgctccccttcctgtcaagctacatgcttcgaccagctgaggcactgaaatgaaactaaattattgttgcaaacctctctgccatcttgtgcgtgcactatgcaaaatcacaaggcgggcttagtttctctaacactgataatgcttatttgatcagttgaagcttgcattcatttccatgaacaaacaagagtacctccaagacactaacgttgtatcaacatgtttttaggcaagtgatttctttataatgcttacatgcataccttctcttgttcactatgttcatacacgatgctttgctttttactatacgagagatgtatatggtgcttgggaacaataccttggcttggagcacactgatacaacattgaaacaataccttggcttgggatcaataccggcaaggacccaacaagcccaagagggcacccaacgcttacttcgtgttcatggagacgtgattttgggacgatcaaactgttgggattgcgcttggacattccgggcagcgtgcacccaagattgaccaagctgattcgacggtgctaggacaaagatcctgatgcgtgtctgacttttgcagagattactatagaactccaagatagtctacaccatatcgaggcacccaagggagccagccgtcgttcttgagcaaagatgtagaagaaataagaggaagaaaaagaataagaatacatacgtagggcaaggtttcctacttttttgtgtgttacacaagttgcagtatgagtgtttgtggtgtatgtcatagttataaatatttcaaggccaaggaatacctagctacgacaaagatggggatggctaggaaagaaaaccaattgtgggacaatgataattgatatcaatgtcagccccttatatgctacacctgcaacctgtaatcataccgtcaactgcacctgacatccgtgcatcagaagtttttaattctgatgatttagattatgtctataaatctgttgaggatggcatggaacatatttttacttcaacaacacaactccaatttggtcatgatttgtgcttgaatgaagaagtcaagatttccttttgactcagcctgtttttctgaattactggtttgttacaaaattgtagatataatagggaactaatttgtgttgttttttatcagagatgcaggagctcta

SEQ ID NO: 32333 - DNA, 4468 bp, Zea Mays
atggctccgccctcctcccccgctaatcaccacgccgcgcacgcgccgcgcgaggcccgtcttcgttcccccaccgctaatctcgccgcggcatccatggcgccgccctcgccctccccccacatgtccacgccggcgccccctccctcgcgccccacctcaatctcctccattgcgcgcccgagaacgcgcaaatcccccattcccgcgcctctccctcgcgcctcgatggaatcgccacggcatccatggtagggtcctcaggatccacctccaccgcgtcgccacagtccgcaggggccgagggtgccccgacggtggggacctagactgtggtcaggtgcacgcgtattcaagcaggcgctcttgcttttcgtccacaacaagttctccatgtgccctgggcacgcgacacatgttcggggtggtgggcattaccgtcacctccctcacgtcccgtgccgccgcggccgaggtctgcttcctcgccttccgcaacgagcagtccgcggggtacgccgccgcctacgacttcctgacgggctccccgggcgccctcctcatcgtctccggcccaagatacatccacgggctcgccggcctctcccacgccaccgccaacgcctggtcgctcctcatgagctccggatcctgcgaccaggctgacgccggcaggggcgacttccaggagctcgaccagatcgctgccaccaagcccttcgccaagctcgccgtcaaggcaacaaccatcctcaacgtatctaggtcttccctgccaacaagaacaaatggcacgcccgccgtgccgatttgaggtggttttggaggtgaggaggggtacgatttcggtgaccctaggccttgcgggtccggtggatggaagcggtggagctgccattaccagctaaggtggagttcaggaagccaaggtaacgacagcaaaaatatctcttctggcgtgtaaccgtgtattgtgaagttgccataggttcagcgagaaacactgaagaacttactgttctggctatggttgctgaaaagtttggtcatcagcagttggatttgttaccagttggtgtatctcttgtgcttcgccatatgagtctactctctattctatgttttgatatggtgcagttgaatttttcttgagatatggtgcagttggtgtatctcttgtgcttcgcaattgcatgataaatagcatgttcaacggatatcattttaatttccaagaaatactttgtaagttcctcaacatatatactgcacagagaactaagccccagcaactgaataatcatctattacatgttaaaaaatatgattctcgtgatctctccgtttatatattatagaattaagatgtatacaattatactgaccgttctatctattctattgaaaaatacaattatatttacgaagattcatctgtgatacttatgtatagttgtcttgcataacattgcatctgtcaattttggaacaaatcccagaggaagagaataatcttggcccacatgatcgattggttcatgtttaccatttcatgaaagaccctaaccagaatcatcaaattcagaatttgagagatccctttgtatggttatttgggaaggtgagaccgctgctgaggtaatggagcgcatccagagaaaacttagagttcatgatgatgaattgtccaaggtcgatttgctatccaacaattttgcattatttctggctacctattggtcttgctgccacaccggagttgccatcttagcttttgtcgtcctgtccccttcctatcagggcaatatgacttgctccccttcctgtcaagctacatgcttcgaccagctgagttgaagcttgcattcatttccatgaacaaacaagagtacctccaagacactaacgttgtatcaacatgtttttaggcaagtgatttctttataatgcttacatgcataccttctcttgttcactatgttcatacacgatgctttgctttttactatacgagagatgtatatggtgcttgggaacaataccttggcttggagcacactgatacaacattgaaacaataccttggcttgggatcaataccggcaaggacccaacaagcccaagagggcacccaacgcttacttcgtgttcatgtgagatgcgagtttgtccccacctctttttaaattttttatggatgcttgttggttcgatctatttttggatgcattactatctatattattctattacgaagcaaaagtggcgccttcgtgttaccatgcccctaccgggtgtgggtacgagtgaagattttgacccgtgggtgcaacccgcacccgacccaaagttttgcgggtgtgggtttctatttcaacccgtgggtgacccgcacctgacccaaaatatggttcattctttattttgcggaaaaataagtaagatacaatagtaattattttgaataagtaacttggctaatgattcatgaaatgttttgttgttgctcaatgtgaaaaggtttaaaatacgtacatataaattgactattattgctatttaattgattattgctcaattattgtttaaaagtgtacacttagtaaaacccgcgggtgacccgaaacccgacgggttcgggcgcgcgtttggaatggcactcgtgggtgccatcatgggtgggtttcggtagtcttcacgggtgtgcatgccccctgcccgcggatgcccaccactgcagtaccctgctgctgtgtatagcacacaaatgcattctacaagatcacagatagtcaataacataaaaaaaccagtgtgcgatgtactaactatggtcaactctttctgcatttagttttgtacattaacaacattaatgtggtttatgtcaagtacatttcttaattaactaccttcatctaacacaatattcagggaataggtatatatgaatgttcgacagttcctagaatgctagcattgtagttgttgatgctttggaaacaaaaggcagcatcaaactactaaatactaataatgagagttgtttaccagtaaaattggaaatttataatctgaggcatagtaataagtttgttacacataattaccatctcttttgttttctgtagaaaagctcaaaagcattataaaagctaagtaatgtactccgatgttgatcctgttttgtcgcctatttcaagagactgacattccatagaagagggcaatggaggacgacacatttattttttgttctttgcactatctagcagactatcatcaatgctctaaaatgcagaggttagctggacaatcattttgggaggatgagaaaggaatatcatatgaatcaaatggtctataatgttctaactgatggcctagcaaggattctaatgcttagcttctgtttccatatcaagtttatgtcataattacttttttaatgtgttggatttattttcgaacttagggcgtgttcatttatgtgtcgcattcatggttcaaaattgatttgggtttggtgttcatttatcttgcatgtgttgcaatgaaggaggaatgggtggagggacgagcaagatgtcaatgttctattgaaacaaactgccttaattattaggctatcactactgaaacaaactacctctgtcgtcaacctactaacttccatattcttcacactcagctttgcaaaatttacttgactggctttttttggcttaaaatataactcagggagacgtgattttgggacgatcaaactgttgggattgcgcttggacattccgggcagcgtgcacccaagattgaccaagctgattcgacggtgctaggacaaagatcctgatgcgtgtctgacttttgcagagattactatagaactccaagatagtctacaccatatcgaggcacccaagggagccagccgtcgttcttgagcaaagatgtagaagaaataagaggaagaaaaagaataagaatacatacgtagggcaaggtttcctacttttttgtgtgttacacaagttgcagtatgagtgtttgtggtgtatgtcatagttataaatatttcaaggccaaggaatacctagctacgacaaagatggggatggctaggaaagaaaaccaattgtgggacaatgataattgatatcaatgtcagccccttatatgctacacctgcaacctgtaatcataccgtcaactgcacctgacatccgtgcatcagaagtttttaattctgatgatttagattatgtctataaatctgttgaggatggcatggaacatatttttacttcaacaacacaactccaatttggtcatgatttgtgcttgaatgaagaagtcaagatttccttttgactcagcctgtttttctgaattactggtttgttacaaaattgtagatataatagggaactaatttgtgttgttttttatcagagatgcaggagctcta

SEQ ID NO: 32334 - DNA, 1348 bp, Zea Mays
gacgggctccccgggcgccctcctcatcgtctccggcccaagatacatccacgggctcgccggcctctcccacgccaccgccaacgcctggtcgctcctcatgagctccggatcctgcgaccaggctgacgccggcaggggcgacttccaggagctcgaccagatcgctgccaccaagcccttcgccaagctcgccgtcaaggcaacaaccatcctcaacgtatctaggtcttccctgccaacaagaacaaatggcacgcccgccgtgccgatttgaggtggttttggaggtgaggaggggtacgatttcggtgaccctaggccttgcgggtccggtggatggaagcggtggagctgccattaccagctaaggtggagttcaggaagccaaggtgagaccgctgctgaggtaatggagcgcatccagagaaaacttagagttcatgatgatgaattgtccaagttgaagcttgcattcatttccatgaacaaacaagagtacctccaagacactaacgttgtatcaacatgtttttagggagacgtgattttgggacgatcaaactgttgggattgcgcttggacattccgggcagcgtgcacccaagattgaccaagctgattcgacggtgctaggacaaagatcctgatgcgtgtctgacttttgcagagattactatagaactccaagatagtctacaccatatcgaggcacccaagggagccagccgtcgttcttgagcaaagatgtagaagaaataagaggaagaaaaagaataagaatacatacgtagggcaaggtttcctacttttttgtgtgttacacaagttgcagtatgagtgtttgtggtgtatgtcatagttataaatatttcaaggccaagtaagtataaaaaccgaccttagctcagttggtagagcggaggactgtagtggattccccatgtcatttgttcttgttggcagggaatacctagctacgacaaagatggggatggctaggaaagaaaaccaattgtgggacaatgataattgatatcaatgtcagccccttatatgctacacctgcaacctgtaatcataccgtcaactgcacctgacatccgtgcatcagaagtttttaattctgatgatttagattatgtctataaatctgttgaggatggcatggaacatatttttacttcaacaacacaactccaatttggtcatgatttgtgcttgaatgaagaagtcaagatttccttttgactcagcctgtttttctgaattactggtttgttacaaaattgtagatataatagggaactaatttgtgttgttttttatcagagatgcaggagctcta

SEQ ID NO: 32335 - DNA, 2312 bp, Zea Mays
ctcaccttcctgacggcgactgcgcagccatatcctcctgacctcctctccatctcctctctttcgctgtctaccctcaccaactcctacctcccgagacaaattccgaggtcgacacaagaaaagggaaagaaccacaggtaattgccttcctgtgtcgggattgtagctccaatccactccgcgccggccgggtgcgctgccatccggatcagacgccctcgcatctctcgcccttccggcatcgtatcccctgggcggcagcggagtaaagatccgacccgcttgggattgtttgcttctcctttttgcggtgcgccgctggactccagtgctgcacatgctcgacgacggtgctgagctcctgcaatggcccgaagaaatgccggcgcaatgcagcgggagggttccgcggggtcggttaaggactggtcggaattcgacccttcgccgtctcccaagctggcgtactcgcagtcctacgtcgccatgagagggctgttgacgtcggtggcttctctggaccctgtcctgacgtcgagcagcctcaagtctctgtgggcagccttgtcatcgcacaggcacgctcggtccttggagaggccaaagtacaaggggatgaactggaagaggcccatgttccacctgcttgtgtgcttcttagtaggagttttcattggattcacaccactcttctctctcgatttatccagtaacatagattctgaaaacgagacgcttccgtttgacggggatgtggttaacagacagatgctggaacttaaaagtacaaggttggagccgattgtggctgcggcagagactgaagccgcccaagaacaacaggttgatgagagtcctccagttcctgcgatgctggatgatgaggcggacttcattgaagcgtcacatgtccaaccttctgttaatgattctgacattgttgcaaagaagcagctgataattgtgacaacaacttctgttcgaccacaccaagcttattacttgaaccgcctggctcatgttttaaaaaatgtaccacctcctcttctgtggattgtggcggaatggccatatcagtcccgtgaagcagcggagatcctgaggtcttctggggttatgtacagacatcttatctgcaatcggaacagtacaaatataaggaagattattgtctgccaaaagaacaatgcaatttttcatatcaagaagcaccgtttagatggtatagtacattttgctgatgaggagcgagtgtactcagttgatttatttgaagacatgcgaaaaatcaggcgctttggtacgtggccagtagcgacacatgttggagccaggtacaaggtggttttggaagggcctgtctgtagggcactatactttgggatccccagaggtggaacagccccactttagagtctattatactccattcaggtggcagaggtggcttgcaggagtcaagattcatcgagaagcttgtcgaggacgagactcagatggaaggcctcgcagacaactgcactcgggttatggtctggaatttggacttggaacctccacagctgaattaccctactagctggcagctgcagaagaacctagacatcgtcgtgccaataacataaaccgcgatgctgctgctgccctttttgttcgcgcctcctagtgagtgtggtggaatgatgacgacaatgcccatgccttcctgaacttggtagcgtccaggatcacgcgaagctgctctgccaagacctggttcgaataatgtggtactagtaacaacagttggaaagcgaagaagcctgcctgacaaaaggaaaaattctttctccccccgttgcgctgcattaccaatgatcctcaacatagataggcttgtatatttcttttccttccatttttcgattattcctgttcgttacatataccatgcatacatacatacatacataaatacatatacaccttcattcattcataagtacatacatacatcttacagtactttacagatgtgaacgaaagcgttctcgatgagatgatggtgtatgctgcattgtgcttgtgcaatggtggtgttaggaacgatcgatcaaccgatgtccattttggatgaggcaattaagatgcagtatatcgtgatagtagggtactgattaacaacttgcttcactcttggtcctacatcagaaggggctttgttataacacaagcaaggcaggcagtcaactatcattctcgtggaggataccacgaatgcatccatgtgagggaaaataatttagggctagttggcaaccctattttcc

SEQ ID NO: 32336 - DNA, 3501 bp, Zea Mays
cacgcgcacgcccgttcccctccctacgcgcgcgaatcacgcgcccgccgcacaggcccgccgccatcgccgattcccctaccccgcggatcacgcgcacgcccccacccccccaaccgcaattcccctccctacgtgcgcggatcacgcgcccgtcgccttgcccctacgaatcctgccgcaaaacccacctaccggcgccactacagcacacccgccgccatgccgctccctacgcccgcaacgatcgcctccctacgcgcgggtgaccggcagcacctcgtctctctcgatgtgccaatggcgccgcctccatcctacccagtctccacctctgtcaccgcgttcgtcaaggaggaggacgccccaacccctttggtggcctccccgatggcgccgcctctgtcctacccgacctcgagttcattgagatccagaaggagcaggcgcaaacttctccatgcacgggagatccatggaggcatcgcaagcccagatcccgctgtcgttaggagctaatggttggtgctcgtgtggcacggcaacgcgacgacggagcaaatcggagagcctcggtccgccctccaatatgagttcatctccttcctgctactccattgcctcttttggactcaattcactaaaatctccttctgtaattactattggccggagtggtacattatttgtgaattcctgataataaaaatctcagacagaagtcacaagcaagaaacataaaagagtcccccacgcataaaaatatggaaatgacatggcatcgagtccatgctccactaagtttccatcggtatataaaagcatgagcatccatgctcagtacacattcacacccatatcatgcatatatggattatgagaaagtacatcgtttggtattgtttgtatagggtgctctgttaagttcatgtcagtaaaagcgtaggagttgtctcattttgagcagaacaattaatttgttattaggcacgagtctttgtttagggttatgtctcatgaagtttggtacaattctaaatgttgtaaaacacaataaatcattttctaaatgagatatgtttttattgccgatgcgactgtgatgcatgttgttcattgatttggtaatggttagagcttgcagtcagttctaggtaggagttgggaaggctcaatacaccaattgtaccccaaattcatttctgattttagtgctatatatatgtgagaccaaatgttttttttctaatgggtcccatagtttgtgataacctatctgtgccacttatacacaagacattgtacaacactattggtctagaattttatttctcacatgatgttgcatattttgctttgcaatatagtcagacaaattgtgttgtctatgaggatccctttgccctgcacatttcatcactgtttggcactttggagttccatagttcatgtttagcagtggcaggatctaggcataagcttttctaaatatgtttaaacgctagatctgacaccgatgttcactagcgaatttagttcctccttgttaaaaaagtgaaagtatattaaatacatcagcttttgtattgaatatttcattatagtgtgccactatgccatctacaataagtcgtagatcactttcacttgcatgagcattcactgcagtcctcaactcatttatttgctaattttggtcctctagccatctagcatattctatgtcaaaagtcaacgctcctgcaacaagtttaaggcaattgtcaaagataattaattctgtattccactttttttgttgattactgatgctgccatttgctgtttgtattttttttcaggtacaaggttttcataaatccgagcattagtgatgtcctgtgcacaacaacaatagaggctctttcaatggggaaattcatgatctgcgcaagacatccatgaaatgagtttttcatgtcattttccgaactgtttgacatacaagacttcagaggagtttgttgcgagagtgaaagaggcaatggatagagaaccccaacagctaacccctgagcaaagatacaacctttcatgggaggcagcgactgagagattcatggagtactcagaccttgacaaggttctgaacaatgaggctgctcagcctaaacaaggctggcaaccgaagccattcctggtacccgggactacgataagagcaatgtgtggatatgggtctcttgcctcctcaagtacaacaccctgtatatggctggtgatgactgatgagcacccaaagctaatcgtagaaatgtgtagtacatggacatcaaaagttcatgactccagaagactgtcagcacaatattgtctgcttttgccattgaattagagaaacatagtcttaaaaatttaagagcatctctggccgcagagggcgcgcctgtgccaacgacggaagcaaagaagctggcgtcctccatcgcgaggtccaagcaggagatcacagaggacttctcgtcgattggcaggacatggcccccgcggcggtctaagaagagaccaggtgcaacgacaactcaatgtaagaattgctggattttgtctcccctccaaattcagtgtttcatgagattttttcccttttcctttaattttcctatatcacaaagaagaaccgaaaggcgagaggatttcatttcacaggtcgacttgcttctaccatctggttgtttgtggacagtattttggtgctgatttcgttatcatgtgttatgtttgttttattttaacatcactccagatttgatgaatcatagctcggcttctacacgatgctaaccccaggctcgtcgggttttttcaagaaggaagcccgaattcctatgctagatccaccatgccatttaatgttgcaggtcatgacgaatcttgtgattggtctgtgtcaaagcaatggatacacatatgttcgcattgcatcatttctatggtttgttgtctcatttgatcgattgacgacaatgattatacattaccagcgcttttgatgtatcctatgaaagaaagggaaaaatcaatgattgaatttcctaatatgagcaggaggtgaaggatgaggtcccatgggccatggtccatccactcagcgttcttcagatgttgttgagactttgaccacaacaattgaataaacatgtgcttatcatgaactattacatgtggtacaatttccttttgtgcttttctaattactagcgggaatgtttagcctctacaaaaacaataggaatgagtttctgtacacccgtggctatgtttgaattgttaatagtgagactgagagagtggtatggttaggatgttagatttgtgcttccagtgactgattagtatctttttttggtagctggtatgtgttagttttaccataagcttaaagtttaggtagaatgaagtggatgtgttgtgccaaattaaatgaattttcaaatgctcctacccgggctctgctttgtg

SEQ ID NO: 32337 - DNA, 2616 bp, Zea Mays
cacgcgcacgcccgttcccctccctacgcgcgcgaatcacgcgcccgccgcacaggcccgccgccatcgccgattcccctaccccgcggatcacgcgcacgcccccacccccccaaccgcaattcccctccctacgtgcgcggatcacgcgcccgtcgccttgcccctacgaatcctgccgcaaaacccacctaccggcgccactacagcacacccgccgccatgccgctccctacgcccgcaacgatcgcctccctacgcgcgggtgaccggcagcacctcgtctctctcgatgtgccaatggcgccgcctccatcctacccagtctccacctctgtcaccgcgttcgtcaaggaggaggacgccccaacccctttggtggcctccccgatggcgccgcctctgtcctacccgacctcgagttcattgagatccagaaggagcaggcgcaaacttctccatgcacgggaggtcaagcggagtatgcgcgaacttctttgtgttgtcgcccgaggctgactccagcatctccttcctggccagatccatggaggcatcgcaagcccagatcccgctgtcgttaggagctaatggttggtgctcgtgtggcacggcaacgcgacgacggagcaaatcggagagcctcggtccgccctccaatatgagttcaaggttttcataaatccgagcattagtgatgtcctgtgcacaacaacaatagaggctctttcaatggggaaattcatgatctgcgcaagacatccatgaaatgagtttttcatgtcattttccgaactgtttgacatacaagacttcagaggagtttgttgcgagagtgaaagaggcaatggatagagaaccccaacagctaacccctgagcaaagatacaacctttcatgggaggcagcgactgagagattcatggagtactcagaccttgacaaggttctgaacaatgaggctgctcagcctaaacaaggtaggaaaagaaagaataaaagaacctcacagcctaatttgttcgacatcatggatggcggtctagcgttggcccatcgatgcttaaccggcaatgaggttctcaggctggcaaccgaagccattcctggtacccgggactacgataagagcaatgtgtggatatgggtctcttgcctcctcaagtacaacaccctgtatatggctggtgatgactgatgagcacccaaagctaatcgtagaaatgtgtagtacatggacatcaaaagttcatgactccagaagactgtcagcacaatattgtctgcttttgccattgaattagagaaacatagtcttaaaaatttaagagcatctctggccgcagagggcgcgcctgtgccaacgacggaagcaaagaagctggcgtcctccatcgcgaggtccaagcaggagatcacagaggacttctcgtcgattggcaggacatggcccccgcggcggtctaagaagagaccaggtgcaacgacaactcaatgtaagaattgctggattttgtctcccctccaaattcagtgtttcatgagattttttcccttttcctttaattttcctatatcacaaagaagaaccgaaaggcgagaggatttcatttcacaggtcgacttgcttctaccatctggttgtttgtggacagtattttggtgctgatttcgttatcatgtgttatgtttgttttattttaacatcactccagatttgatgaatcatagctcggcttctacacgatgctaaccccaggctcgtcgggttttttcaagaaggaagcccgaattcctatgctagatccaccatgccatttaatgttgcaggtcatgacgaatcttgtgattggtctgtgtcaaagcaatggatacacatatgttcgcattgcatcatttctatggtttgttgtctcatttgatcgattgacgacaatgattatacattaccagcgcttttgatgtatcctatgaaagaaagggaaaaatcaatgattgaatttcctaatatgagcaggaggtgaaggatgaggtcccatgggccatggtccatccactcagcgttcttcagatggaggtcgcctctatgtgcaggaaagaaagcgacgtcctctgcagatagagttcgatcttatccacgccggacgccgccccacaccatccccccccccccccccccccccccccccaaaaaaaaagatccatctctttgtgcattccgcttccaccttgttttcacatagaggcgacctccagatgttgttgagactttgaccacaacaattgaataaacatgtgcttatcatgaactattacatgtggtacaatttccttttgtgcttttctaattactagcgggaatgtttagcctctacaaaaacaataggaatgagtttctgtacacccgtggctatgtttgaattgttaatagtgagactgagagagtggtatggttaggatgttagatttgtgcttccagtgactgattagtatctttttttggtagctggtatgtgttagttttaccataagcttaaagtttaggtagaatgaagtggatgtgttgtgccaaattaaatgaattttcaaatgctcctacccgggctctgctttgtg

SEQ ID NO: 32338 - DNA, 3154 bp, Zea Mays
cacgcgcacgcccgttcccctccctacgcgcgcgaatcacgcgcccgccgcacaggcccgccgccatcgccgattcccctaccccgcggatcacgcgcacgcccccacccccccaaccgcaattcccctccctacgtgcgcggatcacgcgcccgtcgccttgcccctacgaatcctgccgcaaaacccacctaccggcgccactacagcacacccgccgccatgccgctccctacgcccgcaacgatcgcctccctacgcgcgggtgaccggcagcacctcgtctctctcgatgtgccaatggcgccgcctccatcctacccagtctccacctctgtcaccgcgttcgtcaaggaggaggacgccccaacccctttggtggcctccccgatggcgccgcctctgtcctacccgacctcgagttcattgagatccagaaggagcaggcgcaaacttctccatgcacgggaggtcaagcggagtatgcgcgaacttctttgtgttgtcgcccgaggctgactccagcatctccttcctggccagatccatggaggcatcgcaagcccagatcccgctgtcgttaggagctaatggttggtgctcgtgtggcacggcaacgcgacgacggagcaaatcggagagcctcggtccgccctccaatatgagttcatctccttcctgctactccattgcctcttttggactcaattcactaaaatctccttctgtaattactattggccggagtggtacattatttgtgaattcctgataataaaaatctcagacagaagtcacaagcaagaaacataaaagagtcccccacgcataaaaatatggaaatgacatggcatcgagtccatgctccactaagtttccatcggtatataaaagcatgagcatccatgctcagtacacattcacacccatatcatgcatatatggattatgagaaagtacatcgtttggtattgtttgtatagggtgctctgttaagttcatgtcagtaaaagcgtaggagttgtctcattttgagcagaacaattaatttgttattaggcacgagtctttgtttagggttatgtctcatgaagtttggtacaattctaaatgttgtaaaacacaataaatcattttctaaatgagatatgtttttattgccgatgcgactgtgatgcatgttgttcattgatttggtaatggttagagcttgcagtcagttctaggtaggagttgggaaggctcaatacaccaattgtaccccaaattcatttctgattttagtgctatatatatgtgagaccaaatgttttttttctaatgggtcccatagtttgtgataacctatctgtgccacttatacacaagacattgtacaacactattggtctagaattttatttctcacatgatgttgcatattttgctttgcaatatagtcagacaaattgtgttgtctatgaggatccctttgccctgcacatttcatcactgtttggcactttggagttccatagttcatgtttagcagtggcaggatctaggcataagcttttctaaatatgtttaaacgctagatctgacaccgatgttcactagcgaatttagttcctccttgttaaaaaagtgaaagtatattaaatacatcagcttttgtattgaatatttcattatagtgtgccactatgccatctacaataagtcgtagatcactttcacttgcatgagcattcactgcagtcctcaactcatttatttgctaattttggtcctctagccatctagcatattctatgtcaaaagtcaacgctcctgcaacaagtttaaggcaattgtcaaagataattaattctgtattccactttttttgttgattactgatgctgccatttgctgtttgtattttttttcaggtacaaggttttcataaatccgagcattagtgatgtcctgtgcacaacaacaatagaggctctttcaatggggaaattcatgatctgcgcaagacatccatgaaatgagtttttcatgtcattttccgaactgtttgacatacaagacttcagaggagtttgttgcgagagtgaaagaggcaatggatagagaaccccaacagctaacccctgagcaaagatacaacctttcatgggaggcagcgactgagagattcatggagtactcagaccttgacaaggttctgaacaatgaggctgctcagcctaaacaaggtaggaaaagaaagaataaaagaacctcacagcctaatttgttcgacatcatggatggcggtctagcgttggcccatcgatgcttaaccggcaatgaggttctcaggctggcaaccgaagccattcctggtacccgggactacgataagagcaatgtgtggatatgggtctcttgcctcctcaagtacaacaccctgtatatggctggtgatgactgatgagcacccaaagctaatcaaatgtgtagtacatggacatcaaaagttcatgactccagaagactgtcagcacaatattgtctgcttttgccattgaattagagaaacatagtcttaaaaatttaagagcatctctggccgcagagggcgcgcctgtgccaacgacggaagcaaagaagctggcgtcctccatcgcgaggtccaagcaggagatcacagaggacttctcgtcgattggcaggacatggcccccgcggcggtctaagaagagaccaggtgcaacgacaactcaatgaggtgaaggatgaggtcccatgggccatggtccatccactcagcgttcttcagatgttgttgagactttgaccacaacaattgaataaacatgtgcttatcatgaactattacatgtggtacaatttccttttgtgcttttctaattactagcgggaatgtttagcctctacaaaaacaataggaatgagtttctgtacacccgtggctatgtttgaattgttaatagtgagactgagagagtggtatggttaggatgttagatttgtgcttccagtgactgattagtatctttttttggtagctggtatgtgttagttttaccataagcttaaagtttaggtagaatgaagtggatgtgttgtgccaaattaaatgaattttcaaatgctcctacccgggctctgctttgtg

SEQ ID NO: 32339 - DNA, 2379 bp, Zea Mays
cacgcgcacgcccgttcccctccctacgcgcgcgaatcacgcgcccgccgcacaggcccgccgccatcgccgattcccctaccccgcggatcacgcgcacgcccccacccccccaaccgcaattcccctccctacgtgcgcggatcacgcgcccgtcgccttgcccctacgaatcctgccgcaaaacccacctaccggcgccactacagcacacccgccgccatgccgctccctacgcccgcaacgatcgcctccctacgcgcgggtgaccggcagcacctcgtctctctcgatgtgccaatggcgccgcctccatcctacccagtctccacctctgtcaccgcgttcgtcaaggaggaggacgccccaacccctttggtggcctccccgatggcgccgcctctgtcctacccgacctcgagttcattgagatccagaaggagcaggcgcaaacttctccatgcacgggaggtcaagcggagtatgcgcgaacttctttgtgttgtcgcccgaggctgactccagcatctccttcctggccagatccatggaggcatcgcaagcccagatcccgctgtcgttaggagctaatggttggtgctcgtgtggcacggcaacgcgacgacggagcaaatcggagagcctcggtacaaggttttcataaatccgagcattagtgatgtcctgtgcacaacaacaatagaggctctttcaatggggaaattcatgatctgcgcaagacatccatgaaatgagtttttcatgtcattttccgaactgtttgacatacaagacttcagaggagtttgttgcgagagtgaaagaggcaatggatagagaaccccaacagctaacccctgagcaaagatacaacctttcatgggaggcagcgactgagagattcatggagtactcagaccttgacaaggttctgaacaatgaggctgctcagcctaaacaaggtaggaaaagaaagaataaaagaacctcacagcctaatttgttcgacatcatggatggcggtctagcgttggcccatcgatgcttaaccggcaatgaggttctcaggctggcaaccgaagccattcctggtacccgggactacgataagagcaatgtgtggatatgggtctcttgcctcctcaagtacaacaccctgtatatggctggtgatgactgatgagcacccaaagctaatcgtagaaatgtgtagtacatggacatcaaaagttcatgactccagaagactgtcagcacaatattgtctgcttttgccattgaattagagaaacatagtcttaaaaatttaagagcatctctggccgcagagggcgcgcctgtgccaacgacggaagcaaagaagctggcgtcctccatcgcgaggtccaagcaggagatcacagaggacttctcgtcgattggcaggacatggcccccgcggcggtctaagaagagaccaggtgcaacgacaactcaatatttgatgaatcatagctcggcttctacacgatgctaaccccaggctcgtcgggttttttcaagaaggaagcccgaattcctatgctagatccaccatgccatttaatgttgcaggtcatgacgaatcttgtgattggtctgtgtcaaagcaatggatacacatatgttcgcattgcatcatttctatggtttgttgtctcatttgatcgattgacgacaatgattatacattaccagcgcttttgatgtatcctatgaaagaaagggaaaaatcaatgattgaatttcctaatatgagcaggaggtgaaggatgaggtcccatgggccatggtccatccactcagcgttcttcagatggaggtcgcctctatgtgcaggaaagaaagcgacgtcctctgcagatagagttcgatcttatccacgccggacgccgccccacaccatccccccccccccccccccccccccccccaaaaaaaaagatccatctctttgtgcattccgcttccaccttgttttcacatagaggcgacctccagatgttgttgagactttgaccacaacaattgaataaacatgtgcttatcatgaactattacatgtggtacaatttccttttgtgcttttctaattactagcgggaatgtttagcctctacaaaaacaataggaatgagtttctgtacacccgtggctatgtttgaattgttaatagtgagactgagagagtggtatggttaggatgttagatttgtgcttccagtgactgattagtatctttttttggtagctggtatgtgttagttttaccataagcttaaagtttaggtagaatgaagtggatgtgttgtgccaaattaaatgaattttcaaatgctcctacccgggctctgctttgtg

SEQ ID NO: 32340 - DNA, 3102 bp, Zea Mays
cacgcgcacgcccgttcccctccctacgcgcgcgaatcacgcgcccgccgcacaggcccgccgccatcgccgattcccctaccccgcggatcacgcgcacgcccccacccccccaaccgcaattcccctccctacgtgcgcggatcacgcgcccgtcgccttgcccctacgaatcctgccgcaaaacccacctaccggcgccactacagcacacccgccgccatgccgctccctacgcccgcaacgatcgcctccctacgcgcgggtgaccggcagcacctcgtctctctcgatgtgccaatggcgccgcctccatcctacccagtctccacctctgtcaccgcgttcgtcaaggaggaggacgccccaacccctttggtggcctccccgatggcgccgcctctgtcctacccgacctcgagttcattgagatccagaaggagcaggcgcaaacttctccatgcacgggaggtcaagcggagtatgcgcgaacttctttgtgttgtcgcccgaggctgactccagcatctccttcctggccagatccatggaggcatcgcaagcccagatcccgctgtcgttaggagctaatggttggtgctcgtgtggcacggcaacgcgacgacggagcaaatcggagagcctcggtccgccctccaatatgagttcatctccttcctgctactccattgcctcttttggactcaattcactaaaatctccttctgtaattactattggccggagtggtacattatttgtgaattcctgataataaaaatctcagacagaagtcacaagcaagaaacataaaagagtcccccacgcataaaaatatggaaatgacatggcatcgagtccatgctccactaagtttccatcggtatataaaagcatgagcatccatgctcagtacacattcacacccatatcatgcatatatggattatgagaaagtacatcgtttggtattgtttgtatagggtgctctgttaagttcatgtcagtaaaagcgtaggagttgtctcattttgagcagaacaattaatttgttattaggcacgagtctttgtttagggttatgtctcatgaagtttggtacaattctaaatgttgtaaaacacaataaatcattttctaaatgagatatgtttttattgccgatgcgactgtgatgcatgttgttcattgatttggtaatggttagagcttgcagtcagttctaggtaggagttgggaaggctcaatacaccaattgtaccccaaattcatttctgattttagtgctatatatatgtgagaccaaatgttttttttctaatgggtcccatagtttgtgataacctatctgtgccacttatacacaagacattgtacaacactattggtctagaattttatttctcacatgatgttgcatattttgctttgcaatatagtcagacaaattgtgttgtctatgaggatccctttgccctgcacatttcatcactgtttggcactttggagttccatagttcatgtttagcagtggcaggatctaggcataagcttttctaaatatgtttaaacgctagatctgacaccgatgttcactagcgaatttagttcctccttgttaaaaaagtgaaagtatattaaatacatcagcttttgtattgaatatttcattatagtgtgccactatgccatctacaataagtcgtagatcactttcacttgcatgagcattcactgcagtcctcaactcatttatttgctaattttggtcctctagccatctagcatattctatgtcaaaagtcaacgctcctgcaacaagtttaaggcaattgtcaaagataattaattctgtattccactttttttgttgattactgatgctgccatttgctgtttgtattttttttcaggtacaaggttttcataaatccgagcattagtgatgtcctgtgcacaacaacaatagaggctctttcaatggggaaattcatgatctgcgcaagacatccatgaaatgagtttttcatgtcattttccgaactgtttgacatacaagacttcagaggagtttgttgcgagagtgaaagaggcaatggatagagaaccccaacagctaacccctgagcaaagatacaacctttcatgggaggcagcgactgagagattcatggagtactcagaccttgacaaggttctgaacaatgaggctgctcagcctaaacaagaaatgtgtagtacatggacatcaaaagttcatgactccagaagactgtcagcacaatattgtctgcttttgccattgaattagagaaacatagtcttaaaaatttaagagcatctctggccgcagagggcgcgcctgtgccaacgacggaagcaaagaagctggcgtcctccatcgcgaggtccaagcaggagatcacagaggacttctcgtcgattggcaggacatggcccccgcggcggtctaagaagagaccaggtgcaacgacaactcaatgaggtgaaggatgaggtcccatgggccatggtccatccactcagcgttcttcagatggaggtcgcctctatgtgcaggaaagaaagcgacgtcctctgcagatagagttcgatcttatccacgccggacgccgccccacaccatccccccccccccccccccccccccccccaaaaaaaaagatccatctctttgtgcattccgcttccaccttgttttcacatagaggcgacctccagatgttgttgagactttgaccacaacaattgaataaacatgtgcttatcatgaactattacatgtggtacaatttccttttgtgcttttctaattactagcgggaatgtttagcctctacaaaaacaataggaatgagtttctgtacacccgtggctatgtttgaattgttaatagtgagactgagagagtggtatggttaggatgttagatttgtgcttccagtgactgattagtatctttttttggtagctggtatgtgttagttttaccataagcttaaagtttaggtagaatgaagtggatgtgttgtgccaaattaaatgaattttcaaatgctcctacccgggctctgctttgtg

SEQ ID NO: 32341 - DNA, 2140 bp, Zea Mays
cacgcgcacgcccgttcccctccctacgcgcgcgaatcacgcgcccgccgcacaggcccgccgccatcgccgattcccctaccccgcggatcacgcgcacgcccccacccccccaaccgcaattcccctccctacgtgcgcggatcacgcgcccgtcgccttgcccctacgaatcctgccgcaaaacccacctaccggcgccactacagcacacccgccgccatgccgctccctacgcccgcaacgatcgcctccctacgcgcgggtgaccggcagcacctcgtctctctcgatgtgccaatggcgccgcctccatcctacccagtctccacctctgtcaccgcgttcgtcaaggaggaggacgccccaacccctttggtggcctccccgatggcgccgcctctgtcctacccgacctcgagttcattgagatccagaaggagcaggcgcaaacttctccatgcacgggagatccatggaggcatcgcaagcccagatcccgctgtcgttaggagctaatggttggtgctcgtgtggcacggcaacgcgacgacggagcaaatcggagagcctcggtccgccctccaatatgagtacaaggttttcataaatccgagcattagtgatgtcctgtgcacaacaacaatagaggctctttcaatggggaaattcatgatctgcgcaagacatccatgaaatgagtttttcatgtcattttccgaactgtttgacatacaagacttcagaggagtttgttgcgagagtgaaagaggcaatggatagagaaccccaacagctaacccctgagcaaagatacaacctttcatgggaggcagcgactgagagattcatggagtactcagaccttgacaaggttctgaacaatgaggctgctcagcctaaacaaggtaggaaaagaaagaataaaagaacctcacagcctaatttgttcgacatcatggatggcggtctagcgttggcccatcgatgcttaaccggcaatgaggttctcaggctggcaaccgaagccattcctggtacccgggactacgataagagcaatgtgtggatatgggtctcttgcctcctcaagtacaacaccctgtatatggctggtgatgactgatgagcacccaaagctaatcgtagaaatgtgtagtacatggacatcaaaagttcatgactccagaagactgtcagcacaatattgtctgcttttgccattgaattagagaaacatagtcttaaaaatttaagagcatctctggccgcagagggcgcgcctgtgccaacgacggaagcaaagaagctggcgtcctccatcgcgaggtccaagcaggagatcacagaggacttctcgtcgattggcaggacatggcccccgcggcggtctaagaagagaccaggtgcaacgacaactcaatatttgatgaatcatagctcggcttctacacgatgctaaccccaggctcgtcgggttttttcaagaaggaagcccgaattcctatgctagatccaccatgccatttaatgttgcaggtcatgacgaatcttgtgattggtctgtgtcaaagcaatggatacacatatgttcgcattgcatcatttctatggtttgttgtctcatttgatcgattgacgacaatgattatacattaccagcgcttttgatgtatcctatgaaagaaagggaaaaatcaatgattgaatttcctaatatgagcaggaggtgaaggatgaggtcccatgggccatggtccatccactcagcgttcttcagatgttgttgagactttgaccacaacaattgaataaacatgtgcttatcatgaactattacatgtggtacaatttccttttgtgcttttctaattactagcgggaatgtttagcctctacaaaaacaataggaatgagtttctgtacacccgtggctatgtttgaattgttaatagtgagactgagagagtggtatggttaggatgttagatttgtgcttccagtgactgattagtatctttttttggtagctggtatgtgttagttttaccataagcttaaagtttaggtagaatgaagtggatgtgttgtgccaaattaaatgaattttcaaatgctcctacccgggctctgctttgtg

SEQ ID NO: 32342 - DNA, 1910 bp, Zea Mays
cacgcgcacgcccgttcccctccctacgcgcgcgaatcacgcgcccgccgcacaggcccgccgccatcgccgattcccctaccccgcggatcacgcgcacgcccccacccccccaaccgcaattcccctccctacgtgcgcggatcacgcgcccgtcgccttgcccctacgaatcctgccgcaaaacccacctaccggcgccactacagcacacccgccgccatgccgctccctacgcccgcaacgatcgcctccctacgcgcgggtgaccggcagcacctcgtctctctcgatgtgccaatggcgccgcctccatcctacccagtctccacctctgtcaccgcgttcgtcaaggaggaggacgccccaacccctttggtggcctccccgatggcgccgcctctgtcctacccgacctcgagttcattgagatccagaaggagcaggcgcaaacttctccatgcacgggaggtcaagcggagtatgcgcgaacttctttgtgttgtcgcccgaggctgactccagcatctccttcctggccagatccatggaggcatcgcaagcccagatcccgctgtcgttaggagctaatggttggtgctcgtgtggcacggcaacgcgacgacggagcaaatcggagagcctcggtccgccctccaatatgagtacaaggttttcataaatccgagcattagtgatgtcctgtgcacaacaacaatagaggctctttcaatggggaaattcatgatctgcgcaagacatccatgaaatgagtttttcatgtcattttccgaactgtttgacatacaagacttcagaggagtttgttgcgagagtgaaagaggcaatggatagagaaccccaacagctaacccctgagcaaagatacaacctttcatgggaggcagcgactgagagattcatggagtactcagaccttgacaaggttctgaacaatgaggctgctcagcctaaacaaggtaggaaaagaaagaataaaagaacctcacagcctaatttgttcgacatcatggatggcggtctagcgttggcccatcgatgcttaaccggcaatgaggttctcaggctggcaaccgaagccattcctggtacccgggactacgataagagcaatgtgtggatatgggtctcttgcctcctcaagtacaacaccctgtatatggctggtgatgactgatgagcacccaaagctaatcgtagaaatgtgtagtacatggacatcaaaagttcatgactccagaagactgtcagcacaatattgtctgcttttgccattgaattagagaaacatagtcttaaaaatttaagagcatctctggccgcagagggcgcgcctgtgccaacgacggaagcaaagaagctggcgtcctccatcgcgaggtccaagcaggagatcacagaggacttctcgtcgattggcaggacatggcccccgcggcggtctaagaagagaccaggtgcaacgacaactcaatgaggtgaaggatgaggtcccatgggccatggtccatccactcagcgttcttcagatgttgttgagactttgaccacaacaattgaataaacatgtgcttatcatgaactattacatgtggtacaatttccttttgtgcttttctaattactagcgggaatgtttagcctctacaaaaacaataggaatgagtttctgtacacccgtggctatgtttgaattgttaatagtgagactgagagagtggtatggttaggatgttagatttgtgcttccagtgactgattagtatctttttttggtagctggtatgtgttagttttaccataagcttaaagtttaggtagaatgaagtggatgtgttgtgccaaattaaatgaattttcaaatgctcctacccgggctctgctttgtg

SEQ ID NO: 32343 - DNA, 3086 bp, Zea Mays
cacgcgcacgcccgttcccctccctacgcgcgcgaatcacgcgcccgccgcacaggcccgccgccatcgccgattcccctaccccgcggatcacgcgcacgcccccacccccccaaccgcaattcccctccctacgtgcgcggatcacgcgcccgtcgccttgcccctacgaatcctgccgcaaaacccacctaccggcgccactacagcacacccgccgccatgccgctccctacgcccgcaacgatcgcctccctacgcgcgggtgaccggcagcacctcgtctctctcgatgtgccaatggcgccgcctccatcctacccagtctccacctctgtcaccgcgttcgtcaaggaggaggacgccccaacccctttggtggcctccccgatggcgccgcctctgtcctacccgacctcgagttcattgagatccagaaggagcaggcgcaaacttctccatgcacgggagatccatggaggcatcgcaagcccagatcccgctgtcgttaggagctaatggttggtgctcgtgtggcacggcaacgcgacgacggagcaaatcggagagcctcggtccgccctccaatatgagttcatctccttcctgctactccattgcctcttttggactcaattcactaaaatctccttctgtaattactattggccggagtggtacattatttgtgaattcctgataataaaaatctcagacagaagtcacaagcaagaaacataaaagagtcccccacgcataaaaatatggaaatgacatggcatcgagtccatgctccactaagtttccatcggtatataaaagcatgagcatccatgctcagtacacattcacacccatatcatgcatatatggattatgagaaagtacatcgtttggtattgtttgtatagggtgctctgttaagttcatgtcagtaaaagcgtaggagttgtctcattttgagcagaacaattaatttgttattaggcacgagtctttgtttagggttatgtctcatgaagtttggtacaattctaaatgttgtaaaacacaataaatcattttctaaatgagatatgtttttattgccgatgcgactgtgatgcatgttgttcattgatttggtaatggttagagcttgcagtcagttctaggtaggagttgggaaggctcaatacaccaattgtaccccaaattcatttctgattttagtgctatatatatgtgagaccaaatgttttttttctaatgggtcccatagtttgtgataacctatctgtgccacttatacacaagacattgtacaacactattggtctagaattttatttctcacatgatgttgcatattttgctttgcaatatagtcagacaaattgtgttgtctatgaggatccctttgccctgcacatttcatcactgtttggcactttggagttccatagttcatgtttagcagtggcaggatctaggcataagcttttctaaatatgtttaaacgctagatctgacaccgatgttcactagcgaatttagttcctccttgttaaaaaagtgaaagtatattaaatacatcagcttttgtattgaatatttcattatagtgtgccactatgccatctacaataagtcgtagatcactttcacttgcatgagcattcactgcagtcctcaactcatttatttgctaattttggtcctctagccatctagcatattctatgtcaaaagtcaacgctcctgcaacaagtttaaggcaattgtcaaagataattaattctgtattccactttttttgttgattactgatgctgccatttgctgtttgtattttttttcaggtacaaggttttcataaatccgagcattagtgatgtcctgtgcacaacaacaatagaggctctttcaatggggaaattcatgatctgcgcaagacatccatgaaatgagtttttcatgtcattttccgaactgtttgacatacaagacttcagaggagtttgttgcgagagtgaaagaggcaatggatagagaaccccaacagctaacccctgagcaaagatacaacctttcatgggaggcagcgactgagagattcatggagtactcagaccttgacaaggttctgaacaatgaggctgctcagcctaaacaaggtaggaaaagaaagaataaaagaacctcacagcctaatttgttcgacatcatggatggcggtctagcgttggcccatcgatgcttaaccggcaatgaggttctcaggctggcaaccgaagccattcctggtacccgggactacgataagagcaatgtgtggatatgggtctcttgcctcctcaagtacaacaccctgtatatggctggtgatgactgatgagcacccaaagctaatcgtagaaatgtgtagtacatggacatcaaaagttcatgactccagaagactgtcagcacaatattgtctgcttttgccattgaattagagaaacatagtcttaaaaatttaagagcatctctggccgcagagggcgcgcctgtgccaacgacggaagcaaagaagctggcgtcctccatcgcgaggtccaagcaggagatcacagaggacttctcgtcgattggcaggacatggcccccgcggcggtctaagaagagaccaggtgcaacgacaactcaatgaggtgaaggatgaggtcccatgggccatggtccatccactcagcgttcttcagatgttgttgagactttgaccacaacaattgaataaacatgtgcttatcatgaactattacatgtggtacaatttccttttgtgcttttctaattactagcgggaatgtttagcctctacaaaaacaataggaatgagtttctgtacacccgtggctatgtttgaattgttaatagtgagactgagagagtggtatggttaggatgttagatttgtgcttccagtgactgattagtatctttttttggtagctggtatgtgttagttttaccataagcttaaagtttaggtagaatgaagtggatgtgttgtgccaaattaaatgaattttcaaatgctcctacccgggctctgctttgtg

SEQ ID NO: 32344 - DNA, 3386 bp, Zea Mays
cacgcgcacgcccgttcccctccctacgcgcgcgaatcacgcgcccgccgcacaggcccgccgccatcgccgattcccctaccccgcggatcacgcgcacgcccccacccccccaaccgcaattcccctccctacgtgcgcggatcacgcgcccgtcgccttgcccctacgaatcctgccgcaaaacccacctaccggcgccactacagcacacccgccgccatgccgctccctacgcccgcaacgatcgcctccctacgcgcgggtgaccggcagcacctcgtctctctcgatgtgccaatggcgccgcctccatcctacccagtctccacctctgtcaccgcgttcgtcaaggaggaggacgccccaacccctttggtggcctccccgatggcgccgcctctgtcctacccgacctcgagttcattgagatccagaaggagcaggcgcaaacttctccatgcacgggagatccatggaggcatcgcaagcccagatcccgctgtcgttaggagctaatggttggtgctcgtgtggcacggcaacgcgacgacggagcaaatcggagagcctcggtccgccctccaatatgagttcatctccttcctgctactccattgcctcttttggactcaattcactaaaatctccttctgtaattactattggccggagtggtacattatttgtgaattcctgataataaaaatctcagacagaagtcacaagcaagaaacataaaagagtcccccacgcataaaaatatggaaatgacatggcatcgagtccatgctccactaagtttccatcggtatataaaagcatgagcatccatgctcagtacacattcacacccatatcatgcatatatggattatgagaaagtacatcgtttggtattgtttgtatagggtgctctgttaagttcatgtcagtaaaagcgtaggagttgtctcattttgagcagaacaattaatttgttattaggcacgagtctttgtttagggttatgtctcatgaagtttggtacaattctaaatgttgtaaaacacaataaatcattttctaaatgagatatgtttttattgccgatgcgactgtgatgcatgttgttcattgatttggtaatggttagagcttgcagtcagttctaggtaggagttgggaaggctcaatacaccaattgtaccccaaattcatttctgattttagtgctatatatatgtgagaccaaatgttttttttctaatgggtcccatagtttgtgataacctatctgtgccacttatacacaagacattgtacaacactattggtctagaattttatttctcacatgatgttgcatattttgctttgcaatatagtcagacaaattgtgttgtctatgaggatccctttgccctgcacatttcatcactgtttggcactttggagttccatagttcatgtttagcagtggcaggatctaggcataagcttttctaaatatgtttaaacgctagatctgacaccgatgttcactagcgaatttagttcctccttgttaaaaaagtgaaagtatattaaatacatcagcttttgtattgaatatttcattatagtgtgccactatgccatctacaataagtcgtagatcactttcacttgcatgagcattcactgcagtcctcaactcatttatttgctaattttggtcctctagccatctagcatattctatgtcaaaagtcaacgctcctgcaacaagtttaaggcaattgtcaaagataattaattctgtattccactttttttgttgattactgatgctgccatttgctgtttgtattttttttcaggtacaaggttttcataaatccgagcattagtgatgtcctgtgcacaacaacaatagaggctctttcaatggggaaattcatgatctgcgcaagacatccatgaaatgagtttttcatgtcattttccgaactgtttgacatacaagacttcagaggagtttgttgcgagagtgaaagaggcaatggatagagaaccccaacagctaacccctgagcaaagatacaacctttcatgggaggcagcgactgagagattcatggagtactcagaccttgacaaggttctgaacaatgaggctgctcagcctaaacaaggtaggaaaagaaagaataaaagaacctcacagcctaatttgttcgacatcatggatggcggtctagcgttggcccatcgatgcttaaccggcaatgaggttctcaggctggcaaccgaagccattcctggtacccgggactacgataagagcaatgtgtggatatgggtctcttgcctcctcaagtacaacaccctgtatatggctggtgatgactgatgagcacccaaagctaatcgtagaaatgtgtagtacatggacatcaaaagttcatgactccagaagactgtcagcacaatattgtctgcttttgccattgaattagagaaacatagtcttaaaaatttaagagcatctctggccgcagagggcgcgcctgtgccaacgacggaagcaaagaagctggcgtcctccatcgcgaggtccaagcaggagatcacagaggacttctcgtcgattggcaggacatggcccccgcggcggtctaagaagagaccaggtgcaacgacaactcaatatttgatgaatcatagctcggcttctacacgatgctaaccccaggctcgtcgggttttttcaagaaggaagcccgaattcctatgctagatccaccatgccatttaatgttgcaggaggtgaaggatgaggtcccatgggccatggtccatccactcagcgttcttcagatggaggtcgcctctatgtgcaggaaagaaagcgacgtcctctgcagatagagttcgatcttatccacgccggacgccgccccacaccatccccccccccccccccccccccccccccaaaaaaaaagatccatctctttgtgcattccgcttccaccttgttttcacatagaggcgacctccagatgttgttgagactttgaccacaacaattgaataaacatgtgcttatcatgaactattacatgtggtacaatttccttttgtgcttttctaattactagcgggaatgtttagcctctacaaaaacaataggaatgagtttctgtacacccgtggctatgtttgaattgttaatagtgagactgagagagtggtatggttaggatgttagatttgtgcttccagtgactgattagtatctttttttggtagctggtatgtgttagttttaccataagcttaaagtttaggtagaatgaagtggatgtgttgtgccaaattaaatgaattttcaaatgctcctacccgggctctgctttgtg

SEQ ID NO: 32345 - DNA, 1235 bp, Zea Mays
aagaaacacataatttattattcacctcaatatctcacattatttgacgagaatagataagtcataaccatatacattgaaatctgatcattcaccatgtttgcagaagcatgtgaattaggctacatcagcaaacctaatttatactgacaacagtctatatgtataaacaacatagtcatctcaggttaattcatcgtcctagctacctagaaaaaatattcagcaacctagagtctttgcgccaatcaattgaacaggcatctaagcaaaaagctctcgagtctagaaaacttgctcaacaaagtgtgcctcagacaatcatgaacgggataaaaggtgatagaatggatgttgacccaatgtcagttgaagcatttgatgatcaaccatctgttccaaaacgcttgaagacgcatcatccatcacctagtggcctagagaatgatatgtctgtagtctccaattatcatgtaaactcaggctttgcattgcaggaaacacagcctgagcagcttgaccacaataacaagacatcatatctgaaacgagaggttgatgcaaaggctgacatgcgagctcctcaaaagcccataaaaattagttatggtattgatggaaatctgtctgcatcaaggtgtaatgtgattcctggtgttcccagtgagattaattctcatatcaagcaagaaaacttgtcggttgacaaagagacaagtgaaaccgcccttgaggttaagaatgaaacaaatggtccaactgatgcgactgtgtctaaatcaggaaaaccaaatgtgaatgttggcaacatcaaatttgtgctttatttaatggaagaaggaacgatggaggacaagctgaatattcttgccccaattgctatgttgaggagtcatgatattgaatctggtcaaggctggcggtgcgagatttgtccagattttgatgtgtgcaactcttgtttccaaaaaggagtggttactcatcctcacaagttaacgaaccatccatcaactgctgtccgtgatgctcaaaacgcagaagctcggcaaatgcttctccagcagctaagaaagatgcttgatcttctggatgcagcggtgcaacaacaacgccagcgcgcggagctcattcagcagcaacagcggcggtctgggcagctccaggcgcagctacctggacgcccacgggaagcggaggcgcgaggagtgcgcgacactggagcggaaccgtag

SEQ ID NO: 32346 - DNA, 1816 bp, Zea Mays
actcgtcagctacaattctacggtccatacaagtagatcgagggtggtcgagcgtttctttctctcttcggctgaacgcggttttgcacaagcgagcaaagagagggagagagagaaagaaaagaaaagaaaagaaggggagggccgcgactgtagtggggagatgcctcggcatactgcgcccgcggcgccgccatcggagcgcggcgagatggacgaggtggtagaggcggatccggacacggaggcggaggatcaggaggagaggtgggcgacgctgctaccagagttgctctccgacgtgttgctgcgcgtcgaggcctccggcgccgagcagtggccggcgcggaaggacatcgtctctttcgcctgcgtgtgccgctggtggcggaaggccgcagtctccgttgtgcgtcctccggcggagtccgccaagatcaccttcccctcctcgctcaagcagggcctagggagaacccaatgcaatgctttatcatgcggaataagaactctacattctacctctaccttggcttcacaagttcacctgtgtataaagggaagtttctcatggctgctagaagattaaggcgtggtccccatactgagtacattatatctcttgatgcagaggacttatcacaagggagcaattcatacatgggaaaactgagatctgatttctgggggacaaacttcaaaatatatgatagcaagccaccatatgacggcgctaaagcatcaagtagtcgatctagtcgtcgtttcggaagcagaaggattagtccccaagtatcgtctggtaactatgaagttggacaggtttcatacaaatacaacttgctcaaatccagaggccccaggagaatgaattgcactcttgaatgcccttcagcgcaagagacctgggaaaactcactcaagacaaagttcaggaggcccttgggtcccacaactttacgaaacaaagcgccccgctggcatgagcagctgcagtgctggtgcttaaacttccatgggcgggtaacagttgcatcggtcaagaatttccagcttgtgactgctgccggccccagtgaccctactagcaacgtggacgaggaaacggttctgctgcagtttggtaaggtcgacgatgatattttcacaatggattaccggcaaccgctctctgcgttccaagcttttgccatcagccttagcagctttgggaacaagctagcctgtgaatagcgatacggttcgatgctcgtcgcgtggctatatggtttgcggtggtgggtgcttgctcgccgttgttacaatgtgatctgttctttttttttagttgagtatcgacgtactatttgtaccatgctgttgtacaagagatgcactatactgcattactgctgtcttgtcaaaaggacttgttcaagaaggaaatactgtgtcataaactttttgctctgattccatgcaaaaggcattccggtgctcatatatgctcatggtgaagtgatattttccccttcttgataaatattatttttgttttgtttgggtaactactgctactagtgctgggatgctgagcgcatcttagggaaatcttcttatgatttcactagtatagtgaccgtgcgttgctacggcatgtcaattatttgataaaatgttagttcacaacgattacaatgttttgtgacaatatgttaggatgaaaacagacaatttacattgacaatactttcttaaacatggagttggataggtagagggagactggtattgcagccaagaagcaagaaaataagaaaagagaggcaaaagtagc

SEQ ID NO: 32347 - DNA, 1443 bp, Zea Mays
ctcatggtgtgcgacaccatgacacgcagatgacaggaaggcggcaggcggggtgcttcatttggcccattgaatctggtgtacagccagggcctagggagaacccaatgcaatgctttatcatgcggaataagaactctacattctacctctaccttggcttcacaagttcacctgtgtataaagggaagtttctcatggctgctagaagattaaggcgtggtccccatactgagtacattatatctcttgatgcagaggacttatcacaagggagcaattcatacatgggaaaactgagatctgatttctgggggacaaacttcaaaatatatgatagcaagccaccatatgacggcgctaaagcatcaagtagtcgatctagtcgtcgtttcggaagcagaaggattagtccccaagtatcgtctggtaactatgaagttggacaggtttcatacaaatacaacttgctcaaatccagaggccccaggagaatgaattgcactcttgaatgcccttcagcgcaagagacctgggaaaactcactcaagacaaagttcaggaggcccttgggtcccacaactttacgaaacaaagcgccccgctggcatgagcagctgcagtgctggtgcttaaacttccatgggcgggtaacagttgcatcggtcaagaatttccagcttgtgactgctgccggccccagtgaccctactagcaacgtggacgaggaaacggttctgctgcagtttggtaaggtcgacgatgatattttcacaatggattaccggcaaccgctctctgcgttccaagcttttgccatcagccttagcagctttgggaacaagctagcctgtgaatagcgatacggttcgatgctcgtcgcgtggctatatggtttgcggtggtgggtgcttgctcgccgttgttacaatgtgatctgttctttttttttagttgagtatcgacgtactatttgtaccatgctgttgtacaagagatgcactatactgcattactgctgtcttgtcaaaaggacttgttcaagaaggaaatactgtgtcataaactttttgctctgattccatgcaaaaggcattccggtgctcatatatgctcatggtgaagtgatattttccccttcttgataaatattatttttgttttgtttgggtaactactgctactagtgctgggatgctgagcgcatcttagggaaatcttcttatgatttcactagtatagtgaccgtgcgttgctacggcatgtcaattatttgataaaatgttagttcacaacgattacaatgttttgtgacaatatgttaggatgaaaacagacaatttacattgacaatactttcttaaacatggagttggataggtagagggagactggtattgcagccaagaagcaagaaaataagaaaagagaggcaaaagtagc

SEQ ID NO: 32348 - DNA, 1470 bp, Zea Mays
tatcattgcagtagcaatatggaaaagaaaacaggtcactggatgtccgtcataaaggtccaaatctgacgtactttgggcacaacaatctgtctcagaatttgcttttggagccagggcctagggagaacccaatgcaatgctttatcatgcggaataagaactctacattctacctctaccttggcttcacaagttcacctgtgtataaagggaagtttctcatggctgctagaagattaaggcgtggtccccatactgagtacattatatctcttgatgcagaggacttatcacaagggagcaattcatacatgggaaaactgagatctgatttctgggggacaaacttcaaaatatatgatagcaagccaccatatgacggcgctaaagcatcaagtagtcgatctagtcgtcgtttcggaagcagaaggattagtccccaagtatcgtctggtaactatgaagttggacaggtttcatacaaatacaacttgctcaaatccagaggccccaggagaatgaattgcactcttgaatgcccttcagcgcaagagacctgggaaaactcactcaagacaaagttcaggaggcccttgggtcccacaactttacgaaacaaagcgccccgctggcatgagcagctgcagtgctggtgcttaaacttccatgggcgggtaacagttgcatcggtcaagaatttccagcttgtgactgctgccggccccagtgaccctactagcaacgtggacgaggaaacggttctgctgcagtttggtaaggtcgacgatgatattttcacaatggattaccggcaaccgctctctgcgttccaagcttttgccatcagccttagcagctttgggaacaagctagcctgtgaatagcgatacggttcgatgctcgtcgcgtggctatatggtttgcggtggtgggtgcttgctcgccgttgttacaatgtgatctgttctttttttttagttgagtatcgacgtactatttgtaccatgctgttgtacaagagatgcactatactgcattactgctgtcttgtcaaaaggacttgttcaagaaggaaatactgtgtcataaactttttgctctgattccatgcaaaaggcattccggtgctcatatatgctcatggtgaagtgatattttccccttcttgataaatattatttttgttttgtttgggtaactactgctactagtgctgggatgctgagcgcatcttagggaaatcttcttatgatttcactagtatagtgaccgtgcgttgctacggcatgtcaattatttgataaaatgttagttcacaacgattacaatgttttgtgacaatatgttaggatgaaaacagacaatttacattgacaatactttcttaaacatggagttggataggtagagggagactggtattgcagccaagaagcaagaaaataagaaaagagaggcaaaagtagc

SEQ ID NO: 32349 - DNA, 1332 bp, Zea Mays
ataaaggtccaaatctgacgtactttgggcacaacaatctgtctcagaatttgcttttggagccagggcctagggagaacccaatgcaatgctttatcatgcggaataagaactctacattctacctctaccttggcttcacaagttaggacttatcacaagggagcaattcatacatgggaaaactgagatctgatttctgggggacaaacttcaaaatatatgatagcaagccaccatatgacggcgctaaagcatcaagtagtcgatctagtcgtcgtttcggaagcagaaggattagtccccaagtatcgtctggtaactatgaagttggacaggtttcatacaaatacaacttgctcaaatccagaggccccaggagaatgaattgcactcttgaatgcccttcagcgcaagagacctgggaaaactcactcaagacaaagttcaggaggcccttgggtcccacaactttacgaaacaaagcgccccgctggcatgagcagctgcagtgctggtgcttaaacttccatgggcgggtaacagttgcatcggtcaagaatttccagcttgtgactgctgccggccccagtgaccctactagcaacgtggacgaggaaacggttctgctgcagtttggtaaggtcgacgatgatattttcacaatggattaccggcaaccgctctctgcgttccaagcttttgccatcagccttagcagctttgggaacaagctagcctgtgaatagcgatacggttcgatgctcgtcgcgtggctatatggtttgcggtggtgggtgcttgctcgccgttgttacaatgtgatctgttctttttttttagttgagtatcgacgtactatttgtaccatgctgttgtacaagagatgcactatactgcattactgctgtcttgtcaaaaggacttgttcaagaaggaaatactgtgtcataaactttttgctctgattccatgcaaaaggcattccggtgctcatatatgctcatggtgaagtgatattttccccttcttgataaatattatttttgttttgtttgggtaactactgctactagtgctgggatgctgagcgcatcttagggaaatcttcttatgatttcactagtatagtgaccgtgcgttgctacggcatgtcaattatttgataaaatgttagttcacaacgattacaatgttttgtgacaatatgttaggatgaaaacagacaatttacattgacaatactttcttaaacatggagttggataggtagagggagactggtattgcagccaagaagcaagaaaataagaaaagagaggcaaaagtagc

SEQ ID NO: 32350 - DNA, 1582 bp, Zea Mays
gggtttacaaaaatattccacaatcagaatccagaagtgtctagtttttgctacaaattaacctagcagatggaaatgcgggggttagcattttctgggggttactttggttatttaagattctaatgagataaataaccaggcaggtcgattgcatggtttgcgttatatggcgacatcagtattttttatacgatcagccattcagatatttaggacatagtttgagaagtttctttgcaaattcagtgtcatagtgtttcttatttgacatctgtgttcctaaatcttacaccatttctcaaaacacagccagggcctagggagaacccaatgcaatgctttatcatgcggaataagaactctacattctacctctaccttggcttcacaagttaggacttatcacaagggagcaattcatacatgggaaaactgagatctgatttctgggggacaaacttcaaaatatatgatagcaagccaccatatgacggcgctaaagcatcaagtagtcgatctagtcgtcgtttcggaagcagaaggattagtccccaagtatcgtctggtaactatgaagttggacaggtttcatacaaatacaacttgctcaaatccagaggccccaggagaatgaattgcactcttgaatgcccttcagcgcaagagacctgggaaaactcactcaagacaaagttcaggaggcccttgggtcccacaactttacgaaacaaagcgccccgctggcatgagcagctgcagtgctggtgcttaaacttccatgggcgggtaacagttgcatcggtcaagaatttccagcttgtgactgctgccggccccagtgaccctactagcaacgtggacgaggaaacggttctgctgcagtttggtaaggtcgacgatgatattttcacaatggattaccggcaaccgctctctgcgttccaagcttttgccatcagccttagcagctttgggaacaagctagcctgtgaatagcgatacggttcgatgctcgtcgcgtggctatatggtttgcggtggtgggtgcttgctcgccgttgttacaatgtgatctgttctttttttttagttgagtatcgacgtactatttgtaccatgctgttgtacaagagatgcactatactgcattactgctgtcttgtcaaaaggacttgttcaagaaggaaatactgtgtcataaactttttgctctgattccatgcaaaaggcattccggtgctcatatatgctcatggtgaagtgatattttccccttcttgataaatattatttttgttttgtttgggtaactactgctactagtgctgggatgctgagcgcatcttagggaaatcttcttatgatttcactagtatagtgaccgtgcgttgctacggcatgtcaattatttgataaaatgttagttcacaacgattacaatgttttgtgacaatatgttaggatgaaaacagacaatttacattgacaatactttcttaaacatggagttggataggtagagggagactggtattgcagccaagaagcaagaaaataagaaaagagaggcaaaagtagc

SEQ ID NO: 32351 - DNA, 3273 bp, Zea Mays
agacgacccaccgagccatggccccacggtttcctggtttcctccgcctcactggtcctcccctctcctctccccccttccctcgctccagcgagtaccgacgcctcccacagctggagaccgtactttactggcactggcagtaatcttcccacccgcctcggcgcctcctccctctctcccaacatcgcccgctctctcctcgctgttctccgctgtcatctcccccggagaagcgtggctcctgtagccggcctcctacctgcccctcctccgcgcgccgagcaccagacgacgcgacacggccgagcacggtcgctgcttccgcggcggcgccgctccactctcgtgctgcagctagcggaacagagatccgtggggacatgaacagggtttctcctctctgttggtatgaactaaattgatcgatggtcctattgaatatagagctactattatatggcatattctgtcatgcaaatgatggtggttgtaagttgtgattgaggaactccattgtttgagaaatggatgaaacaccaactagttctgggcaatctgaagatagttcatgtgaacctaattggtggccaccagacttattagagaagatagagtctgcttccatatcaaggaaacatgatgttttgggtaatctaaggtcctcatcctggaaggcatcacaattactgtggtcaacaggatcttattcagggttaatccctaatggtttctattcaatcatcccggataaaaagttgaaggagactttcccaacaattccatcggtagatgacctgcaaactcttgaagcagatgggcttaaggctgacataattattgtagacactgagagggataagaaggttttcatgttgaagcagcttagtgctgcacttgtgaaagggttaagctctagcccagcattagtgataaagaaaatagcaggtttggtttttgactgcttcaagcgacaaaatcctgacgccagtccagcaaaaggctcgattgaagatactcatttctttggatataaaggaccacaacttctagggcagataagacatggatcatgccgacctcgagctattctatttaaagttcttgcagatgctgttggccttgagagtaaacttgtagttggtctacctgatgacggtgccgttggatttgtggactcctacaaacatatgtctgtgtgactcagctgaaaatgactcctgtgattctccccttgagcccaacagccctctgtatggattgtctgataaagttgaaactgaaggtgcagaattgaatcttcatcaaatctatctggacgatcactgcgtaatatgatgttgagatcaaggacattttctgaggggaaattaagcacgtcatgtagtgaaccgaatatagcgaatgccttttggaggcacagtcaaaggagaggagttgccgaggaaccccgtggtgctagttccagtcctgagcatccattaatgagagcaaggggaagatctatacttggtggtgagaagcaatcatttcaagaatacacagaatctggagctgcttcaagatcagatggtcttgggggcacttcaacctctaatgctcgaagaataaggcgtagaagcattagcatcacccctgagattggagatgacattgtgagggcagttcgggctatgaacgaaacactaaagcaaaatcgccttcaaagggatcatgtcgaaggttcatgctcatatgttacggaagaccaaagcaacgccaatgactgcccaaataaagatgatgcatctcggataattggtgctactgacagtgactcaagaaaccgaactggtcctactcaaaaggccatgtcattgccttcttcgcctcatgaatataggggtcaagatacccaaaaaggtgatgattttataagtaaagagaagatggcattggcatggaacaaagttttccagagctccccatttcttaacaagcccttgctgccgtttgaggaatggaacatagatttctctgagataacaattggcacgcgggttggaataggattcttcggagaagttttccgtggtatatggaatggaaccgatgttgccatcaaagtatttctagaacaggacttgacaactgaaaacatggaagatttttgcaacgagatatacatcctgagccggttgcgacatccaaacgttatattgtttcttggtgcatgcattacacctccacacttgtcaatggttactgaatatatggaaatgggatcactgtattatctcatccatatgagtggtcagaaaaagaaacttagttggcgtaggaggttgaaaattattcgtgatatatgcagggggttgatgtgcatacaccgcatgaagatagttcacagggatctcaaaagtgcaaactgcctggtgaacaaacattggactgttaagatatgtgactttggtctatctcgagtgatgattgatagtcctatgactgataattcctctgctggcaccccggaatggatggcccctgagcttatacggaatgaaccttttacagagaaatgtgatatattcagccttggtgttatcatgtgggagctgtgcacattgagtcgcccatgggaaggcatctccccagttcaagtggtgtacgcagttgctaatgaaggttcgcggcttgagattcctgaaggacctctcggcaggttgattgcagattgctgggcagagcctgagaatcggccgagctgccaggagatcctaacccgtttgctggactgcgaatacactgtcagctgaaatggaagctgctcgctcgtccactcaattcctgcacaggtggaaacatttcttgtataaaacctgtaaaaaaggctgccgattctgcggacttgaggtcacatatcgaagcgctgtgtttttttttaaacaatggcgaccctttctcaaaaaaaatgtaaaaatgattccctggttatagaagaacatgtctgattcgatagacgtgccttgcatcgcagggcaagctggttgttgtaccttattctagataagtagcacgcccgcgaatgctgttcggctttcaaatagctgcagctgcaaatttttacctgttgctacagtatttcctttctatataaccaggcggcagcagcagccgaatgttgccagtacgttggagatggcataagcaactccatgttgtgaactgttccctcgcgaccataaagaacatgccatcctagatttggaataaaaatattgtcaaaatttgtat

SEQ ID NO: 32352 - DNA, 3306 bp, Zea Mays
agacgacccaccgagccatggccccacggtttcctggtttcctccgcctcactggtcctcccctctcctctccccccttccctcgctccagcgagtaccgacgcctcccacagctggagaccgtactttactggcactggcagtaatcttcccacccgcctcggcgcctcctccctctctcccaacatcgcccgctctctcctcgctgttctccgctgtcatctcccccggagaagcgtggctcctgtagccggcctcctacctgcccctcctccgcgcgccgagcaccagacgacgcgacacggccgagcacggtcgctgcttccgcggcggcgccgctccactctcgtgctgcagctagcggaacagagatccgtggggacatgaacagggtttctcctctctgttggtatgaactaaattgatcgatggtcctattgaatatagagctactattatatggcatattctgtcatgcaaatgatggtggttgtaagttgtgattgaggaactccattgtttgagaaatggatgaaacaccaactagttctgggcaatctgaagatagttcatgtgaacctaattggtggccaccagacttattagagaagatagagtctgcttccatatcaaggaaacatgatgttttgggtaatctaaggtcctcatcctggaaggcatcacaattactgtggtcaacaggatcttattcagggttaatccctaatggtttctattcaatcatcccggataaaaagttgaaggagactttcccaacaattccatcggtagatgacctgcaaactcttgaagcagatgggcttaaggctgacataattattgtagacactgagagggataagaaggttttcatgttgaagcagcttagtgctgcacttgtgaaagggttaagctctagcccagcattagtgataaagaaaatagcaggtttggtttttgactgcttcaagcgacaaaatcctgacgccagtccagcaaaaggctcgattgaagatactcatttctttggatataaaggaccacaacttctagggcagataagacatggatcatgccgacctcgagctattctatttaaagttcttgcagatgctgttggccttgagagtaaacttgtagttggtctacctgatgacggtgccgttggatttgtggactcctacaaacatatgtctgtggctatctttatatcgcatatatctgctgcgggtgaaagtgactcagctgaaaatgactcctgtgattctccccttgagcccaacagccctctgtatggattgtctgataaagttgaaactgaaggaattgaatcttcatcaaatctatctggacgatcactgcgtaatatgatgttgagatcaaggacattttctgaggggaaattaagcacgtcatgtagtgaaccgaatatagcgaatgccttttggaggcacagtcaaaggagaggagttgccgaggaaccccgtggtgctagttccagtcctgagcatccattaatgagagcaaggggaagatctatacttggtggtgagaagcaatcatttcaagaatacacagaatctggagctgcttcaagatcagatggtcttgggggcacttcaacctctaatgctcgaagaataaggcgtagaagcattagcatcacccctgagattggagatgacattgtgagggcagttcgggctatgaacgaaacactaaagcaaaatcgccttcaaagggatcatgtcgaaggttcatgctcatatgttacggaagaccaaagcaacgccaatgactgcccaaataaagatgatgcatctcggataattggtgctactgacagtgactcaagaaaccgaactggtcctactcaaaaggccatgtcattgccttcttcgcctcatgaatataggggtcaagatacccaaaaaggtgatgattttataagtaaagagaagatggcattggcatggaacaaagttttccagagctccccatttcttaacaagcccttgctgccgtttgaggaatggaacatagatttctctgagataacaattggcacgcgggttggaataggattcttcggagaagttttccgtggtatatggaatggaaccgatgttgccatcaaagtatttctagaacaggacttgacaactgaaaacatggaagatttttgcaacgagatatacatcctgagccggttgcgacatccaaacgttatattgtttcttggtgcatgcattacacctccacacttgtcaatggttactgaatatatggaaatgggatcactgtattatctcatccatatgagtggtcagaaaaagaaacttagttggcgtaggaggttgaaaattattcgtgatatatgcagggggttgatgtgcatacaccgcatgaagatagttcacagggatctcaaaagtgcaaactgcctggtgaacaaacattggactgttaagatatgtgactttggtctatctcgagtgatgattgatagtcctatgactgataattcctctgctggcaccccggaatggatggcccctgagcttatacggaatgaaccttttacagagaaatgtgatatattcagccttggtgttatcatgtgggagctgtgcacattgagtcgcccatgggaaggcatctccccagttcaagtggtgtacgcagttgctaatgaaggttcgcggcttgagattcctgaaggacctctcggcaggttgattgcagattgctgggcagagcctgagaatcggccgagctgccaggagatcctaacccgtttgctggactgcgaatacactgtcagctgaaatggaagctgctcgctcgtccactcaattcctgcacaggtggaaacatttcttgtataaaacctgtaaaaaaggctgccgattctgcggacttgaggtcacatatcgaagcgctgtgtttttttttaaacaatggcgaccctttctcaaaaaaaatgtaaaaatgattccctggttatagaagaacatgtctgattcgatagacgtgccttgcatcgcagggcaagctggttgttgtaccttattctagataagtagcacgcccgcgaatgctgttcggctttcaaatagctgcagctgcaaatttttacctgttgctacagtatttcctttctatataaccaggcggcagcagcagccgaatgttgccagtacgttggagatggcataagcaactccatgttgtgaactgttccctcgcgaccataaagaacatgccatcctagatttggaataaaaatattgtcaaaatttgtat

SEQ ID NO: 32353 - DNA, 3268 bp, Zea Mays
agacgacccaccgagccatggccccacggtttcctggtttcctccgcctcactggtcctcccctctcctctccccccttccctcgctccagcgagtaccgacgcctcccacagctggagaccgtactttactggcactggcagtaatcttcccacccgcctcggcgcctcctccctctctcccaacatcgcccgctctctcctcgctgttctccgctgtcatctcccccggagaagcgtggctcctgtagccggcctcctacctgcccctcctccgcgcgccgagcaccagacgacgcgacacggccgagcacggtcgctgcttccgcggcggcgccgctccactctcgtgctgcagctagcggaacagagatccgtggggacatgaacagggtttctcctctctgttggtatgaactaaattgatcgatggtcctattgaatatagagctactattatatggcatattctgtcatgcaaatgatggtggttgtaagttgtgattgaggaactccattgtttgagaaatggatgaaacaccaactagttctgggcaatctgaagatagttcatgtgaacctaattggtggccaccagacttattagagaagatagagtctgcttccatatcaaggaaacatgatgttttgggtaatctaaggtcctcatcctggaaggcatcacaattactgtggtcaacaggatcttattcagggttaatccctaatggtttctattcaatcatcccggataaaaagttgaaggagactttcccaacaattccatcggtagatgacctgcaaactcttgaagcagatgggcttaaggctgacataattattgtagacactgagagggataagaaggttttcatgttgaagcagcttagtgctgcacttgtgaaagggttaagctctagcccagcattagtgataaagaaaatagcaggtttggtttttgactgcttcaagcgacaaaatcctgacgccagtccagcaaaaggctcgattgaagatactcatttctttggatataaaggaccacaacttctagggcagataagacatggatcatgccgacctcgagctattctatttaaagttcttgcagatgctgttggccttgagagtaaacttgtagttggtctacctgatgacggtgccgttggatttgtggactcctacaaacatatgtctgtgtgactcagctgaaaatgactcctgtgattctccccttgagcccaacagccctctgtatggattgtctgataaagttgaaactgaaggaattgaatcttcatcaaatctatctggacgatcactgcgtaatatgatgttgagatcaaggacattttctgaggggaaattaagcacgtcatgtagtgaaccgaatatagcgaatgccttttggaggcacagtcaaaggagaggagttgccgaggaaccccgtggtgctagttccagtcctgagcatccattaatgagagcaaggggaagatctatacttggtggtgagaagcaatcatttcaagaatacacagaatctggagctgcttcaagatcagatggtcttgggggcacttcaacctctaatgctcgaagaataaggcgtagaagcattagcatcacccctgagattggagatgacattgtgagggcagttcgggctatgaacgaaacactaaagcaaaatcgccttcaaagggatcatgtcgaaggttcatgctcatatgttacggaagaccaaagcaacgccaatgactgcccaaataaagatgatgcatctcggataattggtgctactgacagtgactcaagaaaccgaactggtcctactcaaaaggccatgtcattgccttcttcgcctcatgaatataggggtcaagatacccaaaaaggtgatgattttataagtaaagagaagatggcattggcatggaacaaagttttccagagctccccatttcttaacaagcccttgctgccgtttgaggaatggaacatagatttctctgagataacaattggcacgcgggttggaataggattcttcggagaagttttccgtggtatatggaatggaaccgatgttgccatcaaagtatttctagaacaggacttgacaactgaaaacatggaagatttttgcaacgagatatacatcctgagccggttgcgacatccaaacgttatattgtttcttggtgcatgcattacacctccacacttgtcaatggttactgaatatatggaaatgggatcactgtattatctcatccatatgagtggtcagaaaaagaaacttagttggcgtaggaggttgaaaattattcgtgatatatgcagggggttgatgtgcatacaccgcatgaagatagttcacagggatctcaaaagtgcaaactgcctggtgaacaaacattggactgttaagatatgtgactttggtctatctcgagtgatgattgatagtcctatgactgataattcctctgctggcaccccggaatggatggcccctgagcttatacggaatgaaccttttacagagaaatgtgatatattcagccttggtgttatcatgtgggagctgtgcacattgagtcgcccatgggaaggcatctccccagttcaagtggtgtacgcagttgctaatgaaggttcgcggcttgagattcctgaaggacctctcggcaggttgattgcagattgctgggcagagcctgagaatcggccgagctgccaggagatcctaacccgtttgctggactgcgaatacactgtcagctgaaatggaagctgctcgctcgtccactcaattcctgcacaggtggaaacatttcttgtataaaacctgtaaaaaaggctgccgattctgcggacttgaggtcacatatcgaagcgctgtgtttttttttaaacaatggcgaccctttctcaaaaaaaatgtaaaaatgattccctggttatagaagaacatgtctgattcgatagacgtgccttgcatcgcagggcaagctggttgttgtaccttattctagataagtagcacgcccgcgaatgctgttcggctttcaaatagctgcagctgcaaatttttacctgttgctacagtatttcctttctatataaccaggcggcagcagcagccgaatgttgccagtacgttggagatggcataagcaactccatgttgtgaactgttccctcgcgaccataaagaacatgccatcctagatttggaataaaaatattgtcaaaatttgtat

SEQ ID NO: 32354 - DNA, 3283 bp, Zea Mays
ccacggtttcctggtttcctccgcctcactggtcctcccctctcctctccccccttccctcgctccagcgagtaccgacgcctcccacagctggagaccgtactttactggcactggcagtaatcttcccacccgcctcggcgcctcctccctctctcccaacatcgcccgctctctcctcgctgttctccgctgtcatctcccccggagaagcgtggctcctgtagccggcctcctacctgcccctcctccgcgcgccgagcaccagacgacgcgacacggccgagcacggtcgctgcttccgcggcggcgccgctccactctcgtgctgcagctagcggaacagagatccgtggggacatgaacagggtttctcctctctgttggtatgaactaaattgatcgatggtcctattgaatatagagctactattatatggcatattctgtcatgcaaatgatggtggttgtaagttgtgattgaggaactccattgtttgagaaatggatgaaacaccaactagttctgggcaatctgaagatagttcatgtgaacctaattggtggccaccagacttattagagaagatagagtctgcttccatatcaaggaaacatgatgttttgggtaatctaaggtcctcatcctggaaggcatcacaattactgtggtcaacaggatcttattcagggttaatccctaatggtttctattcaatcatcccggataaaaagttgaaggagactttcccaacaattccatcggtagatgacctgcaaactcttgaagcagatgggcttaaggctgacataattattgtagacactgagagggataagaaggttttcatgttgaagcagcttagtgctgcacttgtgaaagggttaagctctagcccagcattagtgataaagaaaatagcaggtttttgactgcttcaagcgacaaaatcctgacgccagtccagcaaaaggctcgattgaagatactcatttctttggatataaaggaccacaacttctagggcagataagacatggatcatgccgacctcgagctattctatttaaagttcttgcagatgctgttggccttgagagtaaacttgtagttggtctacctgatgacggtgccgttggatttgtggactcctacaaacatatgtctgtggctatctttatatcgcatatatctgctgcgggtgaaagtgactcagctgaaaatgactcctgtgattctccccttgagcccaacagccctctgtatggattgtctgataaagttgaaactgaaggtgcagaattgaatcttcatcaaatctatctggacgatcactgcgtaatatgatgttgagatcaaggacattttctgaggggaaattaagcacgtcatgtagtgaaccgaatatagcgaatgccttttggaggcacagtcaaaggagaggagttgccgaggaaccccgtggtgctagttccagtcctgagcatccattaatgagagcaaggggaagatctatacttggtggtgagaagcaatcatttcaagaatacacagaatctggagctgcttcaagatcagatggtcttgggggcacttcaacctctaatgctcgaagaataaggcgtagaagcattagcatcacccctgagattggagatgacattgtgagggcagttcgggctatgaacgaaacactaaagcaaaatcgccttcaaagggatcatgtcgaaggttcatgctcatatgttacggaagaccaaagcaacgccaatgactgcccaaataaagatgatgcatctcggataattggtgctactgacagtgactcaagaaaccgaactggtcctactcaaaaggccatgtcattgccttcttcgcctcatgaatataggggtcaagatacccaaaaaggtgatgattttataagtaaagagaagatggcattggcatggaacaaagttttccagagctccccatttcttaacaagcccttgctgccgtttgaggaatggaacatagatttctctgagataacaattggcacgcgggttggaataggattcttcggagaagttttccgtggtatatggaatggaaccgatgttgccatcaaagtatttctagaacaggacttgacaactgaaaacatggaagatttttgcaacgagatatacatcctgagccggttgcgacatccaaacgttatattgtttcttggtgcatgcattacacctccacacttgtcaatggttactgaatatatggaaatgggatcactgtattatctcatccatatgagtggtcagaaaaagaaacttagttggcgtaggaggttgaaaattattcgtgatatatgcagggggttgatgtgcatacaccgcatgaagatagttcacagggatctcaaaagtgcaaactgcctggtgaacaaacattggactgttaagatatgtgactttggtctatctcgagtgatgattgatagtcctatgactgataattcctctgctggcaccccggaatggatggcccctgagcttatacggaatgaaccttttacagagaaatgtgatatattcagccttggtgttatcatgtgggagctgtgcacattgagtcgcccatgggaaggcatctccccagttcaagtggtgtacgcagttgctaatgaaggttcgcggcttgagattcctgaaggacctctcggcaggttgattgcagattgctgggcagagcctgagaatcggccgagctgccaggagatcctaacccgtttgctggactgcgaatacactgtcagctgaaatggaagctgctcgctcgtccactcaattcctgcacaggtggaaacatttcttgtataaaacctgtaaaaaaggctgccgattctgcggacttgaggtcacatatcgaagcgctgtgtttttttttaaacaatggcgaccctttctcaaaaaaaatgtaaaaatgattccctggttatagaagaacatgtctgattcgatagacgtgccttgcatcgcagggcaagctggttgttgtaccttattctagataagtagcacgcccgcgaatgctgttcggctttcaaatagctgcagctgcaaatttttacctgttgctacagtatttcctttctatataaccaggcggcagcagcagccgaatgttgccagtacgttggagatggcataagcaactccatgttgtgaactgttccctcgcgaccataaagaacatgccatcctagatttggaataaaaatattgtcaaaatttgtat

SEQ ID NO: 32355 - DNA, 3348 bp, Zea Mays
ccacggtttcctggtttcctccgcctcactggtcctcccctctcctctccccccttccctcgctccagcgagtaccgacgcctcccacagctggagaccgtactttactggcactggcagtaatcttcccacccgcctcggcgcctcctccctctctcccaacatcgcccgctctctcctcgctgttctccgctgtcatctcccccggagaagcgtggctcctgtagccggcctcctacctgcccctcctccgcgcgccgagcaccagacgacgcgacacggccgagcacggtcgctgcttccgcggcggcgccgctccactctcgtgctgcagctagcggaacagagatccgtggggacatgaacagggtttctcctctctgttggtatgaactaaattgatcgatggtcctattgaatatagagctactattatatggcatattctgtcatgcaaatgatggtggttgtaagttgtgattgaggaactccattgtttgagaaatggatgaaacaccaactagttctgggcaatctgaagatagttcatgtgaacctaattggtggccaccagacttattagagaagatagagtctgcttccatatcaaggaaacatgatgttttgggtaatctaaggtcctcatcctggaaggcatcacaattactgtggtcaacaggatcttattcagggttaatccctaatggtttctattcaatcatcccggataaaaagttgaaggagactttcccaacaattccatcggtagatgacctgcaaactcttgaagcagatgggcttaaggctgacataattattgtagacactgagagggataagaaggttttcatgttgaagcagcttagtgctgcacttgtgaaagggttaagctctagcccagcattagtgataaagaaaatagcaggtttggtttttgactgcttcaagcgacaaaatcctgacgccagtccagcaaaaggctcgattgaagatactcatttctttggatataaaggaccacaacttctagggcagataagacatggatcatgccgacctcgagctattctatttaaagttcttgcagatgctgttggccttgagagtaaacttgtagttggtctacctgatgacggtgccgttggatttgtggactcctacaaacatatgtctgtggtagtttcgctaaactctatggaactgctagtggatcttatgcgatttccaggccagttgattccattttcagctaaggctatctttatatcgcatatatctgctgcgggtgaaagtgactcagctgaaaatgactcctgtgattctccccttgagcccaacagccctctgtatggattgtctgataaagttgaaactgaaggaattgaatcttcatcaaatctatctggacgatcactgcgtaatatgatgttgagatcaaggacattttctgaggggaaattaagcacgtcatgtagtgaaccgaatatagcgaatgccttttggaggcacagtcaaaggagaggagttgccgaggaaccccgtgtcctgagcatccattaatgagagcaaggggaagatctatacttggtggtgagaagcaatcatttcaagaatacacagaatctggagctgcttcaagatcagatggtcttgggggcacttcaacctctaatgctcgaagaataaggcgtagaagcattagcatcacccctgagattggagatgacattgtgagggcagttcgggctatgaacgaaacactaaagcaaaatcgccttcaaagggatcatgtcgaaggttcatgctcatatgttacggaagaccaaagcaacgccaatgactgcccaaataaagatgatgcatctcggataattggtgctactgacagtgactcaagaaaccgaactggtcctactcaaaaggccatgtcattgccttcttcgcctcatgaatataggggtcaagatacccaaaaaggtgatgattttataagtaaagagaagatggcattggcatggaacaaagttttccagagctccccatttcttaacaagcccttgctgccgtttgaggaatggaacatagatttctctgagataacaattggcacgcgggttggaataggattcttcggagaagttttccgtggtatatggaatggaaccgatgttgccatcaaagtatttctagaacaggacttgacaactgaaaacatggaagatttttgcaacgagatatacatcctgagccggttgcgacatccaaacgttatattgtttcttggtgcatgcattacacctccacacttgtcaatggttactgaatatatggaaatgggatcactgtattatctcatccatatgagtggtcagaaaaagaaacttagttggcgtaggaggttgaaaattattcgtgatatatgcagggggttgatgtgcatacaccgcatgaagatagttcacagggatctcaaaagtgcaaactgcctggtgaacaaacattggactgttaagatatgtgactttggtctatctcgagtgatgattgatagtcctatgactgataattcctctgctggcaccccggaatggatggcccctgagcttatacggaatgaaccttttacagagaaatgtgatatattcagccttggtgttatcatgtgggagctgtgcacattgagtcgcccatgggaaggcatctccccagttcaagtggtgtacgcagttgctaatgaaggttcgcggcttgagattcctgaaggacctctcggcaggttgattgcagattgctgggcagagcctgagaatcggccgagctgccaggagatcctaacccgtttgctggactgcgaatacactgtcagctgaaatggaagctgctcgctcgtccactcaattcctgcacaggtggaaacatttcttgtataaaacctgtaaaaaaggctgccgattctgcggacttgaggtcacatatcgaagcgctgtgtttttttttaaacaatggcgaccctttctcaaaaaaaatgtaaaaatgattccctggttatagaagaacatgtctgattcgatagacgtgccttgcatcgcagggcaagctggttgttgtaccttattctagataagtagcacgcccgcgaatgctgttcggctttcaaatagctgcagctgcaaatttttacctgttgctacagtatttcctttctatataaccaggcggcagcagcagccgaatgttgccagtacgttggagatggcataagcaactccatgttgtgaactgttccctcgcgaccataaagaacatgccatcctagatttggaataaaaatattgtcaaaatttgtat

SEQ ID NO: 32356 - DNA, 3356 bp, Zea Mays
ccacggtttcctggtttcctccgcctcactggtcctcccctctcctctccccccttccctcgctccagcgagtaccgacgcctcccacagctggagaccgtactttactggcactggcagtaatcttcccacccgcctcggcgcctcctccctctctcccaacatcgcccgctctctcctcgctgttctccgctgtcatctcccccggagaagcgtggctcctgtagccggcctcctacctgcccctcctccgcgcgccgagcaccagacgacgcgacacggccgagcacggtcgctgcttccgcggcggcgccgctccactctcgtgctgcagctagcggaacagagatccgtggggacatgaacagggtttctcctctctgttggtatgaactaaattgatcgatggtcctattgaatatagagctactattatatggcatattctgtcatgcaaatgatggtggttgtaagttgtgattgaggaactccattgtttgagaaatggatgaaacaccaactagttctgggcaatctgaagatagttcatgtgaacctaattggtggccaccagacttattagagaagatagagtctgcttccatatcaaggaaacatgatgttttgggtaatctaaggtcctcatcctggaaggcatcacaattactgtggtcaacaggatcttattcagggttaatccctaatggtttctattcaatcatcccggataaaaagttgaaggagactttcccaacaattccatcggtagatgacctgcaaactcttgaagcagatgggcttaaggctgacataattattgtagacactgagagggataagaaggttttcatgttgaagcagcttagtgctgcacttgtgaaagggttaagctctagcccagcattagtgataaagaaaatagcaggtttggtttttgactgcttcaagcgacaaaatcctgacgccagtccagcaaaaggctcgattgaagatactcatttctttggatataaaggaccacaacttctagggcagataagacatggatcatgccgacctcgagctattctatttaaagttcttgcagatgctgttggccttgagagtaaacttgtagttggtctacctgatgacggtgccgttggatttgtggactcctacaaacatatgtctgtggtagtttcgctaaactctatggaactgctagtggatcttatgcgatttccaggccagttgattccattttcagctaaggctatctttatatcgcatatatctgctgcgggtgaaagtgactcagctgaaaatgactcctgtgattctccccttgagcccaacagccctctgtatggattgtctgataaagttgaaactgaaggaattgaatcttcatcaaatctatctggacgatcactgcgtaatatgatgttgagatcaaggacattttctgaggggaaattaagcacgtcatgtagtgaaccgaatatagcgaatgccttttggaggcacagtcaaaggagaggagttgccgaggaaccccgtggtgctagttccagtcctgagcatccattaatgagagcaaggggaagatctatacttggtggtgagaagcaatcatttcaagaatacacagaatctggagctgcttcaagatggtcttgggggcacttcaacctctaatgctcgaagaataaggcgtagaagcattagcatcacccctgagattggagatgacattgtgagggcagttcgggctatgaacgaaacactaaagcaaaatcgccttcaaagggatcatgtcgaaggttcatgctcatatgttacggaagaccaaagcaacgccaatgactgcccaaataaagatgatgcatctcggataattggtgctactgacagtgactcaagaaaccgaactggtcctactcaaaaggccatgtcattgccttcttcgcctcatgaatataggggtcaagatacccaaaaaggtgatgattttataagtaaagagaagatggcattggcatggaacaaagttttccagagctccccatttcttaacaagcccttgctgccgtttgaggaatggaacatagatttctctgagataacaattggcacgcgggttggaataggattcttcggagaagttttccgtggtatatggaatggaaccgatgttgccatcaaagtatttctagaacaggacttgacaactgaaaacatggaagatttttgcaacgagatatacatcctgagccggttgcgacatccaaacgttatattgtttcttggtgcatgcattacacctccacacttgtcaatggttactgaatatatggaaatgggatcactgtattatctcatccatatgagtggtcagaaaaagaaacttagttggcgtaggaggttgaaaattattcgtgatatatgcagggggttgatgtgcatacaccgcatgaagatagttcacagggatctcaaaagtgcaaactgcctggtgaacaaacattggactgttaagatatgtgactttggtctatctcgagtgatgattgatagtcctatgactgataattcctctgctggcaccccggaatggatggcccctgagcttatacggaatgaaccttttacagagaaatgtgatatattcagccttggtgttatcatgtgggagctgtgcacattgagtcgcccatgggaaggcatctccccagttcaagtggtgtacgcagttgctaatgaaggttcgcggcttgagattcctgaaggacctctcggcaggttgattgcagattgctgggcagagcctgagaatcggccgagctgccaggagatcctaacccgtttgctggactgcgaatacactgtcagctgaaatggaagctgctcgctcgtccactcaattcctgcacaggtggaaacatttcttgtataaaacctgtaaaaaaggctgccgattctgcggacttgaggtcacatatcgaagcgctgtgtttttttttaaacaatggcgaccctttctcaaaaaaaatgtaaaaatgattccctggttatagaagaacatgtctgattcgatagacgtgccttgcatcgcagggcaagctggttgttgtaccttattctagataagtagcacgcccgcgaatgctgttcggctttcaaatagctgcagctgcaaatttttacctgttgctacagtatttcctttctatataaccaggcggcagcagcagccgaatgttgccagtacgttggagatggcataagcaactccatgttgtgaactgttccctcgcgaccataaagaacatgccatcctagatttggaataaaaatattgtcaaaatttgtat

SEQ ID NO: 32357 - DNA, 3361 bp, Zea Mays
ccacggtttcctggtttcctccgcctcactggtcctcccctctcctctccccccttccctcgctccagcgagtaccgacgcctcccacagctggagaccgtactttactggcactggcagtaatcttcccacccgcctcggcgcctcctccctctctcccaacatcgcccgctctctcctcgctgttctccgctgtcatctcccccggagaagcgtggctcctgtagccggcctcctacctgcccctcctccgcgcgccgagcaccagacgacgcgacacggccgagcacggtcgctgcttccgcggcggcgccgctccactctcgtgctgcagctagcggaacagagatccgtggggacatgaacagggtttctcctctctgttggtatgaactaaattgatcgatggtcctattgaatatagagctactattatatggcatattctgtcatgcaaatgatggtggttgtaagttgtgattgaggaactccattgtttgagaaatggatgaaacaccaactagttctgggcaatctgaagatagttcatgtgaacctaattggtggccaccagacttattagagaagatagagtctgcttccatatcaaggaaacatgatgttttgggtaatctaaggtcctcatcctggaaggcatcacaattactgtggtcaacaggatcttattcagggttaatccctaatggtttctattcaatcatcccggataaaaagttgaaggagactttcccaacaattccatcggtagatgacctgcaaactcttgaagcagatgggcttaaggctgacataattattgtagacactgagagggataagaaggttttcatgttgaagcagcttagtgctgcacttgtgaaagggttaagctctagcccagcattagtgataaagaaaatagcaggtttggtttttgactgcttcaagcgacaaaatcctgacgccagtccagcaaaaggctcgattgaagatactcatttctttggatataaaggaccacaacttctagggcagataagacatggatcatgccgacctcgagctattctatttaaagttcttgcagatgctgttggccttgagagtaaacttgtagttggtctacctgatgacggtgccgttggatttgtggactcctacaaacatatgtctgtggtagtttcgctaaactctatggaactgctagtggatcttatgcgatttccaggccagttgattccattttcagctaaggctatctttatatcgcatatatctgctgcgggtgaaagtgactcagctgaaaatgactcctgtgattctccccttgagcccaacagccctctgtatggattgtctgataaagttgaaactgaaggtgcagaattgaatcttcatcaaatctatctggacgatcactgcgtaatatgatgttgagatcaaggacattttctgaggggaaattaagcacgtcatgtagtgaaccgaatatagcgaatgccttttggaggcacagtcaaaggagaggagttgccgaggaaccccgtggtgctagttccagtcctgagcatccattaatgagagcaaggggaagatctatacttggtggtgagaagcaatcatttcaagaatacacagaatctggagctgcttcaagatggtcttgggggcacttcaacctctaatgctcgaagaataaggcgtagaagcattagcatcacccctgagattggagatgacattgtgagggcagttcgggctatgaacgaaacactaaagcaaaatcgccttcaaagggatcatgtcgaaggttcatgctcatatgttacggaagaccaaagcaacgccaatgactgcccaaataaagatgatgcatctcggataattggtgctactgacagtgactcaagaaaccgaactggtcctactcaaaaggccatgtcattgccttcttcgcctcatgaatataggggtcaagatacccaaaaaggtgatgattttataagtaaagagaagatggcattggcatggaacaaagttttccagagctccccatttcttaacaagcccttgctgccgtttgaggaatggaacatagatttctctgagataacaattggcacgcgggttggaataggattcttcggagaagttttccgtggtatatggaatggaaccgatgttgccatcaaagtatttctagaacaggacttgacaactgaaaacatggaagatttttgcaacgagatatacatcctgagccggttgcgacatccaaacgttatattgtttcttggtgcatgcattacacctccacacttgtcaatggttactgaatatatggaaatgggatcactgtattatctcatccatatgagtggtcagaaaaagaaacttagttggcgtaggaggttgaaaattattcgtgatatatgcagggggttgatgtgcatacaccgcatgaagatagttcacagggatctcaaaagtgcaaactgcctggtgaacaaacattggactgttaagatatgtgactttggtctatctcgagtgatgattgatagtcctatgactgataattcctctgctggcaccccggaatggatggcccctgagcttatacggaatgaaccttttacagagaaatgtgatatattcagccttggtgttatcatgtgggagctgtgcacattgagtcgcccatgggaaggcatctccccagttcaagtggtgtacgcagttgctaatgaaggttcgcggcttgagattcctgaaggacctctcggcaggttgattgcagattgctgggcagagcctgagaatcggccgagctgccaggagatcctaacccgtttgctggactgcgaatacactgtcagctgaaatggaagctgctcgctcgtccactcaattcctgcacaggtggaaacatttcttgtataaaacctgtaaaaaaggctgccgattctgcggacttgaggtcacatatcgaagcgctgtgtttttttttaaacaatggcgaccctttctcaaaaaaaatgtaaaaatgattccctggttatagaagaacatgtctgattcgatagacgtgccttgcatcgcagggcaagctggttgttgtaccttattctagataagtagcacgcccgcgaatgctgttcggctttcaaatagctgcagctgcaaatttttacctgttgctacagtatttcctttctatataaccaggcggcagcagcagccgaatgttgccagtacgttggagatggcataagcaactccatgttgtgaactgttccctcgcgaccataaagaacatgccatcctagatttggaataaaaatattgtcaaaatttgtat

SEQ ID NO: 32358 - DNA, 3246 bp, Zea Mays
tccgcctcactggtcctcccctctcctctccccccttccctcgctccagcgagtaccgacgcctcccacagctggagaccgtactttactggcactggcagtaatcttcccacccgcctcggcgcctcctccctctctcccaacatcgcccgctctctcctcgctgttctccgctgtcatctcccccggagaagcgtggctcctgtagccggcctcctacctgcccctcctccgcgcgccgagcaccagacgacgcgacacggccgagcacggtcgctgcttccgcggcggcgccgctccactctcgtgctgcagctagcggaacagagatccgtggggacatgaacagggtttctcctctctgttggtatgaactaaattgatcgatggtcctattgaatatagagctactattatatggcatattctgtcatgcaaatgatggtggttgtaagttgtgattgaggaactccattgtttgagaaatggatgaaacaccaactagttctgggcaatctgaagatagttcatgtgaacctaattggtggccaccagacttattagagaagatagagtctgcttccatatcaaggaaacatgatgttttgggtaatctaaggtcctcatcctggaaggcatcacaattactgtggtcaacaggatcttattcagggttaatccctaatggtttctattcaatcatcccggataaaaagttgaaggagactttcccaacaattccatcggtagatgacctgcaaactcttgaagcagatgggcttaaggctgacataattattgtagacactgagagggataagaaggttttcatgttgaagcagcttagtgctgcacttgtgaaagggttaagctctagcccagcattagtgataaagaaaatagcaggtttggtttttgactgcttcaagcgacaaaatcctgacgccagtccagcaaaaggctcgattgaagatactcatttctttggatataaaggaccacaacttctagggcagataagacatggatcatgccgacctcgagctattctatttaaagttcttgcagatgctgttggccttgagagtaaacttgtagttggtctacctgatgacggtgccgttggatttgtggactcctacaaacatatgtctgtggtagtttcgctaaactctatggaactgctagtggatcttatgcgatttccaggccagttgattccattttcagctaaggctatctttatatcgcatatatctgctgcgggtgaaagtgactcagctgaaaatgactcctgtgattctccccttgagcccaacagccctctgtatggattgtctgataaagttgaaactgaaggaattgaatcttcatcaaatctatctggacgatcactgcgtaatatgatgttgagatcaaggacattttctgaggggaaattaagcacgtcatgtagtgaaccgaatatagcgaatgccttttggaggcacagtcaaaggagaggagttgccgaggaaccccgtggtgctagttccagtcctgagcatccattaatgagagcaaggggaagatctatacttggtggtgagaagcaatcatttcaagaatacacagaatctggagctgcttcaagggcagttcgggctatgaacgaaacactaaagcaaaatcgccttcaaagggatcatgtcgaaggttcatgctcatatgttacggaagaccaaagcaacgccaatgactgcccaaataaagatgatgcatctcggataattggtgctactgacagtgactcaagaaaccgaactggtcctactcaaaaggccatgtcattgccttcttcgcctcatgaatataggggtcaagatacccaaaaaggtgatgattttataagtaaagagaagatggcattggcatggaacaaagttttccagagctccccatttcttaacaagcccttgctgccgtttgaggaatggaacatagatttctctgagataacaattggcacgcgggttggaataggattcttcggagaagttttccgtggtatatggaatggaaccgatgttgccatcaaagtatttctagaacaggacttgacaactgaaaacatggaagatttttgcaacgagatatacatcctgagccggttgcgacatccaaacgttatattgtttcttggtgcatgcattacacctccacacttgtcaatggttactgaatatatggaaatgggatcactgtattatctcatccatatgagtggtcagaaaaagaaacttagttggcgtaggaggttgaaaattattcgtgatatatgcagggggttgatgtgcatacaccgcatgaagatagttcacagggatctcaaaagtgcaaactgcctggtgaacaaacattggactgttaagatatgtgactttggtctatctcgagtgatgattgatagtcctatgactgataattcctctgctggcaccccggaatggatggcccctgagcttatacggaatgaaccttttacagagaaatgtgatatattcagccttggtgttatcatgtgggagctgtgcacattgagtcgcccatgggaaggcatctccccagttcaagtggtgtacgcagttgctaatgaaggttcgcggcttgagattcctgaaggacctctcggcaggttgattgcagattgctgggcagagcctgagaatcggccgagctgccaggagatcctaacccgtttgctggactgcgaatacactgtcagctgaaatggaagctgctcgctcgtccactcaattcctgcacaggtggaaacatttcttgtataaaacctgtaaaaaaggctgccgattctgcggacttgaggtcacatatcgaagcgctgtgtttttttttaaacaatggcgaccctttctcaaaaaaaatgtaaaaatgattccctggttatagaagaacatgtctgattcgatagacgtgccttgcatcgcagggcaagctggttgttgtaccttattctagataagtagcacgcccgcgaatgctgttcggctttcaaatagctgcagctgcaaatttttacctgttgctacagtatttcctttctatataaccaggcggcagcagcagccgaatgttgccagtacgttggagatggcataagcaactccatgttgtgaactgttccctcgcgaccataaagaacatgccatcctagatttggaataaaaatattgtcaaaatttgtat

SEQ ID NO: 32359 - DNA, 3065 bp, Zea Mays
cccctctcctctccccccttccctcgctccagcgagtaccgacgcctcccacagctggagaccgtactttactggcactggcagtaatcttcccacccgcctcggcgcctcctccctctctcccaacatcgcccgctctctcctcgctgttctccgctgtcatctcccccggagaagcgtggctcctgtagccggcctcctacctgcccctcctccgcgcgccgagcaccagacgacgcgacacggccgagcacggtcgctgcttccgcggcggcgccgctccactctcgtgctgcagctagcggaacagagatccgtggggacatgaacagggtttctcctctctgttggtatgaactaaattgatcgatggtcctattgaatatagagctactattatatggcatattctgtcatgcaaatgatggtggttgtaagttgtgattgaggaactccattgtttgagaaatggatgaaacaccaactagttctgggcaatctgaagatagttcatgtgaacctaattggtggccaccagacttattagagaagatagagtctgcttccatatcaaggaaacatgatgttttgggtaatctaaggtcctcatcctggaaggcatcacaattactgtggtcaacaggatcttattcagggttaatccctaatggtttctattcaatcatcccggataaaaagttgaaggagactttcccaacaattccatcggtagatgacctgcaaactcttgaagcagatgggcttaaggctgacataattattgtagacactgagagggataagaaggttttcatgttgaagcagcttagtgctgcacttgtgaaagggttaagctctagcccagcattagtgataaagaaaatagcaggtttggtttttgactgcttcaagcgacaaaatcctgacgccagtccagcaaaaggctcgattgaagatactcatttctttggatataaaggaccacaacttctagggcagataagacatggatcatgccgacctcgagctattctatttaaagttcttgcagatgctgttggccttgagagtaaacttgtagttaattgaatcttcatcaaatctatctggacgatcactgcgtaatatgatgttgagatcaaggacattttctgaggggaaattaagcacgtcatgtagtgaaccgaatatagcgaatgccttttggaggcacagtcaaaggagaggagttgccgaggaaccccgtggtgctagttccagtcctgagcatccattaatgagagcaaggggaagatctatacttggtggtgagaagcaatcatttcaagaatacacagaatctggagctgcttcaagatcagatggtcttgggggcacttcaacctctaatgctcgaagaataaggcgtagaagcattagcatcacccctgagattggagatgacattgtgagggcagttcgggctatgaacgaaacactaaagcaaaatcgccttcaaagggatcatgtcgaaggttcatgctcatatgttacggaagaccaaagcaacgccaatgactgcccaaataaagatgatgcatctcggataattggtgctactgacagtgactcaagaaaccgaactggtcctactcaaaaggccatgtcattgccttcttcgcctcatgaatataggggtcaagatacccaaaaaggtgatgattttataagtaaagagaagatggcattggcatggaacaaagttttccagagctccccatttcttaacaagcccttgctgccgtttgaggaatggaacatagatttctctgagataacaattggcacgcgggttggaataggattcttcggagaagttttccgtggtatatggaatggaaccgatgttgccatcaaagtatttctagaacaggacttgacaactgaaaacatggaagatttttgcaacgagatatacatcctgagccggttgcgacatccaaacgttatattgtttcttggtgcatgcattacacctccacacttgtcaatggttactgaatatatggaaatgggatcactgtattatctcatccatatgagtggtcagaaaaagaaacttagttggcgtaggaggttgaaaattattcgtgatatatgcagggggttgatgtgcatacaccgcatgaagatagttcacagggatctcaaaagtgcaaactgcctggtgaacaaacattggactgttaagatatgtgactttggtctatctcgagtgatgattgatagtcctatgactgataattcctctgctggcaccccggaatggatggcccctgagcttatacggaatgaaccttttacagagaaatgtgatatattcagccttggtgttatcatgtgggagctgtgcacattgagtcgcccatgggaaggcatctccccagttcaagtggtgtacgcagttgctaatgaaggttcgcggcttgagattcctgaaggacctctcggcaggttgattgcagattgctgggcagagcctgagaatcggccgagctgccaggagatcctaacccgtttgctggactgcgaatacactgtcagctgaaatggaagctgctcgctcgtccactcaattcctgcacaggtggaaacatttcttgtataaaacctgtaaaaaaggctgccgattctgcggacttgaggtcacatatcgaagcgctgtgtttttttttaaacaatggcgaccctttctcaaaaaaaatgtaaaaatgattccctggttatagaagaacatgtctgattcgatagacgtgccttgcatcgcagggcaagctggttgttgtaccttattctagataagtagcacgcccgcgaatgctgttcggctttcaaatagctgcagctgcaaatttttacctgttgctacagtatttcctttctatataaccaggcggcagcagcagccgaatgttgccagtacgttggagatggcataagcaactccatgttgtgaactgttccctcgcgaccataaagaacatgccatcctagatttggaataaaaatattgtcaaaatttgtat

SEQ ID NO: 32360 - DNA, 2185 bp, Zea Mays
cggccggccaaccgaaaccacgccgaggcctatctctctccgagtttgatccagctccgtcccagcgccaactgctaatccggtaatccctcgccggcttggtgtcccggtcaaacctgccccgaccgacgggaggatccaacggcggccgctcgcccacacaacaaccatgcatctgcaccgctcctccacgtgccgcgtcgcggtcgtcacggcccacggcccggcgctcctcccccctcgccgaccaccccctctcccttcttctattccccaccccccgcctcgtctcctccaccgccgcccccacatctattcacccgtccgtccgttccttcgtctctacgcgcaaacgagagaaggctaggtcgtcgtcgtcgttgtcgtcgtgacgcggagagatctgggaggaggagcgatggacgggaagttgccgccgccgaacccgaacctgccgtaccgggaggactgctggagcgagggcgagacggccgcgctcgtcgacgcctggggctcgcgctacctcgacctcaaccgcgggagcctccgccagccacagtggcgggaggtcgccgacgccgtcaactctcgccccggggcctccgcgcgccgccgcccgccgcgcaccgacatccagtgcaagaaccgcgtcgacacgctcaagaagaagtacaaggccgagcgcgcgcgcggcgggccatcgcagtggaacttctacgcccagctcgacctcctcgtcgggcccacgctcaccggcatcaagaagccgtccccaccgcgcgccgcgctgcccgtgttccggaggcgcctgacgccgccgcgctccccgtcgccgcaatcaccgccgccgcttcccgtggcgctccccctgcacaattaccgccgtggctccgacctcccctccgcaaacctcatccataaggcggccgctgccgccgccgctgctgccgcggagtccgactcagaagatggctacaacaacaacgactatgacgatgacgaaggatctcagcagtcgccgtcgcgttctgtatcttcgggctttggtggtggtggtggtggtgctcctcctgctgttggcagcaagaggaagatgagcagtggcagtggtggtttcggggagctagcgagggcaattgagactttcgcggatatgtacgagcgcatggaagccgctaagcagcagcacgcggaggagatggagaggcagcgaatcaagttcctcaaggatctggagctgaagcggatgcaggcttttgtggacatgcagctacagctcgcgaggacaaagcacgccaggaagggtgacgcttcctcggatacgctcatgtctctcgctgcactgccattcctcagcagccctgcttatctctaaattggaagagttagaagttaagctacaagtaggcattgaggacagacaagtgttcagacttgctgctgatggaaagtacttgaccaagctaatgtaggagtccttttttattggttctgttcagtttgagccggctgacataatatgaaaatcatgggctcctgctaaatgcaagttcttgtggttggctgccatcgaaaatgttggacagataggctaagcaggagagggcttgatcatctagagcattgtcctttgtgtgatcaacatcaggaatctattgatcatcttttgacaaattgtgtgtttgctagagagttggtaccgcctgctaagtcaagtgaatctccagtttcttgctccacagcctgaggactggagctttgtggtttggtggagtctggcggctggtcagatcagtgcggttgctaggcgaggtctaaacgcactaattattcttggagtttggactctctggaaacacagaaatagttgtgtgtttgattaaaaatctcctaaaacattgaagaggtaattcgtaaggctgatcaagaaaaggagacgtggagtcgagccggggctggggatctttcactcctcagccctcattcctggtccctaagtctttgtggggtcgtgttctttaggttttatggatctattcatgtatttctgtttttggtggatctattcgtgtatttctgtttttggcctatgtaagttggctttgtgttcgtgttgttctagtccattttggactcaactctttcttcttaatataataatgcgtagttgtgcatttgagaaaaa

SEQ ID NO: 32361 - DNA, 2570 bp, Zea Mays
atctaaatttcaggctctaaaatttaaatgtcggatcgtatttgaattatactctatttttttatttttctcaaacaaattttaaagaaacatttgaactgcactagttccaccgttccaacttccacgttcctcccctgctcctcaaccttcccgagatcctggtgggcccggagcaccctccggcttccagttcctttgttcctcgcgaagtctcaccgcgctgcagagcgcatcgccgagcccccgcctcacctcgaattcttctcgcgtagttcgttgccctcctccttccccttctctcctcgacaagtacacggcggcttggatctatacgaattcggcatctgtattttacctcattggggatggaggtgcaggtgtttgatttgtcttccgactccgagggcgaggtgacggcgcactcgcccgatcacaagcgcccttctcgacagccgggtgcagaccctaatcgcgggggtggcgagacaggttccagcgccctggacagcctcttcgagcaagcgggcgcggcgaagccacagcgtcaccccagtgacgcgctgaagaaagggaaggagaaggccgtcgagggggagagcgcggggcctccgaagcacagtggagaattgctcggtgctgctggccgcgtcctgggatctgggagtggtccgtggagcgcactgatgagcaagtgcaaggctggagacggtgggaacaatggagctgggtgttggggtagttggggtgaccggggtgatcagcttactaactcaacccccatgccgcgtctagggtcagagaggaaggggtttgatgagacatatgaactgcgagggatgcctcagcttcacagtgattctgcagcatcgagtgaccactggaagggtattcttggtgcaagccctggtgatgtcagcccactgtggtgctccagggatactagcatgaaagataatgaggatgaaaccttctctcaaaggtctgtgtctgcacgtagctgtgattattttcttgtcgaagatactagcccgtcatggctgtcgaaggtcaaagggctgaacttcccacttcctgatgagcatcagtcgagaaccaggcagattgaaactgatgagatgtttgcccgcagacttcaggagcagctcaatcagcaacagctaggatctcagcattccgaagcggttgttacactggactactcaagccttatagcttatagggtgtttggtttgagaaataagctaatccgttattttctcactcaatttttttgtttaatttgtggaatggaataagttaatccatcaccacctcattcttcatcatagttagttagttcgtactaacatgaggaatgagtttatcccatcaaatttgtgtgatagacttataatgcagtaatgcaccacctcatcttgaatgtagtgattcatcaaaccaaacatctccttaatgtttctgtttcattttggtgtctttttcatcttaagtgatcttgccttttgtgtgcatgcttctgattagttgatgctgatgtaacaaatagcttttccattgctgacatcttgtagactgatacgacaatagcctggacattacatgagcaagacgctgagcatgccagatttgctgcaagagaaggccagtctagttctagccagagggacagatcaatggcacacctatattcttatggacgtcattcacccgttcaaaatttttctccttgggcatccaatcgtactccaattccaatgccaagaagaggaggtttgcaaagaaactccaactgtcctcaagtggagcaacgcaatatgcttatctctcagttaaccaggggatgtttcagagaagacatggatctcgaaacgaggttggctgtactggactcactttctgaagcatttaagaactgcgaggacacactttctccagattctgatgatgatgattatgaggacctcatagcacttgacgatgacaaccatcacagaggtgcttctgatgaccaaataaacagcctgccactatcactgatcgagggtgaaaattgttcagatgaaccctgtaatatatgcttggattgcccttctgctggcgattcactccggcatttgccttgcttgcacaagtttcacaaagagtgcattgacaggtggcttgggatgaagatatggtgtccgatttgcaaattaaatgtattctcccagtaggcactgggcatctcatacttttggggtagcatcgaaggtagattatagctcactaataggaatgatgactgtggagagtttttctggtagcagagaagggcagaaggcacggaaatcctcctgttcccgtctgttatataccttatcgtagtctgatatgcccaacagtatgtcagttttaggcggtgccataggacatgaggctggatccagtgccatttctcgatcatactttttatctattatactgttccagtgtatagtctctctttagcttacagtcactttagcgttatattagtttttatgttacatatatttatttaaatcagagtgttctattaaaataaaaaa

SEQ ID NO: 32362 - DNA, 2368 bp, Zea Mays
ccaccgttccaacttccacgttcctcccctgctcctcaaccttcccgagatcctggtgggcccggagcaccctccggcttccagttcctttgttcctcgcgaagtctcaccgcgctgcagagcgcatcgccgagcccccgcctcacctcgaattcttctcgcgtagttcgttgccctcctccttccccttctctcctcgacaagtacacggcggcttggatctatacgaattcggcatctgtattttacctcattggggatggaggtgcaggtgtttgatttgtcttccgactccgagggcgaggtgacggcgcactcgcccgatcacaagcgcccttctcgacagccgggtgcagaccctaatcgcgggggtggcgagacaggttccagcgccctggacagcctcttcgagcaagcgggcgcggcgaagccacagcgtcaccccagtgacgcgctgaagaaagggaaggagaaggccgtcgagggggagagcgcggggcctccgaagcacagtggagaattgctcggtgctgctggccgcgtcctgggatctgggagtggtccgtggagcgcactgatgagcaagtgcaaggctggagacggtgggaacaatggagctgggtgttggggtagttggggtgaccggggtgatcagcttactaactcaacccccatgccgcgtctagggtcagagaggaaggggtttgatgagacatatgaactgcgagggatgcctcagcttcacagtgattctgcagcatcgagtgaccactggaagggtattcttggtgcaagccctggtgatgtcagcccactgtggtgctccagggatactagcatgaaagataatgaggatgaaaccttctctcaaaggtctgtgtctgcacgtagctgtgattattttcttgtcgaagatactagcccgtcatggctgtcgaaggtcaaagggctgaacttcccacttcctgatgagcatcagtcgagaaccaggcagattgaaactgatgagatgtttgcccgcagacttcaggagcagctcaatcagcaacagctaggatctcagcattccgaagcgactgatacgacaatagcctggacattacatgagcaagacgctgagcatgccagatttgctgcaagagaaggccagtctagttctagccagagggacagatcaatggcacacctatattcttatggacgtcattcacccgttcaaaatttttctccttgggcatccaatcgtactccaattccaatgccaagaagaggaggtttgcaaagaaactccaactgtcctcaagtggagcaacgcaatatgcttatctctcagttaaccaggggatgtttcagagaagacatggatctcgaaacgaggttggctgtactggactcactttctgaagcatttaagaactgcgaggacacactttctccagattctgatgagtaagcatttactgttgtgtagcatttattttccacacaatgtttgtttagatggacatttccgcaatcatatgttctcttatcttgtttggttggttctgtgtttaccttgtaacacattctgcaaagttcgtaggtagaagtgtgaatgctccaaacaatcgatgtgtgctctgtagtaactagtaggtgcctgaaattgcttgtctcatagccctattttgaatgggatcctgttgacgcgttctttccttgcttatacatacttcttggttacatccgttctggctattcaattttttatcacttatagtgatgattatgaggacctcatagcacttgacgatgacaaccatcacagaggtgcttctgatgaccaaataaacagcctgccactatcactgatcgagatgaaccctgtaatatatgcttggattgcccttctgctggcgattcactccggcatttgccttgcttgcacaagtttcacaaagagtgcattgacaggtggcttgggatgaagatatggtgtccgatttgcaaattaaatgtattctcccagtaggcactgggcatctcatacttttggggtagcatcgaaggtagattatagctcactaataggaatgatgactgtggagagtttttctggtagcagagaagggcagaaggcacggaaatcctcctgttcccgtctgttatataccttatcgtagtctgatatgcccaacagtatgtcagttttaggcggtgccataggacatgaggctggatccagtgccatttctcgatcatactttttatctattatactgttccagtgtatagtctctctttagcttacagtcactttagcgttatattagtttttatgttacatatatttatttaaatcagagtgttctattaaaataaaaaa

SEQ ID NO: 32363 - DNA, 2623 bp, Zea Mays
caccgttccaacttccacgttcctcccctgctcctcaaccttcccgagatcctggtgggcccggagcaccctccggcttccagttcctttgttcctcgcgaagtctcaccgcgctgcagagcgcatcgccgagcccccgcctcacctcgaattcttctcgcgtagttcgttgccctcctccttccccttctctcctcgacaagtacacggcggcttggatctatacgaattcggcatctgtattttacctcattggggatggaggtgcaggtgtttgatttgtcttccgactccgagggcgaggtgacggcgcactcgcccgatcacaagcgcccttctcgacagccgggtgcagaccctaatcgcgggggtggcgagacaggttccagcgccctggacagcctcttcgagcaagcgggcgcggcgaagccacagcgtcaccccagtgacgcgctgaagaaagggaaggagaaggccgtcgagggggagagcgcggggcctccgaagcacagtggagaattgctcggtgctgctggccgcgtcctgggatctgggagtggtccgtggagcgcactgatgagcaagtgcaaggctggagacggtgggaacaatggagctgggtgttggggtagttggggtgaccggggtgatcagcttactaactcaacccccatgccgcgtctagggtcagagaggaaggggtttgatgagacatatgaactgcgagggatgcctcagcttcacagtgattctgcagcatcgagtgaccactggaagggtattcttggtgcaagccctggtgatgtcagcccactgtggtgctccagggatactagcatgaaagataatgaggatgaaaccttctctcaaagacttcaggagcagctcaatcagcaacagctaggatctcagcattccgaagcggttgttacactggactactcaagccttatagcttatagggtgtttggtttgagaaataagctaatccgttattttctcactcaatttttttgtttaatttgtggaatggaataagttaatccatcaccacctcattcttcatcatagttagttagttcgtactaacatgaggaatgagtttatcccatcaaatttgtgtgatagacttataatgcagtaatgcaccacctcatcttgaatgtagtgattcatcaaaccaaacatctccttaatgtttctgtttcattttggtgtctttttcatcttaagtgatcttgccttttgtgtgcatgcttctgattagttgatgctgatgtaacaaatagcttttccattgctgacatcttgtagactgatacgacaatagcctggacattacatgagcaagacgctgagcatgccagatttgctgcaagagaaggccagtctagttctagccagagggacagatcaatggcacacctatattcttatggacgtcattcacccgttcaaaatttttctccttgggcatccaatcgtactccaattccaatgccaagaagaggaggtttgcaaagaaactccaactgtcctcaagtggagcaacgcaatatgcttatctctcagttaaccaggggatgtttcagagaagacatggatctcgaaacgaggttggctgtactggactcactttctgaagcatttaagaactgcgaggacacactttctccagattctgatgagtaagcatttactgttgtgtagcatttattttccacacaatgtttgtttagatggacatttccgcaatcatatgttctcttatcttgtttggttggttctgtgtttaccttgtaacacattctgcaaagttcgtaggtagaagtgtgaatgctccaaacaatcgatgtgtgctctgtagtaactagtaggtgcctgaaattgcttgtctcatagccctattttgaatgggatcctgttgacgcgttctttccttgcttatacatacttcttggttacatccgttctggctattcaattttttatcacttatagtgatgattatgaggacctcatagcacttgacgatgacaaccatcacagaggtgcttctgatgaccaaataaacagcctgccactatcactgatcgagggtgaaaattgttcagatgaaccctgtaatatatgcttggattgcccttctgctggcgattcactccggcatttgccttgcttgcacaagtttcacaaagagtgcattgacaggtggcttgggatgaagatatggtgtccgatttgcaaattaaatgtattctcccagtaggcactgggcatctcatacttttggggtagcatcgaaggtagattatagctcactaataggaatgatgactgtggagagtttttctggtagcagagaagggcagaaggcacggaaatcctcctgttcccgtctgttatataccttatcgtagtctgatatgcccaacagtatgtcagttttaggcggtgccataggacatgaggctggatccagtgccatttctcgatcatactttttatctattatactgttccagtgtatagtctctctttagcttacagtcactttagcgttatattagtttttatgttacatatatttatttaaatcagagtgttctattaaaataaaaaa

SEQ ID NO: 32364 - DNA, 2047 bp, Zea Mays
ccaacttccacgttcctcccctgctcctcaaccttcccgagatcctggtgggcccggagcaccctccggcttccagttcctttgttcctcgcgaagtctcaccgcgctgcagagcgcatcgccgagcccccgcctcacctcgaattcttctcgcgtagttcgttgccctcctccttccccttctctcctcgacaagtacacggcggcttggatctatacgaattcggcatctgtattttacctcattggggatggaggtgcaggtgtttgatttgtcttccgactccgagggcgaggtgacggcgcactcgcccgatcacaagcgcccttctcgacagccgggtgcagaccctaatcgcgggggtggcgagacaggttccagcgccctggacagcctcttcgagcaagcgggcgcggcgaagccacagcgtcaccccagtgacgcgctgaagaaagggaaggagaaggccgtcgagggggagagcgcggggcctccgaagcacagtggagaattgctcggtgctgctggccgcgtcctgggatctgggagtggtccgtggagcgcactgatgagcaagtgcaaggctggagacggtgggaacaatggagctgggtgttggggtagttggggtgaccggggtgatcagcttactaactcaacccccatgccgcgtctagggtcagagaggaaggggtttgatgagacatatgaactgcgagggatgcctcagcttcacagtgattctgcagcatcgagtgaccactggaagggtattcttggtgcaagccctggtgatgtcagcccactgtggtgctccagggatactagcatgaaagataatgaggatgaaaccttctctcaaaggtctgtgtctgcacgtagctgtgattattttcttgtcgaagatactagcccgtcatggctgtcgaaggtcaaagggctgaacttcccacttcctgatgagcatcagtcgagaaccaggcagattgaaactgatgagatgtttgcccgcagacttcaggagcagctcaatcagcaacagctaggatctcagcattccgaagcgactgatacgacaatagcctggacattacatgagcaagacgctgagcatgccagatttgctgcaagagaaggccagtctagttctagccagagggacagatcaatggcacacctatattcttatggacgtcattcacccgttcaaaatttttctccttgggcatccaatcgtactccaattccaatgccaagaagaggaggtttgcaaagaaactccaactgtcctcaagtggagcaacgcaatatgcttatctctcagttaaccaggggatgtttcagagaagacatggatctcgaaacgaggttggctgtactggactcactttctgaagcatttaagaactgcgaggacacactttctccagattctgatgatgatgattatgaggacctcatagcacttgacgatgacaaccatcacagaggtgcttctgatgaccaaataaacagcctgccactatcactgatcgagatgaaccctgtaatatatgcttggattgcccttctgctggcgattcactccggcatttgccttgcttgcacaagtttcacaaagagtgcattgacaggtggcttgggatgaagatatggtgtccgatttgcaaattaaatgtattctcccagtaggcactgggcatctcatacttttggggtagcatcgaaggtagattatagctcactaataggaatgatgactgtggagagtttttctggtagcagagaagggcagaaggcacggaaatcctcctgttcccgtctgttatataccttatcgtagtctgatatgcccaacagtatgtcagttttaggcggtgccataggacatgaggctggatccagtgccatttctcgatcatactttttatctattatactgttccagtgtatagtctctctttagcttacagtcactttagcgttatattagtttttatgttacatatatttatttaaatcagagtgttctattaaaataaaaaa

SEQ ID NO: 32365 - DNA, 2222 bp, Zea Mays
cttccacgttcctcccctgctcctcaaccttcccgagatcctggtgggcccggagcaccctccggcttccagttcctttgttcctcgcgaagtctcaccgcgctgcagagcgcatcgccgagcccccgcctcacctcgaattcttctcgcgtagttcgttgccctcctccttccccttctctcctcgacaagtacacggcggcttggatctatacgaattcggcatctgtattttacctcattggggatggaggtgcaggtgtttgatttgtcttccgactccgagggcgaggtgacggcgcactcgcccgatcacaagcgcccttctcgacagccgggtgcagaccctaatcgcgggggtggcgagacaggttccagcgccctggacagcctcttcgagcaagcgggcgcggcgaagccacagcgtcaccccagtgacgcgctgaagaaagggaaggagaaggccgtcgagggggagagcgcggggcctccgaagcacagtggagaattgctcggtgctgctggccgcgtcctgggatctgggagtggtccgtggagcgcactgatgagcaagtgcaaggctggagacggtgggaacaatggagctgggtgttggggtagttggggtgaccggggtgatcagcttactaactcaacccccatgccgcgtctagggtcagagaggaaggggtttgatgagacatatgaactgcgagggatgcctcagcttcacagtgattctgcagcatcgagtgaccactggaagggtattcttggtgcaagccctggtgatgtcagcccactgtggtgctccagggatactagcatgaaagataatgaggatgaaaccttctctcaaagacttcaggagcagctcaatcagcaacagctaggatctcagcattccgaagcgactgatacgacaatagcctggacattacatgagcaagacgctgagcatgccagatttgctgcaagagaaggccagtctagttctagccagagggacagatcaatggcacacctatattcttatggacgtcattcacccgttcaaaatttttctccttgggcatccaatcgtactccaattccaatgccaagaagaggaggtttgcaaagaaactccaactgtcctcaagtggagcaacgcaatatgcttatctctcagttaaccaggggatgtttcagagaagacatggatctcgaaacgaggttggctgtactggactcactttctgaagcatttaagaactgcgaggacacactttctccagattctgatgagtaagcatttactgttgtgtagcatttattttccacacaatgtttgtttagatggacatttccgcaatcatatgttctcttatcttgtttggttggttctgtgtttaccttgtaacacattctgcaaagttcgtaggtagaagtgtgaatgctccaaacaatcgatgtgtgctctgtagtaactagtaggtgcctgaaattgcttgtctcatagccctattttgaatgggatcctgttgacgcgttctttccttgcttatacatacttcttggttacatccgttctggctattcaattttttatcacttatagtgatgattatgaggacctcatagcacttgacgatgacaaccatcacagaggtgcttctgatgaccaaataaacagcctgccactatcactgatcgagggtgaaaattgttcagatgaaccctgtaatatatgcttggattgcccttctgctggcgattcactccggcatttgccttgcttgcacaagtttcacaaagagtgcattgacaggtggcttgggatgaagatatggtgtccgatttgcaaattaaatgtattctcccagtaggcactgggcatctcatacttttggggtagcatcgaaggtagattatagctcactaataggaatgatgactgtggagagtttttctggtagcagagaagggcagaaggcacggaaatcctcctgttcccgtctgttatataccttatcgtagtctgatatgcccaacagtatgtcagttttaggcggtgccataggacatgaggctggatccagtgccatttctcgatcatactttttatctattatactgttccagtgtatagtctctctttagcttacagtcactttagcgttatattagtttttatgttacatatatttatttaaatcagagtgttctattaaaataaaaaa

SEQ ID NO: 32366 - DNA, 2036 bp, Zea Mays
cttccacgttcctcccctgctcctcaaccttcccgagatcctggtgggcccggagcaccctccggcttccagttcctttgttcctcgcgaagtctcaccgcgctgcagagcgcatcgccgagcccccgcctcacctcgaattcttctcgcgtagttcgttgccctcctccttccccttctctcctcgacaagtacacggcggcttggatctatacgaattcggcatctgtattttacctcattggggatggaggtgcaggtgtttgatttgtcttccgactccgagggcgaggtgacggcgcactcgcccgatcacaagcgcccttctcgacagccgggtgcagaccctaatcgcgggggtggcgagacaggttccagcgccctggacagcctcttcgagcaagcgggcgcggcgaagccacagcgtcaccccagtgacgcgctgaagaaagggaaggagaaggccgtcgagggggagagcgcggggcctccgaagcacagtggagaattgctcggtgctgctggccgcgtcctgggatctgggagtggtccgtggagcgcactgatgagcaagtgcaaggctggagacggtgggaacaatggagctgggtgttggggtagttggggtgaccggggtgatcagcttactaactcaacccccatgccgcgtctagggtcagagaggaaggggtttgatgagacatatgaactgcgagggatgcctcagcttcacagtgattctgcagcatcgagtgaccactggaagggtattcttggtgcaagccctggtgatgtcagcccactgtggtgctccagggatactagcatgaaagataatgaggatgaaaccttctctcaaaggtctgtgtctgcacgtagctgtgattattttcttgtcgaagatactagcccgtcatggctgtcgaaggtcaaagggctgaacttcccacttcctgatgagcatcagtcgagaaccaggcagattgaaactgatgagatgtttgcccgcagacttcaggagcagctcaatcagcaacagctaggatctcagcattccgaagcgactgatacgacaatagcctggacattacatgagcaagacgctgagcatgccagatttgctgcaagagaaggccagtctagttctagccagagggacagatcaatggcacacctatattcttatggacgtcattcacccgttcaaaatttttctccttgggcatccaatcgtactccaattccaatgccaagaagaggaggtttgcaaagaaactccaactgtcctcaagtggagcaacgcaatatgcttatctctcagttaaccaggggatgtttcagagaagacatggatctcgaaacgaggttggctgtactggactcactttctgaagcatttaagaactgcgaggacacactttctccagattctgatgacacttgacgatgacaaccatcacagaggtgcttctgatgaccaaataaacagcctgccactatcactgatcgagggtgaaaattgttcagatgaaccctgtaatatatgcttggattgcccttctgctggcgattcactccggcatttgccttgcttgcacaagtttcacaaagagtgcattgacaggtggcttgggatgaagatatggtgtccgatttgcaaattaaatgtattctcccagtaggcactgggcatctcatacttttggggtagcatcgaaggtagattatagctcactaataggaatgatgactgtggagagtttttctggtagcagagaagggcagaaggcacggaaatcctcctgttcccgtctgttatataccttatcgtagtctgatatgcccaacagtatgtcagttttaggcggtgccataggacatgaggctggatccagtgccatttctcgatcatactttttatctattatactgttccagtgtatagtctctctttagcttacagtcactttagcgttatattagtttttatgttacatatatttatttaaatcagagtgttctattaaaataaaaaa

SEQ ID NO: 32367 - DNA, 2742 bp, Zea Mays
cacgttcctcccctgctcctcaaccttcccgagatcctggtgggcccggagcaccctccggcttccagttcctttgttcctcgcgaagtctcaccgcgctgcagagcgcatcgccgagcccccgcctcacctcgaattcttctcgcgtagttcgttgccctcctccttccccttctctcctcgacaagtacacggcggcttggatctatacgaattcggcatctgtattttacctcattggggatggaggtgcaggtgtttgatttgtcttccgactccgagggcgaggtgacggcgcactcgcccgatcacaagcgcccttctcgacagccgggtgcagaccctaatcgcgggggtggcgagacaggttccagcgccctggacagcctcttcgagcaagcgggcgcggcgaagccacagcgtcaccccagtgacgcgctgaagaaagggaaggagaaggccgtcgagggggagagcgcggggcctccgaagcacagtggagaattgctcggtgctgctggccgcgtcctgggatctgggagtggtccgtggagcgcactgatgagcaagtgcaaggctggagacggtgggaacaatggagctgggtgttggggtagttggggtgaccggggtgatcagcttactaactcaacccccatgccgcgtctagggtcagagaggaaggggtttgatgagacatatgaactgcgagggatgcctcagcttcacagtgattctgcagcatcgagtgaccactggaagggtattcttggtgcaagccctggtgatgtcagcccactgtggtgctccagggatactagcatgaaagataatgaggatgaaaccttctctcaaaggtctgtgtctgcacgtagctgtgattattttcttgtcgaagatactagcccgtcatggctgtcgaaggtcaaagggctgaacttcccacttcctgatgagcatcagtcgagaaccaggcagattgaaactgatgagatgtttgcccgcagacttcaggagcagctcaatcagcaacagctaggatctcagcattccgaagcggttgttacactggactactcaagccttatagcttatagggtgtttggtttgagaaataagctaatccgttattttctcactcaatttttttgtttaatttgtggaatggaataagttaatccatcaccacctcattcttcatcatagttagttagttcgtactaacatgaggaatgagtttatcccatcaaatttgtgtgatagacttataatgcagtaatgcaccacctcatcttgaatgtagtgattcatcaaaccaaacatctccttaatgtttctgtttcattttggtgtctttttcatcttaagtgatcttgccttttgtgtgcatgcttctgattagttgatgctgatgtaacaaatagcttttccattgctgacatcttgtagactgatacgacaatagcctggacattacatgagcaagacgctgagcatgccagatttgctgcaagagaaggccagtctagttctagccagagggacagatcaatggcacacctatattcttatggacgtcattcacccgttcaaaatttttctccttgggcatccaatcgtactccaattccaatgccaagaagaggaggtttgcaaagaaactccaactgtcctcaagtggagcaacgcaatatgcttatctctcagttaaccaggggatgtttcagagaagacatggatctcgaaacgaggttggctgtactggactcactttctgaagcatttaagaactgcgaggacacactttctccagattctgatgagtaagcatttactgttgtgtagcatttattttccacacaatgtttgtttagatggacatttccgcaatcatatgttctcttatcttgtttggttggttctgtgtttaccttgtaacacattctgcaaagttcgtaggtagaagtgtgaatgctccaaacaatcgatgtgtgctctgtagtaactagtaggtgcctgaaattgcttgtctcatagccctattttgaatgggatcctgttgacgcgttctttccttgcttatacatacttcttggttacatccgttctggctattcaattttttatcacttatagtgatgattatgaggacctcatagcacttgacgatgacaaccatcacagaggtgcttctgatgaccaaataaacagcctgccactatcactgatcgagatgaaccctgtaatatatgcttggattgcccttctgctggcgattcactccggcatttgccttgcttgcacaagtttcacaaagagtgcattgacaggtggcttgggatgaagatatggtgtccgatttgcaaattaaatgtattctcccagtaggcactgggcatctcatacttttggggtagcatcgaaggtagattatagctcactaataggaatgatgactgtggagagtttttctggtagcagagaagggcagaaggcacggaaatcctcctgttcccgtctgttatataccttatcgtagtctgatatgcccaacagtatgtcagttttaggcggtgccataggacatgaggctggatccagtgccatttctcgatcatactttttatctattatactgttccagtgtatagtctctctttagcttacagtcactttagcgttatattagtttttatgttacatatatttatttaaatcagagtgttctattaaaataaaaaa

SEQ ID NO: 32368 - DNA, 1995 bp, Zea Mays
aaccttcccgagatcctggtgggcccggagcaccctccggcttccagttcctttgttcctcgcgaagtctcaccgcgctgcagagcgcatcgccgagcccccgcctcacctcgaattcttctcgcgtagttcgttgccctcctccttccccttctctcctcgacaagtacacggcggcttggatctatacgaattcggcatctgtattttacctcattggggatggaggtgcaggtgtttgatttgtcttccgactccgagggcgaggtgacggcgcactcgcccgatcacaagcgcccttctcgacagccgggtgcagaccctaatcgcgggggtggcgagacaggttccagcgccctggacagcctcttcgagcaagcgggcgcggcgaagccacagcgtcaccccagtgacgcgctgaagaaagggaaggagaaggccgtcgagggggagagcgcggggcctccgaagcacagtggagaattgctcggtgctgctggccgcgtcctgggatctgggagtggtccgtggagcgcactgatgagcaagtgcaaggctggagacggtgggaacaatggagctgggtgttggggtagttggggtgaccggggtgatcagcttactaactcaacccccatgccgcgtctagggtcagagaggaaggggtttgatgagacatatgaactgcgagggatgcctcagcttcacagtgattctgcagcatcgagtgaccactggaagggtattcttggtgcaagccctggtgatgtcagcccactgtggtgctccagggatactagcatgaaagataatgaggatgaaaccttctctcaaaggtctgtgtctgcacgtagctgtgattattttcttgtcgaagatactagcccgtcatggctgtcgaaggtcaaagggctgaacttcccacttcctgatgagcatcagtcgagaaccaggcagattgaaactgatgagatgtttgcccgcagacttcaggagcagctcaatcagcaacagctaggatctcagcattccgaagcgactgatacgacaatagcctggacattacatgagcaagacgctgagcatgccagatttgctgcaagagaaggccagtctagttctagccagagggacagatcaatggcacacctatattcttatggacgtcattcacccgttcaaaatttttctccttgggcatccaatcgtactccaattccaatgccaagaagaggaggtttgcaaagaaactccaactgtcctcaagtggagcaacgcaatatgcttatctctcagttaaccaggggatgtttcagagaagacatggatctcgaaacgaggttggctgtactggactcactttctgaagcatttaagaactgcgaggacacactttctccagattctgatgacacttgacgatgacaaccatcacagaggtgcttctgatgaccaaataaacagcctgccactatcactgatcgagatgaaccctgtaatatatgcttggattgcccttctgctggcgattcactccggcatttgccttgcttgcacaagtttcacaaagagtgcattgacaggtggcttgggatgaagatatggtgtccgatttgcaaattaaatgtattctcccagtaggcactgggcatctcatacttttggggtagcatcgaaggtagattatagctcactaataggaatgatgactgtggagagtttttctggtagcagagaagggcagaaggcacggaaatcctcctgttcccgtctgttatataccttatcgtagtctgatatgcccaacagtatgtcagttttaggcggtgccataggacatgaggctggatccagtgccatttctcgatcatactttttatctattatactgttccagtgtatagtctctctttagcttacagtcactttagcgttatattagtttttatgttacatatatttatttaaatcagagtgttctattaaaataaaaaa

SEQ ID NO: 32369 - DNA, 1978 bp, Zea Mays
cgagatcctggtgggcccggagcaccctccggcttccagttcctttgttcctcgcgaagtctcaccgcgctgcagagcgcatcgccgagcccccgcctcacctcgaattcttctcgcgtagttcgttgccctcctccttccccttctctcctcgacaagtacacggcggcttggatctatacgaattcggcatctgtattttacctcattggggatggaggtgcaggtgtttgatttgtcttccgactccgagggcgaggtgacggcgcactcgcccgatcacaagcgcccttctcgacagccgggtgcagaccctaatcgcgggggtggcgagacaggttccagcgccctggacagcctcttcgagcaagcgggcgcggcgaagccacagcgtcaccccagtgacgcgctgaagaaagggaaggagaaggccgtcgagggggagagcgcggggcctccgaagcacagtggagaattgctcggtgctgctggccgcgtcctgggatctgggagtggtccgtggagcgcactgatgagcaagtgcaaggctggagacggtgggaacaatggagctgggtgttggggtagttggggtgaccggggtgatcagcttactaactcaacccccatgccgcgtctagggtcagagaggaaggggtttgatgagacatatgaactgcgagggatgcctcagcttcacagtgattctgcagcatcgagtgaccactggaagggtattcttggtgcaagccctggtgatgtcagcccactgtggtgctccagggatactagcatgaaagataatgaggatgaaaccttctctcaaaggtctgtgtctgcacgtagctgtgattattttcttgtcgaagatactagcccgtcatggctgtcgaaggtcaaagggctgaacttcccacttcctgatgagcatcagtcgagaaccaggcagattgaaactgatgagatgtttgcccgcagacttcaggagcagctcaatcagcaacagctaggatctcagcattccgaagcgactgatacgacaatagcctggacattacatgagcaagacgctgagcatgccagatttgctgcaagagaaggccagtctagttctagccagagggacagatcaatggcacacctatattcttatggacgtcattcacccgttcaaaatttttctccttgggcatccaatcgtactccaattccaatgccaagaagaggaggtttgcaaagaaactccaactgtcctcaagtggagcaacgcaatatgcttatctctcagttaaccaggggatgtttcagagaagacatggatctcgaaacgaggttggctgtactggactcactttctgaagcatttaagaactgcgaggacacactttctccagattctgatgaaggtgcttctgatgaccaaataaacagcctgccactatcactgatcgagggtgaaaattgttcagatgaaccctgtaatatatgcttggattgcccttctgctggcgattcactccggcatttgccttgcttgcacaagtttcacaaagagtgcattgacaggtggcttgggatgaagatatggtgtccgatttgcaaattaaatgtattctcccagtaggcactgggcatctcatacttttggggtagcatcgaaggtagattatagctcactaataggaatgatgactgtggagagtttttctggtagcagagaagggcagaaggcacggaaatcctcctgttcccgtctgttatataccttatcgtagtctgatatgcccaacagtatgtcagttttaggcggtgccataggacatgaggctggatccagtgccatttctcgatcatactttttatctattatactgttccagtgtatagtctctctttagcttacagtcactttagcgttatattagtttttatgttacatatatttatttaaatcagagtgttctattaaaataaaaaa

SEQ ID NO: 32370 - DNA, 2121 bp, Zea Mays
cgagatcctggtgggcccggagcaccctccggcttccagttcctttgttcctcgcgaagtctcaccgcgctgcagagcgcatcgccgagcccccgcctcacctcgaattcttctcgcgtagttcgttgccctcctccttccccttctctcctcgacaagtacacggcggcttggatctatacgaattcggcatctgtattttacctcattggggatggaggtgcaggtgtttgatttgtcttccgactccgagggcgaggtgacggcgcactcgcccgatcacaagcgcccttctcgacagccgggtgcagaccctaatcgcgggggtggcgagacaggttccagcgccctggacagcctcttcgagcaagcgggcgcggcgaagccacagcgtcaccccagtgacgcgctgaagaaagggaaggagaaggccgtcgagggggagagcgcggggcctccgaagcacagtggagaattgctcggtgctgctggccgcgtcctgggatctgggagtggtccgtggagcgcactgatgagcaagtgcaaggctggagacggtgggaacaatggagctgggtgttggggtagttggggtgaccggggtgatcagcttactaactcaacccccatgccgcgtctagggtcagagaggaaggggtttgatgagacatatgaactgcgagggatgcctcagcttcacagtgattctgcagcatcgagtgaccactggaagggtattcttggtgcaagccctggtgatgtcagcccactgtggtgctccagggatactagcatgaaagataatgaggatgaaaccttctctcaaagactgatacgacaatagcctggacattacatgagcaagacgctgagcatgccagatttgctgcaagagaaggccagtctagttctagccagagggacagatcaatggcacacctatattcttatggacgtcattcacccgttcaaaatttttctccttgggcatccaatcgtactccaattccaatgccaagaagaggaggtttgcaaagaaactccaactgtcctcaagtggagcaacgcaatatgcttatctctcagttaaccaggggatgtttcagagaagacatggatctcgaaacgaggttggctgtactggactcactttctgaagcatttaagaactgcgaggacacactttctccagattctgatgagtaagcatttactgttgtgtagcatttattttccacacaatgtttgtttagatggacatttccgcaatcatatgttctcttatcttgtttggttggttctgtgtttaccttgtaacacattctgcaaagttcgtaggtagaagtgtgaatgctccaaacaatcgatgtgtgctctgtagtaactagtaggtgcctgaaattgcttgtctcatagccctattttgaatgggatcctgttgacgcgttctttccttgcttatacatacttcttggttacatccgttctggctattcaattttttatcacttatagtgatgattatgaggacctcatagcacttgacgatgacaaccatcacagaggtgcttctgatgaccaaataaacagcctgccactatcactgatcgagatgaaccctgtaatatatgcttggattgcccttctgctggcgattcactccggcatttgccttgcttgcacaagtttcacaaagagtgcattgacaggtggcttgggatgaagatatggtgtccgatttgcaaattaaatgtattctcccagtaggcactgggcatctcatacttttggggtagcatcgaaggtagattatagctcactaataggaatgatgactgtggagagtttttctggtagcagagaagggcagaaggcacggaaatcctcctgttcccgtctgttatataccttatcgtagtctgatatgcccaacagtatgtcagttttaggcggtgccataggacatgaggctggatccagtgccatttctcgatcatactttttatctattatactgttccagtgtatagtctctctttagcttacagtcactttagcgttatattagtttttatgttacatatatttatttaaatcagagtgttctattaaaataaaaaa

SEQ ID NO: 32371 - DNA, 2400 bp, Zea Mays
cgagatcctggtgggcccggagcaccctccggcttccagttcctttgttcctcgcgaagtctcaccgcgctgcagagcgcatcgccgagcccccgcctcacctcgaattcttctcgcgtagttcgttgccctcctccttccccttctctcctcgacaagtacacggcggcttggatctatacgaattcggcatctgtattttacctcattggggatggaggtgcaggtgtttgatttgtcttccgactccgagggcgaggtgacggcgcactcgcccgatcacaagcgcccttctcgacagccgggtgcagaccctaatcgcgggggtggcgagacaggttccagcgccctggacagcctcttcgagcaagcgggcgcggcgaagccacagcgtcaccccagtgacgcgctgaagaaagggaaggagaaggccgtcgagggggagagcgcggggcctccgaagcacagtggagaattgctcggtgctgctggccgcgtcctgggatctgggagtggtccgtggagcgcactgatgagcaagtgcaaggctggagacggtgggaacaatggagctgggtgttggggtagttggggtgaccggggtgatcagcttactaactcaacccccatgccgcgtctagggtcagagaggaaggggtttgatgagacatatgaactgcgagggatgcctcagcttcacagtgattctgcagcatcgagtgaccactggaagggtattcttggtgcaagccctggtgatgtcagcccactgtggtgctccagggatactagcatgaaagataatgaggatgaaaccttctctcaaaggtctgtgtctgcacgtagctgtgattattttcttgtcgaagatactagcccgtcatggctgtcgaaggtcaaagggctgaacttcccacttcctgatgagcatcagtcgagaaccaggcagattgaaactgatgagatgtttgcccgcagacttcaggagcagctcaatcagcaacagctaggatctcagcattccgaagcggttgttacactggactactcaagccttatagcttatagggtgtttggtttgagaaataagctaatccgttattttctcactcaatttttttgtttaatttgtggaatggaataagttaatccatcaccacctcattcttcatcatagttagttagttcgtactaacatgaggaatgagtttatcccatcaaatttgtgtgatagacttataatgcagtaatgcaccacctcatcttgaatgtagtgattcatcaaaccaaacatctccttaatgtttctgtttcattttggtgtctttttcatcttaagtgatcttgccttttgtgtgcatgcttctgattagttgatgctgatgtaacaaatagcttttccattgctgacatcttgtagactgatacgacaatagcctggacattacatgagcaagacgctgagcatgccagatttgctgcaagagaaggccagtctagttctagccagagggacagatcaatggcacacctatattcttatggacgtcattcacccgttcaaaatttttctccttgggcatccaatcgtactccaattccaatgccaagaagaggaggtttgcaaagaaactccaactgtcctcaagtggagcaacgcaatatgcttatctctcagttaaccaggggatgtttcagagaagacatggatctcgaaacgaggttggctgtactggactcactttctgaagcatttaagaactgcgaggacacactttctccagattctgatgatgatgattatgaggacctcatagcacttgacgatgacaaccatcacagaggtgcttctgatgaccaaataaacagcctgccactatcactgatcgagatgaaccctgtaatatatgcttggattgcccttctgctggcgattcactccggcatttgccttgcttgcacaagtttcacaaagagtgcattgacaggtggcttgggatgaagatatggtgtccgatttgcaaattaaatgtattctcccagtaggcactgggcatctcatacttttggggtagcatcgaaggtagattatagctcactaataggaatgatgactgtggagagtttttctggtagcagagaagggcagaaggcacggaaatcctcctgttcccgtctgttatataccttatcgtagtctgatatgcccaacagtatgtcagttttaggcggtgccataggacatgaggctggatccagtgccatttctcgatcatactttttatctattatactgttccagtgtatagtctctctttagcttacagtcactttagcgttatattagtttttatgttacatatatttatttaaatcagagtgttctattaaaataaaaaa

SEQ ID NO: 32372 - DNA, 1645 bp, Zea Mays
ctggcgtgctggagtggcggccctgagaatggttccatagattgttcagatcggcaaatgaacattattaacttggaagatgttgattcaacagataaccaatggtgcttcagatgaaatgatcagcaagctacatgcggaccggaaagggcccaataattcctcggaaaaaaagtttattgagtactagtagtttggagatgatctaaacattcgtaaggactcactttttgactgcctaccaaactgaactctctcgcggtcgcagagcaggccggcagcatccttttggccaccaaaagaatcctaaaatggtatatttaaaaaaaaagcagaatctaataaaccaaaaggacagggcttggactactggtaggtgcgaaaagggcgccggggccgcggccgcaagcttccggccgtccggcatcacgcgggaaggaaggcggagccctaccccgcgcccccctacgaccgccgagtcaacgcggcccgcccacctcctcggcggctgcgggggcggacgacgcggcggcagcgacgggcgccgatcgggcggtggggcgcggcctgcggcggcccggggacgcggaggccacgcggcggagcgcgccgccggccgtccagtagcggcggcaggcgcggcagaggtggcgcggctgccgcacgttgtagttgttgaagtagcagaacttggtctcccggctgccgcaccgcgggcacggcagcggctcggcgccgggacccccagccgcgggcgcctgctgcgggggcgggggcgggggagggggaggaggaggaggaagggccgtctgtggcgtcgggtcgtcgccctcgtccgccccgcgtttttgcgcgtcggggggctggatgaccttgccgaacagcttgaaccccgcggcgtcggcgtccgggaggttggcggccatggatggagcgggaggaggggcccggggtgggtgggtgggtaggggacgacggccggcgccggctttttatacactactagggaggagagggagtggagatggtcatcgcctcgcctccccgctcttctcacttttgcttcatgcgcctgacttctttgcgtgaccacccgcccggccccggtactagtagtaataagccatgtggtcggatagatggatggatcatgcacggatttggtctctctctagtagtctccctcccagctgttaagattggaaggtctggctggaggctggactggagcggagatttggccgcgcaagggtttgattggtccgccagggccaggccacacagatcgatcgctcgctcgcccagaaccaccagtgccactttttggtcgccagcctctcgtcgggttgacctttttgatgagtatcatagtaattcataaccggttgactttcatggtcgcagcttagttttttttttctttttttgtgaataaaatggattgggcgcatgtggggaagcgattcttgtgtgtgggagactcaaagctcgatcggaagcggcaggggaaataaaggggtcttgtttagtcgctaagcaaacacggacagtacagtactgcatggttcatggaagggattgcctggttggtactagtacttgctacgaggccgacatgtgccagagagtacccaactgatctctc

SEQ ID NO: 32373 - DNA, 1039 bp, Zea Mays
gccaaaaccgcgtccactttcaataacgagcggccaacccaacccaacccaacccaccactgcctccctccccgttccccagtccccaccccgaccggctgctcctcctcctttccccgcgccatcctcgaggcatcaccggcgccgcaacttcgttgaggaggaagcccgcacccgcccccgatccgatggccaacagcaacctcccgcggcggatcatcaaggagacgcagcgactgctcagcgagccagcgccggggatcagcgcgtcgccctcggaggagaacatgcgctacttcaacgttatgatccttgggccggcgcagtcgccctatgaaggtggagtttttaagcttgaactctttttacctgaggaatatcccatggctgccccaaagtatacaggctctactgagtgcaccaaatccagatgaccctctctccgataacattgcaaagcactggaaatccaatgaggtagaagctgttgaaacagccaaggagtggactcgcctgtatgcgagcggtgcatgagagcgcagtgctgttcttggtgtaataaccccatcatacttcagtcctaatccgttgccatttgcttgataaaaatagactggagatatttgccatggaatgaagtctctaaatgactaccactctgaattgtttggttgtacacctgtggtcggttccctttacctttgggcacctttgactaatcagtatatgtggtagaacttgcagttactctaatatatttgtcacttcatgtagaagagcttctcaactgttcataatgttggaactgaggctggttagcttggttgcattttcgctgtaccttcctctgttcgcctgtcgactgtcgcctgagaacgaattttgccgaaactcgagttgcacctggtcatgttttctacgatgtgctttcttattaggtgatcacaggttggttttatcacaacacttcggctgttttgcggggatttgttttatcgcaatacattttggcagtcataatctcgaggaatatgaaaat

SEQ ID NO: 32374 - DNA, 1040 bp, Zea Mays
gccaaaaccgcgtccactttcaataacgagcggccaacccaacccaacccaacccaccactgcctccctccccgttccccagtccccaccccgaccggctgctcctcctcctttccccgcgccatcctcgaggcatcaccggcgccgcaacttcgttgaggaggaagcccgcacccgcccccgatccgatggccaacagcaacctcccgcggcggatcatcaaggtggagtttttaagcttgaactctttttacctgaggaatatcccatggctgccccaaaggttaggtttctgaccaagatttatcatcccaacattgacaagcttggtaggatatgcctcgacattctcaaggacaaatggagcccagcacttcagattcgaacagttcttttgagtatacaggctctactgagtgcaccaaatccagatgaccctctctccgataacattgcaaagcactggaaatccaatgaggtagaagctgttgaaacagccaaggagtggactcgcctgtatgcgagcggtgcatgagagcgcagtgctgttcttggtgtaataaccccatcatacttcagtcctaatccgttgccatttgcttgataaaaatagactggagatatttgccatggaatgaagtctctaaatgactaccactctgaattgtttggttgtacacctgtggtcggttccctttacctttgggcacctttgactaatcagtatatgtggtagaacttgcagttactctaatatatttgtcacttcatgtagaagagcttctcaactgttcataatgttggaactgaggctggttagcttggttgcattttcgctgtaccttcctctgttcgcctgtcgactgtcgcctgagaacgaattttgccgaaactcgagttgcacctggtcatgttttctacgatgtgctttcttattaggtgatcacaggttggttttatcacaacacttcggctgttttgcggggatttgttttatcgcaatacattttggcagtcataatctcgaggaatatgaaaat

SEQ ID NO: 32375 - DNA, 1148 bp, Zea Mays
gccaaaaccgcgtccactttcaataacgagcggccaacccaacccaacccaacccaccactgcctccctccccgttccccagtccccaccccgaccggctgctcctcctcctttccccgcgccatcctcgaggcatcaccggcgccgcaacttcgttgaggaggaagcccgcacccgcccccgatccgatggccaacagcaacctcccgcggcggatcatcaaggagacgcagcgactgctcagcgagccagcgccggggatcagcgcgtcgccctcggaggagaacatgcgctacttcaacgttatgatccttgggccggcgcagtcgccctatgaaggtggagtttttaagcttgaactctttttacctgaggaatatcccatggctgccccaaaggttaggtttctgaccaagatttatcatcccaacattgacaagcttggtaggatatgcctcgacattctcaaggacaaatggagcccagcacttcagattcgaacagttcttttgaggctctactgagtgcaccaaatccagatgaccctctctccgataacattgcaaagcactggaaatccaatgaggtagaagctgttgaaacagccaaggagtggactcgcctgtatgcgagcggtgcatgagagcgcagtgctgttcttggtgtaataaccccatcatacttcagtcctaatccgttgccatttgcttgataaaaatagactggagatatttgccatggaatgaagtctctaaatgactaccactctgaattgtttggttgtacacctgtggtcggttccctttacctttgggcacctttgactaatcagtatatgtggtagaacttgcagttactctaatatatttgtcacttcatgtagaagagcttctcaactgttcataatgttggaactgaggctggttagcttggttgcattttcgctgtaccttcctctgttcgcctgtcgactgtcgcctgagaacgaattttgccgaaactcgagttgcacctggtcatgttttctacgatgtgctttcttattaggtgatcacaggttggttttatcacaacacttcggctgttttgcggggatttgttttatcgcaatacattttggcagtcataatctcgaggaatatgaaaat

SEQ ID NO: 32376 - DNA, 887 bp, Zea Mays
attcttttcaaaatatgccaccggaaatgggggaaatgctgagatgtttgctttagtctgtgcgcacataggtggagtttttaagcttgaactctttttacctgaggaatatcccatggctgccccaaaggttaggtttctgaccaagatttatcatcccaacattgacaagcttggtaggatatgcctcgacattctcaaggacaaatggagcccagcacttcagattcgaacagttcttttgagtatacaggctctactgagtgcaccaaatccagatgaccctctctccgataacattgcaaagcactggaaatccaatgaggtagaagctgttgaaacagccaaggagtggactcgcctgtatgcgagcggtgcatgagagcgcagtgctgttcttggtgtaataaccccatcatacttcagtcctaatccgttgccatttgcttgataaaaatagactggagatatttgccatggaatgaagtctctaaatgactaccactctgaattgtttggttgtacacctgtggtcggttccctttacctttgggcacctttgactaatcagtatatgtggtagaacttgcagttactctaatatatttgtcacttcatgtagaagagcttctcaactgttcataatgttggaactgaggctggttagcttggttgcattttcgctgtaccttcctctgttcgcctgtcgactgtcgcctgagaacgaattttgccgaaactcgagttgcacctggtcatgttttctacgatgtgctttcttattaggtgatcacaggttggttttatcacaacacttcggctgttttgcggggatttgttttatcgcaatacattttggcagtcataatctcgaggaatatgaaaat

SEQ ID NO: 32377 - DNA, 861 bp, Zea Mays
ctcagcttctatctgcagcattctattagctatgttaaagggcaggtggagtttttaagcttgaactctttttacctgaggaatatcccatggctgccccaaaggttaggtttctgaccaagatttatcatcccaacattgacaagcttggtaggatatgcctcgacattctcaaggacaaatggagcccagcacttcagattcgaacagttcttttgagtatacaggctctactgagtgcaccaaatccagatgaccctctctccgataacattgcaaagcactggaaatccaatgaggtagaagctgttgaaacagccaaggagtggactcgcctgtatgcgagcggtgcatgagagcgcagtgctgttcttggtgtaataaccccatcatacttcagtcctaatccgttgccatttgcttgataaaaatagactggagatatttgccatggaatgaagtctctaaatgactaccactctgaattgtttggttgtacacctgtggtcggttccctttacctttgggcacctttgactaatcagtatatgtggtagaacttgcagttactctaatatatttgtcacttcatgtagaagagcttctcaactgttcataatgttggaactgaggctggttagcttggttgcattttcgctgtaccttcctctgttcgcctgtcgactgtcgcctgagaacgaattttgccgaaactcgagttgcacctggtcatgttttctacgatgtgctttcttattaggtgatcacaggttggttttatcacaacacttcggctgttttgcggggatttgttttatcgcaatacattttggcagtcataatctcgaggaatatgaaaat

SEQ ID NO: 32378 - DNA, 2024 bp, Zea Mays
cagacaccacacagcagcaggactgcatgagcagcagagggcagagcacgggcacggccgtccgcaacgcaagggcttgcaggacgagaggatggtgcagacgttcgtggccgcctacgcgcagccgccgccgcatcaggacggcttctacccaaaggaagccgtgatggcggccgtggaggagtgcatgcggaagcaggccgacgcgctgctgcactcgctcgacggcatcgggggcaggctttcgcagctcgagctctactgctacaagctcgagaggtccatcggggaactgcgcagcgacgtcatggactaccacagcgagagcaccaccaacttcagatgcatcgacaagaacctcggacaggtccacaaatccttgcaggttcttcaggataggcaggacttggctgaaactccaaaagaactcagcaaacttcaaatagcacatgaggcaccctctcatcagaagggtgaggccaccggttttcccatgcttgcgccaagggaaaatgaccacatcacacaagctccaaaacatgaggttgcccttttgcgacttcaccaagttaatgggatgcagtcccctgccgtgcaggtccaaaccagcggtggctttgttctgcagcacctggtgcctgtctctttgagcacgcagcatgatcagcagcaattgaaccaggctcctgtgtactatgtgcaaagccaggatcatgctaaatccacagagagcaaggcgttggaacctttggttcaaggtgtgcagccacttgtccacaaccctgaagtcatggctcaagttgagctacctcagaaacctaatcaagcaactgaattgtaccctcaacctcagaatcacagactacagatgcctacccagcaggttgattcgcatacatggcatccccaacagcccatggtgcaacagcaccaatacattatccaacaagtttcacgacacatggctcaacagcagtcctcgtctcctcattctcagagtgctcaagccacacccttgtttcctccattcagctccccgaagcctgctagttctaacactgatccaattacaagaagtatggctgggcaacctccatactcttcatcgcagcagcagcatgaagtcgcccattcattttatggccaaggcaatacaatattggttcctgtagctgatcataatgctcagcatcagcaatcgcaatcagtgcagctacacagccagggcacctgtctacctcaaccaagcaagcccagtcactgcagtgttgcatcctatgctgttcaaggaaatggtcagacctacagctccacatacaagaacccttctaactgccctgcaactgtcgtagctcttctgcctcagcctccagctactgcttctatggcgtatcatcccttgggaccacaggtcgtgcacaatcatccatttggaaatatggttgaaacggctagtgtggtagggtattcacgggaccaaggtgagatactcccagtggtgactgcagtacaacccgtgatggttgataagcttaatgctggcagcaacgtaacatcccctcgtgaatggtcagcatagtggacgatgtgccatcgtacacttcactgcttccacaacttactactgcacatattgcagttggaagctcatcaggtctattttatctggctcctttttttccatcagccagcagattagaatagatccttctacctttttcagctgaaggtcagtatgaaataagaaaagtaggttagctgagtgatcactgttggcatatgtcctcacttttaatgggcatatcttcttgtaaccggttgcgaacttatatgccttatatgaatacatgatgggtttacatcagcttgccagatgtttgctaggtaacattagttttaagcggtagctgctgctttctcacagaatctgtcacgcatgatctagttggttatgttactgtgtatgtcatgaagacattagctatacttgaaaattttgttgatggatttcatctcatctactt

SEQ ID NO: 32379 - DNA, 2835 bp, Zea Mays
ccatccccggccacccctatccaccgctgcaccgccacccccaccccgcccacgccagatttcgccagatctcaggccacatgtggacgggctccgccgagagctgaagcaaagagcttggcattatccgtctcgctctccgaggtccaccacgctcgctctccgcttccccagccccaccgccatttttatcccacttgctcggcgctgcccccatttttattcctccccgcgcctcgaaccccaccacggtacccacagctctcgccgctatagctccgccgccgctttgcttgcctcctcagttttcaccctcgcagtcacggacatctggctgtttttacattgggactctgctttttcctgcctgcaacagcgactcctctttccccgcctcttcctcctcccgcttcggattcccaacccccccgctcaggcctcttcccttcacagcaccaacccaaaaccctagccgcaacgcctacgcatggcttcccccgcgcgccccgccgccacctccgtctccggcgccttcggccttccccccgacgcgcgctgctcctacgaccagccccgccgccgcgaggacgagaggatggtgcagacgttcgtggccgcctacgcgcagccgccgccgcatcaggacggcttctacccaaaggaagccgtgatggcggccgtggaggagtgcatgcggaagcaggccgacgcgctgctgcactcgctcgacggcatcgggggcaggctttcgcagctcgagctctactgctacaagctcgagaggtccatcggggaactgcgcagcgacgtcatggactaccacagcgagagcaccaccaacttcagatgcatcgacaagaacctcggacaggtgcgtccgcgcgtgccttctccgtgcatcttggatcccggtgtgcaccacctggcttctggagtactactggtgtgctagtgttctggtaatgtcgccgagtaatggcagacaatgacagtgcgagatttccaatttctcactaatatttggtgtaaaatgacttaactgattatttatttccctgaaagctagtacattcagtggagtcaacttatggttcccggagatgagatttgtatcacttggctctgagactaacagctactagcatctttggtaactagatctacattttggatgccaggtccacaaatccttgcaggttcttcaggataggcaggacttggctgaaactccaaaagaactcagcaaacttcaaatagcacatgaggcaccctctcatcagaagggtgaggccaccggttttcccatgcttgcgccaagggaaaatgaccacatcacacaagctccaaaacatgaggttgcccttttgcgacttcaccaagttaatgggatgcagtcccctgccgtgcaggtccaaaccagcggtggctttgttctgcagcacctggtgcctgtctctttgagcacgcagcatgatcagcagcaattgaaccaggctcctgtgtactatgtgcaaagccaggatcatgctaaatccacagagagcaaggcgttggaacctttggttcaaggtgtgcagccacttgtccacaaccctgaagtcatggctcaagttgagctacctcagaaacctaatcaagcaactgaattgtaccctcaacctcagaatcacagactacagatgcctacccagcaggttgattcgcatacatggcatccccaacagcccatggtgcaacagcaccaatacattatccaacaagtttcacgacacatggctcaacagcagtcctcgtctcctcattctcagagtgctcaagccacacccttgtttcctccattcagctccccgaagcctgctagttctaacactgatccaattacaagaagtatggctgggcaacctccatactcttcatcgcagcagcagcatgaagtcgcccattcattttatggccaaggcaatacaatattggttcctgtagctgatcataatgctcagcatcagcaatcgcaatcagtgcagctacacagccagggcacctgtctacctcaaccaagcaagcccagtcactgcagtgttgcatcctatgctgttcaaggaaatggtcagacctacagctccacatacaagaacccttctaactgccctgcaactgtcgtagctcttctgcctcagcctccagctactgcttctatggcgtatcatcccttgggaccacaggtcgtgcacaatcatccatttggaaatatggttgaaacggctagtgtggtagggtattcacgggaccaaggtgagatactcccagtggtgactgcagtacaacccgtgatggttgataagcttaatgctggcagcaacgtaacatcccctcgtgaatggtcagcatagtggacgatgtgccatcgtacacttcactgcttccacaacttactactgcacatattgcagttggaagctcatcaggtctattttatctggctcctttttttccatcagccagcagattagaatagatccttctacctttttcagctgaaggtcagtatgaaataagaaaagtaggttagctgagtgatcactgttggcatatgtcctcacttttaatgggcatatcttcttgtaaccggttgcgaacttatatgccttatatgaatacatgatgggtttacatcagcttgccagatgtttgctaggtaacattagttttaagcggtagctgctgctttctcacagaatctgtcacgcatgatctagttggttatgttactgtgtatgtcatgaagacattagctatacttgaaaattttgttgatggatttcatctcatctactt

SEQ ID NO: 32380 - DNA, 2399 bp, Zea Mays
ccccggccacccctatccaccgctgcaccgccacccccaccccgcccacgccagatttcgccagatctcaggccacatgtggacgggctccgccgagagctgaagcaaagagcttggcattatccgtctcgctctccgaggtccaccacgctcgctctccgcttccccagccccaccgccatttttatcccacttgctcggcgctgcccccatttttattcctccccgcgcctcgaaccccaccacggtacccacagctctcgccgctatagctccgccgccgctttgcttgcctcctcagttttcaccctcgcagtcacggacatctggctgtttttacattgggactctgctttttcctgcctgcaacagcgactcctctttccccgcctcttcctcctcccgcttcggattcccaacccccccgctcaggcctcttcccttcacagcaccaacccaaaaccctagccgcaacgcctacgcatggcttcccccgcgcgccccgccgccacctccgtctccggcgccttcggccttccccccgacgcgcgctgctcctacgaccagccccgccgccgcgaggacgagaggatggtgcagacgttcgtggccgcctacgcgcagccgccgccgcatcaggacggcttctacccaaaggaagccgtgatggcggccgtggaggagtgcatgcggaagcaggccgacgcgctgctgcactcgctcgacggcatcgggggcaggctttcgcagctcgagctctactgctacaagctcgagaggtccatcggggaactgcgcagcgacgtcatggactaccacagcgagagcaccaccaacttcagatgcatcgacaagaacctcggacaggtccacaaatccttgcaggttcttcaggataggcaggacttggctgaaactccaaaagaactcagcaaacttcaaatagcacatgaggcaccctctcatcagaagggtccaaaccagcggtggctttgttctgcagcacctggtgcctgtctctttgagcacgcagcatgatcagcagcaattgaaccaggctcctgtgtactatgtgcaaagccaggatcatgctaaatccacagagagcaaggcgttggaacctttggttcaaggtgtgcagccacttgtccacaaccctgaagtcatggctcaagttgagctacctcagaaacctaatcaagcaactgaattgtaccctcaacctcagaatcacagactacagatgcctacccagcaggttgattcgcatacatggcatccccaacagcccatggtgcaacagcaccaatacattatccaacaagtttcacgacacatggctcaacagcagtcctcgtctcctcattctcagagtgctcaagccacacccttgtttcctccattcagctccccgaagcctgctagttctaacactgatccaattacaagaagtatggctgggcaacctccatactcttcatcgcagcagcagcatgaagtcgcccattcattttatggccaaggcaatacaatattggttcctgtagctgatcataatgctcagcatcagcaatcgcaatcagtgcagctacacagccagggcacctgtctacctcaaccaagcaagcccagtcactgcagtgttgcatcctatgctgttcaaggaaatggtcagacctacagctccacatacaagaacccttctaactgccctgcaactgtcgtagctcttctgcctcagcctccagctactgcttctatggcgtatcatcccttgggaccacaggtcgtgcacaatcatccatttggaaatatggttgaaacggctagtgtggtagggtattcacgggaccaaggtgagatactcccagtggtgactgcagtacaacccgtgatggttgataagcttaatgctggcagcaacgtaacatcccctcgtgaatggtcagcatagtggacgatgtgccatcgtacacttcactgcttccacaacttactactgcacatattgcagttggaagctcatcaggtctattttatctggctcctttttttccatcagccagcagattagaatagatccttctacctttttcagctgaaggtcagtatgaaataagaaaagtaggttagctgagtgatcactgttggcatatgtcctcacttttaatgggcatatcttcttgtaaccggttgcgaacttatatgccttatatgaatacatgatgggtttacatcagcttgccagatgtttgctaggtaacattagttttaagcggtagctgctgctttctcacagaatctgtcacgcatgatctagttggttatgttactgtgtatgtcatgaagacattagctatacttgaaaattttgttgatggatttcatctcatctactt

SEQ ID NO: 32381 - DNA, 2698 bp, Zea Mays
caccgctgcaccgccacccccaccccgcccacgccagatttcgccagatctcaggccacatgtggacgggctccgccgagagctgaagcaaagagcttggcattatccgtctcgctctccgaggtccaccacgctcgctctccgcttccccagccccaccgccatttttatcccacttgctcggcgctgcccccatttttattcctccccgcgcctcgaaccccaccacggtacccacagctctcgccgctatagctccgccgccgctttgcttgcctcctcagttttcaccctcgcagtcacggacatctggctgtttttacattgggactctgctttttcctgcctgcaacagcgactcctctttccccgcctcttcctcctcccgcttcggattcccaacccccccgctcaggcctcttcccttcacagcaccaacccaaaaccctagccgcaacgcctacgcatggcttcccccgcgcgccccgccgccacctccgtctccggcgccttcggccttccccccgacgcgcgctgctcctacgaccagccccgccgccgcgagggcttgcaggacgagaggatggtgcagacgttcgtggccgcctacgcgcagccgccgccgcatcaggacggcttctacccaaaggaagccgtgatggcggccgtggaggagtgcatgcggaagcaggccgacgcgctgctgcactcgctcgacggcatcgggggcaggctttcgcagctcgagctctactgctacaagctcgagaggtccatcggggaactgcgcagcgacgtcatggactaccacagcgagagcaccaccaacttcagatgcatcgacaagaacctcggacaggtgcgtccgcgcgtgccttctccgtgcatcttggatcccggtgtgcaccacctggcttctggagtactactggtgtgctagtgttctggtaatgtcgccgagtaatggcagacaatgacagtgcgagatttccaatttctcactaatatttggtgtaaaatgacttaactgattatttatttccctgaaagctagtacattcagtggagtcaacttatggttcccggagatgagatttgtatcacttggctctgagactaacagctactagcatctttggtaactagatctacattttggatgccaggtccacaaatccttgcaggttcttcaggataggcaggacttggctgaaactccaaaagaactcagcaaacttcaaatagcacatgaggcaccctctcatcagaagggtccaaaccagcggtggctttgttctgcagcacctggtgcctgtctctttgagcacgcagcatgatcagcagcaattgaaccaggctcctgtgtactatgtgcaaagccaggatcatgctaaatccacagagagcaaggcgttggaacctttggttcaaggtgtgcagccacttgtccacaaccctgaagtcatggctcaagttgagctacctcagaaacctaatcaagcaactgaattgtaccctcaacctcagaatcacagactacagatgcctacccagcaggttgattcgcatacatggcatccccaacagcccatggtgcaacagcaccaatacattatccaacaagtttcacgacacatggctcaacagcagtcctcgtctcctcattctcagagtgctcaagccacacccttgtttcctccattcagctccccgaagcctgctagttctaacactgatccaattacaagaagtatggctgggcaacctccatactcttcatcgcagcagcagcatgaagtcgcccattcattttatggccaaggcaatacaatattggttcctgtagctgatcataatgctcagcatcagcaatcgcaatcagtgcagctacacagccagggcacctgtctacctcaaccaagcaagcccagtcactgcagtgttgcatcctatgctgttcaaggaaatggtcagacctacagctccacatacaagaacccttctaactgccctgcaactgtcgtagctcttctgcctcagcctccagctactgcttctatggcgtatcatcccttgggaccacaggtcgtgcacaatcatccatttggaaatatggttgaaacggctagtgtggtagggtattcacgggaccaaggtgagatactcccagtggtgactgcagtacaacccgtgatggttgataagcttaatgctggcagcaacgtaacatcccctcgtgaatggtcagcatagtggacgatgtgccatcgtacacttcactgcttccacaacttactactgcacatattgcagttggaagctcatcaggtctattttatctggctcctttttttccatcagccagcagattagaatagatccttctacctttttcagctgaaggtcagtatgaaataagaaaagtaggttagctgagtgatcactgttggcatatgtcctcacttttaatgggcatatcttcttgtaaccggttgcgaacttatatgccttatatgaatacatgatgggtttacatcagcttgccagatgtttgctaggtaacattagttttaagcggtagctgctgctttctcacagaatctgtcacgcatgatctagttggttatgttactgtgtatgtcatgaagacattagctatacttgaaaattttgttgatggatttcatctcatctactt

SEQ ID NO: 32382 - DNA, 1885 bp, Zea Mays
ttttgattgaaaaataatgttttgaacacattgttcagtgattaaggccatcagaccatcaattaaatatgtttgaacgtacataatctcatcgtcaccaacccataccgttacaaaaagaatacaagctagtcgccaaaactgctgcagcataaataaaataaccaaaacatcatttaatctagtgtgatctctgttacgtaaagtacagcaattaaacagaccaacaagcaaaccatgcgatggcgcttctggtgctgctgatgacttccgtcattcacatcgcatgccataatgtgacatgatactcttctcactgtcaaattgctggacctttgcgaccagactataaatgctataagttaccacttgctaacatgtgtgtactttgggagtgtattcgtgaatctgtcgtactcctttggccctttcctccgtttgctgcttcccgcttcccgcttggatgatctatcctttctgaacccatttgcaacatcactactgcctgaggcagtagccttcgacttctttcgcgatttccgtcttgattttggggacttccgttttttagatggtgacgaactagtgtcctcggatgtggattgactatttctgggcaatggttcatcctcgtctatcacatgccaattgtatactgcatcattctcggtgtcaaactgttgggtgatcggctcccagggttccgctaacatatcttcattgttccagcctttccggtcaaggagaactgaatctggtctcacaatggtacccagaatgctcctattatgtcccaaactaataaacaagtttgcatcagttaacacagagtacgccttggaaaatgctgatttcacctgaaaaaaggggggatttattcaatgttttcttatgtcgaaatattccagagtaacagtatcatcaaagcaaaaggcaaaatgagttaaagcatcaaacagttccagtatcatttcgttcagaaatttcgggtagcaacttacaaaaccctaaattattttgggtaattcgggtatcataatcgggtatccaaattacccgaacttttatgtgtcaagtactcatgtcattcttaattattaacttgtacatctataattatgtgtaaatgtgcatgacttgtggttgtagattggttgtgttttttatgtccatctatatcattattcaaactgtacttttataataatttaatagggtacatgcgtttttatgaagctgacacaacagatcggtagttcggcaatacccgaattttcgggtattgtaaaacccgttgtaatttcaggtatcgattctcaaaaccagaaattttaaatacccgaattacccgccccgaaattttcgggtaacccaaacgcccaccctactttcatatccacagcatcggcaacatgccctgcagaagcatcagtaaaaaatcaatagtgattaccttaaagtagttaaaggaattctttccgatatcattatctggtgcctggacatcatgagttgaatgagttaatcaattgcgactcaagatcctcaagttaggtgaaaaagaaaggacaggtattttaccataggatcctgaatcgctaaaagatgtggccggtcatgattcataaagctacaaaatcataataaaagaatcagagaagcgcagaaataaactagtataaaaagcttaggacctggagaaactaaataataattttgacttaccacctgacaagttttttaatcattaaaggaattaaagaaattcacatatctgtgtctactgttaatctacaaacagcaacataatactccctccattcttttttatttgtcgcgatttagttcaaaaataaactaacgggcgacaaatattcgagaacgg

SEQ ID NO: 32383 - DNA, 554 bp, Zea Mays
ctcttcccgtggctcagagtccaaggacacacagctaaatacatattccaactgaccattttccaaagtgagctgcttcgtcattctggaggactagtttgtctccatggcctatggtttatacaagctttatggcgtgtagagtagatggatgatagctcttccctgtacaggcaatctatttgtcgccgattcttcttaactttcgatatacacttggatgttcatgctagagatgatagtccatctaatgagatgtcgatgctgtccgtattcgtaaaatcgtaactccagatttttggtagcctttagatatctagttaaggctgtacaaaacttcatcatgagcgctattcaagctatggtttctgtcccctactcttttgttgtaaagggtacgatatttctgcatacctgcacatatctcagcgttatgtggaggactaatcctgtacacctaaattactgcctgaaatgtcatcttgcttggtccatatgtgtctcgctgctgggctgcatctaagctcctgtgcatgtggcacgttacgcgcgag

SEQ ID NO: 32384 - DNA, 4262 bp, Zea Mays
tttgggagagatcagggacatgaaacagctgcgacttaggttccagttctttgcaagtgccatgtcattcaacatcatgccagaggagcagcaggtgaatgagagcttcttgcccagccgttttcgcaatttctggcagcgattacagctaaggtatggtttcagcagatcctttcggaagattgagtcaaatcaggtggaggcacggcggtttgcacttgtttggaatgagataataagcaagttccgggaggaagacattgttagtgatcgtgaggttgagcttcttgagctgccacctgagctgtggaatgtgcgtgtaatccgttggccttgtttcttgctctgtaatgagctgtcacttgcacttggtcaggcaaaagaagttacaggatctgatcgtaggctatggaggaagatatgtaagaatgattatcgtcgttgtgcagtgattgaggtctatgatagtgcaaaacacatgctgcttgagatcataaaggaggggactgaggagcatggtattgttacacaactgttcagcgattttgatggatccatgaagatggagaagttcactgtggagtataagatgactgagctgcacaatatccatacaaggcttgtagctctattggtcctcatcctcaaacccaccaaagatgttaccaagatagttaatgctttgcagactctctatgatgttgttgttcgtgatttccaagctgagaagaggagcatggaacaactgagaagtgaaggtcttgcacagtcaaggcccaccaggcttctctttgtggatgcagttgtgcttcctgaagaggacaatgctaccttctataagcaagtgaggcgcatgcacaccatcctgacctccagagactctatgattaatgtcccacagaaccttgaagctcgtcggaggattgcctttttcagcaattcattgtttatgaacataccaagggcaacccaggttgagaagatgatgtctttcagtgtcttgacgccttattataaggaggaggtgttgtacagcaaggaccaactctataaagagaatgaagatggcatctcaatattatactatctaaaacagatttacccagatgagtgggagtacttcgtagagcgaatgaaacgtgaggggatgtctgatattaatgagctgtacagtgagaaggaaaggctgagggatcttcggcactgggtctcatataggggacagacattatcacgtactgtgagaggaatgatgtactattatgaagctctcaagatgctgacctttttggattctgcctctgaacatgatttaaagactggatcaagggagttagctactatgggttcctcaagaattggatcctcaaggcatgacggagttgctggtgggtcagggtattacagcagggcatcttcctctcatgcattgagtagagcaagcagtagtgtgagctccttgtttaaaggaagcgaatatgggactgtcctcatgaaatacacatatgtagttgcatgccaggtatatggacagcagaaagctaagaatgaccccaatgcttttgaaatattggagctaatgaaaaattatgaagcattacgtgttgcttatgttgatgaaaggcagatcaatggcaacgaaaaagagttcttctctgttctcgtgaaatatgaccaacaattgcagcgggaggttgaaatctatcgggttaagttgcctggagagttgaagattggcgaaggaaagccagaaaatcagaatcatgcactcatcttcacaaggggcgatgcagttcaaactattgatatgaaccaagacaactactttgaagaagctctaaagatgagaaacctactagaagagttcaatcgttattatggaattcgcaagcctaaaattcttggggttcgggaacacgtcttcacgggttcagtttcttctcttgcttggttcatgtctgcccaggagacaagttttgtcactctggggcagcgtgttctggctgatccacttaaagtcagaatgcattatggccacccagatgtttttgatcgtctttggtttttgggccgaggtggtatcagtaaagcatcaagaataatcaacattagtgaggacatttttgctggtttcaactgtactctccgtggtggtaatgttacacaccacgagtatatccaggttggtaaaggtagagatgtgggcctcaaccaggtctctatgtttgaagccaaggttgctagtggcaatggtgaacaaactttgagccgagatgtttacaggctgggccaccgattggatttcttccggatgctctctttcttctatacaactgttggattctatttcaatacaatgatggttgtgctaactgtctatgcatttgtatgggggcgcttttaccttgcactcagtgggcttgaggactacatcaacaagaacacttcctcttccaataatgcagccctgggagctgttctcaatcagcagttcgtcatacagctaggcctgttcacagctttacccatgattattgaaaattcacttgagcacgggttcctcactgctgtgtgggatttcatgaaaatgcagctacagtttgcatctgttttctacacattctccatgggaacaaagacacactattatgggaggacaatccttcacggaggagcgaaatatcgagccactggcagaggttttgttgtggagcataagaagtttgctgaaaactataggctctatgctcgcagccatttcatcaaagctatagaacttggtgttatattaactctttatgcatcttatggcagtgcatctgggaatacattggtgtatattctgctgacactttcaagttggtttcttgtgtcatcatggattcttgctccattcatttttaatccctctggttttgactggctgaagaattttaatgactttgaggattttctaaactggatatggttccggggtgggatctcagttcagtcagatcaaagctgggagaagtggtgggaggatgaaactgatcatctccggacgacaggtctatggggctgcatcttggaaatcatattagaccttcgatttttcttttttcagtatgcaattgtatatcggcttcacattgctgataatagtagaagcatccttgtctatcttctttcgtggacatgcatcctcctagcttttgtggctcttgtgacagtggcttactttcgagacagatattcagcaaagaagcacatacggtatcgccttgtccaggcaatcattgttgggagcactgtggctgctattgttgtgctgttggaattcacaaagtttcagtttgttgacacttttactagtcttttggcttttctgccgactggctggggaatcatatctattgctctggtattcaagccatatctgaggagatctgagatggtctggaaaactgtggttaccgtggcacgtttgtatgacatattgtttggagtaattgttatggcacctgtggctgtattatcatggttgcctgggcttcaggaaatgcaaacaaggatcctgttcaatgaagctttcagcaggggacttcacatttctcaaatcattactggcaaaaaggcacatgtgttttgagttatattatatttgcccgtgctactgtttgtatgccatgttgaaaacaggatgatcttgcacactgaactgcagattaagagagtatgcacttgctttatgttcttgcagctaaatacatattccaactgaccattttccaaagtgagctgcttcgtcattctggaggactagtttgtctccatggcctatggtttatacaagctttatggcgtgtagagtagatggatgatagctcttccctgtacaggcaatctatttgtcgccgattcttcttaactttcgatatacacttggatgttcatgctagagatgatagtccatctaatgagatgtcgatgctgtccgtattcgtaaaatcgtaactccagatttttggtagcctttagatatctagttaaggctgtacaaaacttcatcatgagcgctattcaagctatggtttctgtcccctactcttttgttgtaaagggtacgatatttctgcatacctgcacatatctcagcgttatgtggaggactaatcctgtacacctaaattactgcctgaaatgtcatcttgcttggtccatatgtgtctcgctgctgggctgcatctaagctcctgtgcatgtggcacgttacgcgcgag

SEQ ID NO: 32385 - DNA, 3647 bp, Zea Mays
atcagggacatgaaacagctgcgacttaggttccagttctttgcaagtgccatgtcattcaacatcatgccagaggagcagcaggtgaatgagagcttcttgcccagccgttttcgcaatttctggcagcgattacagctaaggtatggtttcagcagatcctttcggaagattgagtcaaatcaggtggaggcacggcggtttgcacttgtttggaatgagataataagcaagttccgggaggaagacattgttagtgatcgtgaggttgagcttcttgagctgccacctgagctgtggaatgtgcgtgtaatccgttggccttgtttcttgctctgtaatgagctgtcacttgcacttggtcaggcaaaagaagttacaggatctgatcgtaggctatggaggaagatatgtaagaatgattatcgtcgttgtgcagtgattgaggtctatgatagtgcaaaacacatgctgcttgagatcataaaggaggggactgaggagcatggtattgttacacaactgttcagcgattttgatggatccatgaagatggagaagttcactgtggagtataagatgactgagctgcacaatatccatacaaggcttgtagctctattggtcctcatcctcaaacccaccaaagatgttaccaagatagttaatgctttgcagactctctatgatgttgttgttcgtgatttccaagctgagaagaggagcatggaacaactgagaagtgaaggtcttgcacagtcaaggcccaccaggcttctctttgtggatgcagttgtgcttcctgaagaggacaatgctaccttctataagcaagtgaggcgcatgcacaccatcctgacctccagagactctatgattaatgtcccacagaaccttgaagctcgtcggaggattgcctttttcagcaattcattgtttatgaacataccaagggcaacccaggttgagaagatgatgtctttcagtgtcttgacgccttattataaggaggaggtgttgtacagcaaggaccaactctataaagagaatgaagatggcatctcaatattatactatctaaaacagatttacccagatgagtgggagtacttcgtagagcgaatgaaacgtgaggggatgtctgatattaatgagctgtacagtgagaaggaaaggctgagggatcttcggcactgggtctcatataggggacagacattatcacgtactgtgagaggaatgatgtactattatgaagctctcaagatgctgacctttttggattctgcctctgaacatgatttaaagactggatcaagggagttagctactatgggttcctcaagaattggatcctcaaggcatgacggagttgctggtgggtcagggtattacagcagggcatcttcctctcatgcattgagtagagcaagcagtagtgtgagctccttgtttaaaggaagcgaatatgggactgtcctcatgaaatacacatatgtagttgcatgccaggtatatggacagcagaaagctaagaatgaccccaatgcttttgaaatattggagctaatgaaaaattatgaagcattacgtgttgcttatgttgatgaaaggcagatcaatggcaacgaaaaagagttcttctctgttctcgtgaaatatgaccaacaattgcagcgggaggttgaaatctatcgggttaagttgcctggagagttgaagattggcgaaggaaagccagaaaatcagaatcatgcactcatcttcacaaggggcgatgcagttcaaactattgatatgaaccaagacaactactttgaagaagctctaaagatgagaaacctactagaagagttcaatcgttattatggaattcgcaagcctaaaattcttggggttcgggaacacgtcttcacgggttcagtttcttctcttgcttggttcatgtctgcccaggagacaagttttgtcactctggggcagcgtgttctggctgatccacttaaagtcagaatgcattatggccacccagatgtttttgatcgtctttggtttttgggccgaggtggtatcagtaaagcatcaagaataatcaacattagtgaggacatttttgctggtttcaactgtactctccgtggtggtaatgttacacaccacgagtatatccaggttggtaaaggtagagatgtgggcctcaaccaggtctctatgtttgaagccaaggttgctagtggcaatggtgaacaaactttgagccgagatgtttacaggctgggccaccgattggatttcttccggatgctctctttcttctatacaactgttggattctatttcaatacaatgatggttgtgctaactgtctatgcatttgtatgggggcgcttttaccttgcactcagtgggcttgaggactacatcaacaagaacacttcctcttccaataatgcagccctgggagctgttctcaatcagcagttcgtcatacagctaggcctgttcacagctttacccatgattattgaaaattcacttgagcacgggttcctcactgctgtgtgggatttcatgaaaatgcagctacagtttgcatctgttttctacacattctccatgggaacaaagacacactattatgggaggacaatccttcacggaggagcgaaatatcgagccactggcagaggttttgttgtggagcataagaagtttgctgaaaactataggctctatgctcgcagccatttcatcaaagctatagaacttggtgttatattaactctttatgcatcttatggcagtgcatctgggaatacattggtgtatattctgctgacactttcaagttggtttcttgtgtcatcatggattcttgctccattcatttttaatccctctggttttgactggctgaagaattttaatgactttgaggattttctaaactggatatggttccggggtgggatctcagttcagtcagatcaaagctgggagaagtggtgggaggatgaaactgatcatctccggacgacaggtctatggggctgcatcttggaaatcatattagaccttcgatttttcttttttcagtatgcaattgtatatcggcttcacattgctgataatagtagaagcatccttgtctatcttctttcgtggacatgcatcctcctagcttttgtggctcttgtgacagtggcttactttcgagacagatattcagcaaagaagcacatacggtatcgccttgtccaggcaatcattgttgggagcactgtggctgctattgttgtgctgttggaattcacaaagtttcagtttgttgacacttttactagtcttttggcttttctgccgactggctggggaatcatatctattgctctggtattcaagccatatctgaggagatctgagatggtctggaaaactgtggttaccgtggcacgtttgtatgacatattgtttggagtaattgttatggcacctgtggctgtattatcatggttgcctgggcttcaggaaatgcaaacaaggatcctgttcaatgaagctttcagcaggggacttcacatttctcaaatcattactggcaaaaaggcacatgtgttttgaggatgatcttgcacactgaactgcag

SEQ ID NO: 32386 - DNA, 4153 bp, Zea Mays
atcagggacatgaaacagctgcgacttaggttccagttctttgcaagtgccatgtcattcaacatcatgccagaggagcagcaggtgaatgagagcttcttgcccagccgttttcgcaatttctggcagcgattacagctaaggtatggtttcagcagatcctttcggaagattgagtcaaatcaggtggaggcacggcggtttgcacttgtttggaatgagataataagcaagttccgggaggaagacattgttagtgatcgtgaggttgagcttcttgagctgccacctgagctgtggaatgtgcgtgtaatccgttggccttgtttcttgctctgtaatgagctgtcacttgcacttggtcaggcaaaagaagttacaggatctgatcgtaggctatggaggaagatatgtaagaatgattatcgtcgttgtgcagtgattgaggtctatgatagtgcaaaacacatgctgcttgagatcataaaggaggggactgaggagcatggtattgttacacaactgttcagcgattttgatggatccatgaagatggagaagttcactgtggagtataagatgactgagctgcacaatatccatacaaggcttgtagctctattggtcctcatcctcaaacccaccaaagatgttaccaagatagttaatgctttgcagactctctatgatgttgttgttcgtgatttccaagctgagaagaggagcatggaacaactgagaagtgaaggtcttgcacagtcaaggcccaccaggcttctctttgtggatgcagttgtgcttcctgaagaggacaatgctaccttctataagcaagtgaggcgcatgcacaccatcctgacctccagagactctatgattaatgtcccacagaaccttgaagctcgtcggaggattgcctttttcagcaattcattgtttatgaacataccaagggcaacccaggttgagaagatgatgtctttcagtgtcttgacgccttattataaggaggaggtgttgtacagcaaggaccaactctataaagagaatgaagatggcatctcaatattatactatctaaaacagatttacccagatgagtgggagtacttcgtagagcgaatgaaacgtgaggggatgtctgatattaatgagctgtacagtgagaaggaaaggctgagggatcttcggcactgggtctcatataggggacagacattatcacgtactgtgagaggaatgatgtactattatgaagctctcaagatgctgacctttttggattctgcctctgaacatgatttaaagactggatcaagggagttagctactatgggttcctcaagaattggatcctcaaggcatgacggagttgctggtgggtcagggtattacagcagggcatcttcctctcatgcattgagtagagcaagcagtagtgtgagctccttgtttaaaggaagcgaatatgggactgtcctcatgaaatacacatatgtagttgcatgccaggtatatggacagcagaaagctaagaatgaccccaatgcttttgaaatattggagctaatgaaaaattatgaagcattacgtgttgcttatgttgatgaaaggcagatcaatggcaacgaaaaagagttcttctctgttctcgtgaaatatgaccaacaattgcagcgggaggttgaaatctatcgggttaagttgcctggagagttgaagattggcgaaggaaagccagaaaatcagaatcatgcactcatcttcacaaggggcgatgcagttcaaactattgatatgaaccaagacaactactttgaagaagctctaaagatgagaaacctactagaagagttcaatcgttattatggaattcgcaagcctaaaattcttggggttcgggaacacgtcttcacgggttcagtttcttctcttgcttggttcatgtctgcccaggagacaagttttgtcactctggggcagcgtgttctggctgatccacttaaagtcagaatgcattatggccacccagatgtttttgatcgtctttggtttttgggccgaggtggtatcagtaaagcatcaagaataatcaacattagtgaggacatttttgctggtttcaactgtactctccgtggtggtaatgttacacaccacgagtatatccaggttggtaaaggtagagatgtgggcctcaaccaggtctctatgtttgaagccaaggttgctagtggcaatggtgaacaaactttgagccgagatgtttacaggctgggccaccgattggatttcttccggatgctctctttcttctatacaactgttggattctatttcaatacaatgatggttgtgctaactgtctatgcatttgtatgggggcgcttttaccttgcactcagtgggcttgaggactacatcaacaagaacacttcctcttccaataatgcagccctgggagctgttctcaatcagcagttcgtcatacagctaggcctgttcacagctttacccatgattattgaaaattcacttgagcacgggttcctcactgctgtgtgggatttcatgaaaatgcagctacagtttgcatctgttttctacacattctccatgggaacaaagacacactattatgggaggacaatccttcacggaggagcgaaatatcgagccactggcagaggttttgttgtggagcataagaagtttgctgaaaactataggctctatgctcgcagccatttcatcaaagctatagaacttggtgttatattaactctttatgcatcttatggcagtgcatctgggaatacattggtgtatattctgctgacactttcaagttggtttcttgtgtcatcatggattcttgctccattcatttttaatccctctggttttgactggctgaagaattttaatgactttgaggattttctaaactggatatggttccggggtgggatctcagttcagtcagatcaaagctgggagaagtggtgggaggatgaaactgatcatctccggacgacaggtctatggggctgcatcttggaaatcatattagaccttcgatttttcttttttcagtatgcaattgtatatcggcttcacattgctgataatagtagaagcatccttgtctatcttctttcgtggacatgcatcctcctagcttttgtggctcttgtgacagtggcttactttcgagacagatattcagcaaagaagcacatacggtatcgccttgtccaggcaatcattgttgggagcactgtggctgctattgttgtgctgttggaattcacaaagtttcagtttgttgacacttttactagtcttttggcttttctgccgactggctggggaatcatatctattgctctggtattcaagccatatctgaggagatctgagatggtctggaaaactgtggttaccgtggcacgtttgtatgacatattgtttggagtaattgttatggcacctgtggctgtattatcatggttgcctgggcttcaggaaatgcaaacaaggatcctgttcaatgaagctttcagcaggggacttcacatttctcaaatcattactggcaaaaaggcacatgtgttttgagctaaatacatattccaactgaccattttccaaagtgagctgcttcgtcattctggaggactagtttgtctccatggcctatggtacatacactgtttatacaagctttatggcgtgtagagtagatggatgatagctcttccctgtacaggcaatctatttgtcgccgattcttcttaactttcgatatacacttggatgttcatgctagagatgatagtccatctaatgagatgtcgatgctgtccgtattcgtaaaatcgtaactccagatttttggtagcctttagatatctagttaaggctgtacaaaacttcatcatgagcgctattcaagctatggtttctgtcccctactcttttgttgtaaagggtacgatatttctgcatacctgcacatatctcagcgttatgtggaggactaatcctgtacacctaaattactgcctgaaatgtcatcttgcttggtccatatgtgtctcgctgctgggctgcatctaagctcctgtgcatgtggcacgttacgcgcgag

SEQ ID NO: 32387 - DNA, 2606 bp, Zea Mays
agcgaacaaccgccccgccgtattggatttggctatcctagctgtcgtggattcacgagtactgctctccgctcgcctccgcctcgtagacatgtggctgacttcgccaacttggcctgtgcgtgcgtctgccaagttccagaagccacgccaccgatcgtgattattatccatcaatcgatcattccggtagtatccatccaactcttcataacaggcgacctgagagcagagcagacagagagcgttctggcagccgttgcggagcttgaacctctgcaaccaccaacagctaaactaaaagcagcggcggacggcgcgcggtactggacgaccggccgacgatggctacgccggcgcagcagcagggtgaccagcaccagccgaggctgcagaaggtgatggtggctgtagacgagagcgagtgcagccggcacgcgctggagtgggcgctgcggaacctggcgcccacgctggccccaccgctactggtgctcaccgtgcagccgcacttcccgctcggatacgtctccgccgcgtccttcggcgcacccctgggcaccgtccctccggtggctccggagctcatcaggtcgatgcaggagcagcagagggagctcacgcaggagctcctcgacaaggccagggccatctgcgccgagcacgggagcaggttttagctagaagcctacaactagctgttccttagctagagccatagagggattgaggttaccactcgacccctgtttgaactgcactgcaggttgctgtagaggcaattgtcgaggtcggagatgcaaaggaggtgatatgtgaagtggctgagaagaaaaatgtcgatctgctggttcttggaagccacagtcgtgggccaatacagaggttgttccttgggagcgtcagtaactactgtgtacatcattctaagtgtccagttcttgtggtgaagaaccaaggctgatgaaggattcaactcccagctgctagtcctaatcatgttcggggccgaggctggactggaggagagttctttttctttttcttttttctggtcagtgtgcctttgctccggaatggcagagttgtaaataagaactacgaactttgtgcgtatttatggttgttgtatttatgattgttccctaaaccctaaaccaatcaatcaagcaaatagagttgtaagctatatttagctaggattttaaataagcaatcaaacaaataaggcagccgttgccactatccatttctcatctctcccagatccgatcgcggccactgccatggcagaagcagccggcggcggacccctgctccccgaggaactcgttatctgggagatcctgacgcgtctgccggcgaagcccctcctccggtgccgcgccgtctgcctctcctggcgccgccgactcacctccgacgctaagttcctcctcgcccaccaccgtcgccagccgtcgctcccgctcctcacccaaggggacaggagcaccgaggacaggaggatcgacgccctggactaccgcaccggcgagcggctccccgtcgcgcggacgacgggccggaccgccgccaacgccgacgacctgaacgtgctcgcttcctgcgacggcctcctcgtcctcatcgccaacggcggcctccacatctgcaacccggcgacccgccagcgcgcgccgctcgcccttctccacggcgcctcctgcatctccgcgctttacccttaccgcccgtccgggtcgtaccgggtggcgggtgctctgctgcttcgagagagccgaggacggccacgccgtgtaccacgtgcacaccgtcgggtcgcgcgagctcaggtgcgtcggagaacctcccgcgctgtgggcgtccggagacgtggcgatggcgatgccgatgatgttgtgctttcacccgcacgtcgtggcaggcagcaggatctactggcagccggtaaagctgcccggcggcaacgggaaggtcaacaacatgctcgcgttcgatacagtgaccgagtccttccagcaacagctgtcgcccccgcccgtggagggccccttccttgaactgtttcagatgaacagcggcgcccttggattgtaccactgccgcgccggcaaggctgatctttgggtgctacaagatcacgagagctggtcctggtcgatgaaccatcggatcaaatttgacgtgctgtttttctctctgctgccggtgctggacccggaaggagatgtgctagtgctttctaacgaaggggaaacaggcatcctgtggcaacgtctgtatcacatttctggtgccaatggcagtttgctggcccagtatcaatggagcgcttatctgaagcttagagcatctccaacaatgccttaaactagtgcctcaaattgaaatatagggctctacacaggaaaaaccactccaacagtgtcttaattcaacaaattttgtcaaaaaactatagggcaccctctcaagtgcctcaaatatactacactgtagtgggctgccctataatctagatttgaggctttaatgttggagcggggtgttttgttggtgtcctaaattctataaaatttacttatttttaaattataaggtat

SEQ ID NO: 32388 - DNA, 2601 bp, Zea Mays
agcgaacaaccgccccgccgtattggatttggctatcctagctgtcgtggattcacgagtactgctctccgctcgcctccgcctcgtagacatgtggctgacttcgccaacttggcctgtgcgtgcgtctgccaagttccagaagccacgccaccgatcgtgattattatccatcaatcgatcattccggtagtatccatccaactcttcataacaggcgacctgagagcagagcagacagagagcgttctggcagccgttgcggagcttgaacctctgcaaccaccaacagctaaactaaaagcagcggcggacggcgcgcggtactggacgaccggccgacgatggctacgccggcgcagcagcagggtgaccagcaccagccgaggctgcagaaggtgatggtggctgtagacgagagcgagtgcagccggcacgcgctggagtgggcgctgcggaacctggcgcccacgctggccccaccgctactggtgctcaccgtgcagccgcacttcccgctcggatacgtctccgccgcgtccttcggcgcacccctgggcaccgtccctccggtggctccggagctcatcaggtcgatgcaggagcagcagagggagctcacgcaggagctcctcgacaaggccagggccatctgcgccgagcacggggttttagctagaagcctacaactagctgttccttagctagagccatagagggattgaggttaccactcgacccctgtttgaactgcactgcaggttgctgtagaggcaattgtcgaggtcggagatgcaaaggaggtgatatgtgaagtggctgagaagaaaaatgtcgatctgctggttcttggaagccacagtcgtgggccaatacagaggttgttccttgggagcgtcagtaactactgtgtacatcattctaagtgtccagttcttgtggtgaagaaccaaggctgatgaaggattcaactcccagctgctagtcctaatcatgttcggggccgaggctggactggaggagagttctttttctttttcttttttctggtcagtgtgcctttgctccggaatggcagagttgtaaataagaactacgaactttgtgcgtatttatggttgttgtatttatgattgttccctaaaccctaaaccaatcaatcaagcaaatagagttgtaagctatatttagctaggattttaaataagcaatcaaacaaataaggcagccgttgccactatccatttctcatctctcccagatccgatcgcggccactgccatggcagaagcagccggcggcggacccctgctccccgaggaactcgttatctgggagatcctgacgcgtctgccggcgaagcccctcctccggtgccgcgccgtctgcctctcctggcgccgccgactcacctccgacgctaagttcctcctcgcccaccaccgtcgccagccgtcgctcccgctcctcacccaaggggacaggagcaccgaggacaggaggatcgacgccctggactaccgcaccggcgagcggctccccgtcgcgcggacgacgggccggaccgccgccaacgccgacgacctgaacgtgctcgcttcctgcgacggcctcctcgtcctcatcgccaacggcggcctccacatctgcaacccggcgacccgccagcgcgcgccgctcgcccttctccacggcgcctcctgcatctccgcgctttacccttaccgcccgtccgggtcgtaccgggtggcgggtgctctgctgcttcgagagagccgaggacggccacgccgtgtaccacgtgcacaccgtcgggtcgcgcgagctcaggtgcgtcggagaacctcccgcgctgtgggcgtccggagacgtggcgatggcgatgccgatgatgttgtgctttcacccgcacgtcgtggcaggcagcaggatctactggcagccggtaaagctgcccggcggcaacgggaaggtcaacaacatgctcgcgttcgatacagtgaccgagtccttccagcaacagctgtcgcccccgcccgtggagggccccttccttgaactgtttcagatgaacagcggcgcccttggattgtaccactgccgcgccggcaaggctgatctttgggtgctacaagatcacgagagctggtcctggtcgatgaaccatcggatcaaatttgacgtgctgtttttctctctgctgccggtgctggacccggaaggagatgtgctagtgctttctaacgaaggggaaacaggcatcctgtggcaacgtctgtatcacatttctggtgccaatggcagtttgctggcccagtatcaatggagcgcttatctgaagcttagagcatctccaacaatgccttaaactagtgcctcaaattgaaatatagggctctacacaggaaaaaccactccaacagtgtcttaattcaacaaattttgtcaaaaaactatagggcaccctctcaagtgcctcaaatatactacactgtagtgggctgccctataatctagatttgaggctttaatgttggagcggggtgttttgttggtgtcctaaattctataaaatttacttatttttaaattataaggtat

SEQ ID NO: 32389 - DNA, 2768 bp, Zea Mays
ggcaatatttcaaaggccgtagccccgtataggcctgcctctcgtctgcgccctactccccaccacttccctcccttccccgcctacaagcaagccgccccagccattcatggccatcaccaccaccatgtgtcgccgccactccacctccacctcccacccactcctctcaccgcaccactaaacccgcctccctcgctcctcacccgctccctgtccgtccatccatcgcctcgccgccgctctgctgccgtttgctccagctgcggccgacgggggccatggcgggcatcgacctcaacaccgtggaggaggaggacgaggaggaggcggaggcgctgcctttgcccggacccggtggccgtggcgccgtgtgcctggagctgtggcacgcgtgcgcgggccccgtcccgccgctgccgcggaagggcagcgccgtcgtgtacctgccgcagggccacctcgagcacatcggcggcgacgcggcgcgaggagcagcagcttcggcggtgccgccgcacgtgctctgccgcgtcgtcgacgtcaccctccacgcggacggcgcgacagacgaggtgtacgcgcgggtgtcgctgctgcccgaggacgaggacgcggagaagcgggcgcaggcgcaggcgcgggtccgggaggacgaggaccgccgcgacggcgaggacggcggcgccatgaggccgctcgcacggacgccgcacatgttctgcaagacgctcacggcatccgataccagcacgcacggcggtttctcagtgccgcgccgcgccgccgaggactgcttcccgccgctggactacagccagcagaggccgtctcaggagctcgtggccaaggatctacacggcacggagtggaagttccggcatatctatcgaggtcagccacgaaggcatctcttaaccactggatggagtgcatttgttaataggaagaagctcatttctggagatgcagttctcttccttcgaggcgaagatggagtgcttcgactgggagtgcgccgagcagcccagctaaaaattgtaactcctattcctgcacctcataaccagtgctcaagtaatagcaatcttggaaacgttgcacaagctgtggccacgaagactgttttccacatctactacaatcccaggttaactcaatctgaattcattgtaccctattggaagttcacaagaagcttcaatcaaccaatttctgttggaatgaggtgcagaatgcgatatgaaagtgacgatgcttctgaaagaaggtgcactggtataataattggaagcagagaagctgatcctatatggtatggttcgaaatggaaatgcttggtggttagatgggatgatggtatagagtgccgttggcccaatagggtatctccttgggagattgagctcacaggatctgtttcaggatctcaaatgtgcgctcccagttcaaaacgtctgaaaccatgcctcccccaagttaatccggagattgtgcttccaaatggaagtgtttcttcagattttgcgggatctgccagattccacaaggtcttgcaaggtcaagaattgttgggtttcaaaacccatgatggtcctgctatttctgcttctcaggcaactgaagcaagaaatttgcagtacagtgatgaacggagtaacaataacttagggatcccaagacttggtgttaggtctccaactggaatccctgggtttccctaccattgctcaggctttggggaatctcaaagattccaaaaggtcttgcaaggtcaagaagtgtttcatcctttccgaggaggatgtttggctgatggccatataagaactgctggcatgtatcaacctgacggtaggcatgtatctggtgcagcttataaatggtctgcaccacaagggtatgatttcccacagccagcaaaaccggtttttctgttgcaagaatcatccccatcatctgtgatgatgtttccacaaactagatctaagataactcacttggaatatgagtactcaagacatgggaagaagcaatcaaacattatctctttggcctcatcttgtttcaggcgaagcaatagaagaatgtactggaactgtgaatatgcactcccccgtcagtggtgcagagcatgaatcaaacaatgagagtacagttgaaaatggctgcaaaatctttggtatctcattggctgaaaagatccgatcatgcgatgaagcagactcttgtagtgcaaaatgtaattctcggctccagcctttgaagtcacaaatgccaaaatcgctaggcagctgttgggccactgttcacgagcaaaggcctgttgttggcagggtggttgacgtctcggcgacagatatgtgatctgatccacatggcatatccttgtagaatatgcaggaaggactaccgagtgcaactttcatggcctgaaccacatcctggatgaaagattgctgaaggtgaccttatgattcttgaaacagggatgtttgacaaatttgtaatgtacttttgggctttaagtatcttattatcttaagctacctagtaatcagcacttgtaccttaaggtgtgcgttatggcaagttcttttagagggcttgtttggactagcaccatctcccaagtactcgttgcattgtttctttgccccgggaaacaagtccgttttggaagttcggctccagtcctgttggtaccatttgttgcatcgtgtgtgcttgtacaattgcacatctcaagcggtaaagcatgatttgac

SEQ ID NO: 32390 - DNA, 2728 bp, Zea Mays
ctccccaccacttccctcccttccccgcctacaagcaagccgccccagccattcatggccatcaccaccaccatgtgtcgccgccactccacctccacctcccacccactcctctcaccgcaccactaaacccgcctccctcgctcctcacccgctccctgtccgtccatccatcgcctcgccgccgctctgctgccgtttgctccagctgcggccgacgggggccatggcgggcatcgacctcaacaccgtggaggaggaggacgaggaggaggcggaggcgctgcctttgcccggacccggtggccgtggcgccgtgtgcctggagctgtggcacgcgtgcgcgggccccgtcccgccgctgccgcggaagggcagcgccgtcgtgtacctgccgcagggccacctcgagcacatcggcggcgacgcggcgcgaggagcagcagcttcggcggtgccgccgcacgtgctctgccgcgtcgtcgacgtcaccctccacgcggacggcgcgacagacgaggtgtacgcgcgggtgtcgctgctgcccgaggacgaggacgcggagaagcgggcgcaggcgcaggcgcgggtccgggaggacgaggaccgccgcgacggcgaggacggcggcgccatgaggccgctcgcacggacgccgcacatgttctgcaagacgctcacggcatccgataccagcacgcacggcggtttctcagtgccgcgccgcgccgccgaggactgcttcccgccgctggactacagccagcagaggccgtctcaggagctcgtggccaaggatctacacggcacggagtggaagttccggcatatctatcgaggcctgcttgttacaggtcagccacgaaggcatctcttaaccactggatggagtgcatttgttaataggaagaagctcatttctggagatgcagttctcttccttcgaggcgaagatggagtgcttcgactgggagtgcgccgagcagcccagctaaaaattgtaactcctattcctgcacctcataaccagtgctcaagtaatagcaatcttggaaacgttgcacaagctgtggccacgaagactgttttccacatctactacaatcccaggttaactcaatctgaattcattgtaccctattggaagttcacaagaagcttcaatcaaccaatttctgttggaatgaggtgcagaatgcgatatgaaagtgacgatgcttctgaaagaaggtgcactggtataataattggaagcagagaagctgatcctatatggtatggttcgaaatggaaatgcttggtggttagatgggatgatggtatagagtgccgttggcccaatagggtatctccttgggagattgagctcacaggatctgtttcaggatctcaaatgtgcgctcccagttcaaaacgtctgaaaccatgcctcccccaagttaatccggagattgtgcttccaaatggaagtgtttcttcagattttgcgggatctgccagattccacaaggtcttgcaaggtcaagaattgttgggtttcaaaacccatgatggtcctgctatttctgcttctcaggcaactgaagcaagaaatttgcagtacagtgatgaacggagtaacaataacttagggatcccaagacttggtgttaggtctccaactggaatccctgggtttccctaccattgctcaggctttggggaatctcaaagattccaaaaggtcttgcaaggtcaagaagtgtttcatcctttccgaggaggatgtttggctgatggccatataagaactgctggcatgtatcaacctgacggtaggcatgtatctggtgcagcttataaatggtctgcaccacaagggtatgatttcccacagccagcaaaaccggtttttctgttgcaagaatcatccccatcatctgtgatgatgtttccacaaactagatctaagataactcacttggaatatgagtactcaagacatgggaagaagcaatcaaacattatctctttggcctcatcttgtttcaggcgaagcaatagaagaatgtactggaactgtgaatatgcactcccccgtcagtggtgcagagcatgaatcaaacaatgagagtacagttgaaaatggctgcaaaatctttggtatctcattggctgaaaagatccgatcatgcgatgaagcagactcttgtagtgcaaaatgtaattctcggctccagcctttgaagtcacaaatgccaaaatcgctaggcagctgttgggccactgttcacgagcaaaggcctgttgttggcagggtggttgacgtctcggcgacagatatgtgatctgatccacatggcatatccttgtagaatatgcaggaaggactaccgagtgcaactttcatggcctgaaccacatcctggatgaaagattgctgaaggtgaccttatgattcttgaaacagggatgtttgacaaatttgtaatgtacttttgggctttaagtatcttattatcttaagctacctagtaatcagcacttgtaccttaaggtgtgcgttatggcaagttcttttagagggcttgtttggactagcaccatctcccaagtactcgttgcattgtttctttgccccgggaaacaagtccgttttggaagttcggctccagtcctgttggtaccatttgttgcatcgtgtgtgcttgtacaattgcacatctcaagcggtaaagcatgatttgac

SEQ ID NO: 32391 - DNA, 1584 bp, Zea Mays
gccccgtagcgtgtagcgagaaggtgcgacagcagggtagggagctcactgttagtcgttcctccgatccacagatgaatcagtggtagactgctggtagtagtatatatacaatctctagctgtgccgctgttttagagtatcgtcgtgagagctcacaaggagaagatctggtgctgcgaaagggagaagaaaagaagaagaagaaatcagctcagctcagcatggcttcctcgtccttcaacaacagtcactggccgagcatgttcaggtccaagcacgccgccgagccgtgtcagacgacgcagcctgacatcagcagctcaccgccgtccctcctctcagctggcggcgcgagcaccaccaccaccaccggccgctgcctcaaacactccatctcagtaggcggcgaggagcgggccccggatccgaagccgcggtggaaccccaggccggagcagatccggattctggaggccatcttcaactccggcatggtcaacccgccgcgcgacgagatcccccgcatccgcatgcgcctgcagcagtacgggcaggtcggcgacgccaacgtcttctactggttccagaaccgcaagtcccgctccaagaacaagctccgcagcagcaccgcgggcaccggacgcctagggctgcagggcctcgcgcgcgcgccgggccgcggggccgctgcggcgccgccgcccgtcgagccgccgccgctggtccagaaccaattccacatgctcgcctcgcccgcgcaggcgcccacttcctcgtcctcgtcctcctccgaccgctcctccgggtccagcaagccggctgcggagccggcgatgcccgcgacggcggcgcctatggacttgctagggccgctcgccgcggcgtgtccccagatgtactaccaaggcagccccgtggcgccagcgcacaaggtgctggacctcgtagcctccgtcgagccggtcttccagccgtggccgcagggctactgcttgtcggctgccgaggtcgctaccattctcgggggacagtacatgcacgtgcccgtgcaacagcagccgccggcgccgttgcccgcgggagcattattggggctgtgcaacgacgtgacagagccgaccgccgtcgtcactggccacaagacatgcgcctggggcccggcggggctcgggcagtcctggccctgtggcggcgctgatcatcatcagcccggcaagaacaacaacaccgcggcaagggagttggcgcacgaggacgacgccacgaagctggggttgctgcagtacggcttcggagctaccacggccatggaggcggctcctgcggtagcgcctcttgctgcatcgccggcgggcggcgctgttaccatggcgagcgtgtctgcctctaccgctggcctcacaggtttccctgcaagtactaatggtgtcgtcgccaactatgatctgctgcaagcagtaataacgcatgatattgatgcttcttcaaggggttacacataatattgatgcttcttcgagggttgcaagacaagagtgtcctggcagttctggtgttctctttgattctcctgtaataagc

SEQ ID NO: 32392 - DNA, 325 bp, Zea Mays
aaacacttctctcacgctcacggccgccgcctccacccgtcgccgcttcctcccgttagactaggttaggctagggtgtcgaccagctcgcggaaatggtggccttcaggttccatcagtaccaggtggtggggcgcgcgctgccgacgcccggcgacgagcaccccaagatctaccgcatgaagctctgggccaccaacgaagtccgcgccaagagcaagttctggtacttcctgaggaagttgaagaaggttaagaagagcaacggtcaggtcctggccatcaacgagtgccatggttttgttagctgtatattaagctaact

SEQ ID NO: 32393 - DNA, 774 bp, Zea Mays
cccgtcgccgcttcctcccgttagactaggttaggctagggtgtcgaccagctcgcggaaatggtggccttcaggttccatcagtaccaggtggtggggcgcgcgctgccgacgcccggcgacgagcaccccaagatctaccgcatgaagctctgggccaccaacgaagtccgcgccaagagcaagttctggtacttcctgaggaagttgaagaaggttaagaagagcaacggtcaggtcctggccatcaacgagatcttcgagcgtaacccgacgacgatcaagaactacggcatctggctgcgctaccagagcagaaccggctaccacaaccctgaacggcgctgtagaacagatgtacaatgagatggcttctcgccaccgcgtgaggtccccctgcatccagatcatcaagaccgccacggtgcacttcaagctgtgcaagagggacaacacaaagcagttccacaacagtgagatcaagttcccactcgtgtaccgcaaggtcaggccgccgaccaggaagctgaagaccacgttcaaggcttcgaggccgaacctgttcatgtgatttagctgtggtcagtgtatgtgatcgtaagaatctgtgttttaagttttgacgctaagacttgggtggtttgatgattcaactcgttttgaaacgtgcttggtgaaccatttgtgcatcgacttgtgccgagttgttcgtactcggcacactaatgttgatctatctggagtgggtgatttatttccttacctcggtcatcg

SEQ ID NO: 32394 - DNA, 665 bp, Zea Mays
gtcgccgcttcctcccgttagactaggttaggctagggtgtcgaccagctcgcggaaatggtggccttcaggttccatcagtaccaggtggtggggcgcgcgctgccgacgcccggcgacgagcaccccaagatctaccgcatgaagctctgggccaccaacgaagtccgcgccaagagcaaaaccggctaccacaacatgtacaaggagtaccgcgacacaaccctgaacggcgctgtagaacagatgtacaatgagatggcttctcgccaccgcgtgaggtccccctgcatccagatcatcaagaccgccacggtgcacttcaagctgtgcaagagggacaacacaaagcagttccacaacagtgagatcaagttcccactcgtgtaccgcaaggtcaggccgccgaccaggaagctgaagaccacgttcaaggcttcgaggccgaacctgttcatgtgatttagctgtggtcagtgtatgtgatcgtaagaatctgtgttttaagttttgacgctaagacttgggtggtttgatgattcaactcgttttgaaacgtgcttggtgaaccatttgtgcatcgacttgtgccgagttgttcgtactcggcacactaatgttgatctatctggagtgggtgatttatttccttacctcggtcatcg

SEQ ID NO: 32395 - DNA, 783 bp, Zea Mays
gatggcgcgagcgcaggttgccacgaagggataagctggagcttaaagccgtgaaagacggttctgcaagctatgctgctctagaaaagaaagcagagttgtatgaaaaattatacagaggcgagctacctgacgaagaagacaaagagaaatactgtgtggatttcttccaaaaaagttccgatcgtatctatgagcctcagatgccagagattagccacagagccactgatgctgcagagccggtaaatgatcatgaagattctatgcctaatgcgaaaccgttggggcttggccgagcaggcactacaatcgacagagatgagcacaagcgctttgtgagttcatgaggaagtaactgaggcaaggcagaaggcctcaacagtaagatctcgacgacaagagcaggatgctgctcgtagagagaaactcaggcaagcttacctgaagaaacggttggaaaagttgattgctgaaaaacaggcctcttcagccagtgatgacctacccagctagctagtatatgtgcttgcatgtccttcccaagtagcagtctagcagctgtaatggtctgttttcatgcattctcatggaacgcttactgtaaagtctcttttgacccagtacagtcatattcaagatatagcgtttgcaagtactgccggtgttgcagaatattgttgtacacaaatctagataatgccacaatgattttacactagaacatcaggcgtcctttggatgccctgcaattgttcgaagaaactaaattgttcaacgcat

SEQ ID NO: 32396 - DNA, 2351 bp, Zea Mays
gggagggtgaagtctaacccactgatgacctttgtaccttgcgatggaaacaagcgcatagctccaggggatgggaaagaaagaggccgggaaatggacatgtcgtttgggtctaatcaattagtactactagctagtagtttctgtcacaaaaagctggatcaattaaacaaaaggccaacccaaaaagcagctggtaaaagagatacgaaagaaaaaacaagaaaaatcctctaccccaaccaaccatccatccatctctctctctttctctccatctagactagcagtatatctgcagtatgtgtgcatcatcttcctacacacctagactctctctctctcgcgcgcgcgcgagcaccacgtacacataaacacacccccatccctttcgccccctttgcctcacatgcatcactacgcccccactaccatatagccgaatacgctcgcttccctggccccgtattgatctccctctcctccctcgtccctcgtccttgataagtgagcaagcggcaagaaccagcggcgcgcccatgtcgtcgagagacttatacttccacgacgagctggcgtcgctgttcgcgcagcggccggcgccggccggagaggcgatgatgacgcaccagcaccagcagcagcaacaggcgccggcgtcgtggttcgcggactacctgcacgcgggcgccccaggcatggggatggactacgacctgctgtgccgcgcgctggacctgccgctgccgggggacgacgtcgtcaagagggaggaggagctgctgctggtggacacaggcggggacggaggaggcttcgccgcgcccacgcccacgcccagcgggggcggcacggcgccggtcacgcccaacaccacgtcgtccatgtcctcctcgtccagcgaggcggcgggcggcgccgccggaggaggaggaggaagggaggaggactcgccgcaggggaggtgcaagaaggaggaaggggatggggaggagagcaaggcgctcgacaagggggaggaagacgctgacaagggcaagaaagggtcagcggcggcaggcaagggcaagggcaagggcgagaagcggcagcggcagccgcggttcgcgttcttgaccaagagcgaggtcgaccaccttgaggacggctaccggtggcgcaagtacggccagaaggccgtcaagaacagcccataccccaggagctactaccggtgcacgacgcagaagtgccccgtgaagaagcgggtggagcggtcgtcccaggacccggcggtggtgatcaccacgtacgagggcaagcacacgcaccccatcccggtcacgctccgcggcagcacccacatcctcgccgcgcagctgcaccaccaccacaaccaccacctcggcgccttcccgacgccgctgccgcagacgggcgcggcgccgttcgggcgggctgcaggcggaggcgtcatcgacatgctggggctcctgcccccgcgcaaccacggcatgagcggcggcccgatgagcgccgtggctggcgccgcgacgacgacggccgccaccattactactacctccaccacaccgtcgtatcccccctcgctccagatgcagcacttcatggcgcaggacttcgggctcctgcaggacatcatgctgccgtccttcggcggcggcggcggtaacatccagccctgaatcgatcccaattgctcaccgccatcgcaagcgcagcaagctaatgaggaaggaagctagctagataagagatagtagtttggttcttgttgatgcttaccctctttaatccttggttttttttttcaccgacgacgatttactcctctagacgggaccgtgccatgcatatcggtccttgatttgcctttccgcctgcagctgtactggcgccggcaggcctggtctcgtaacgtttcttaattatgcatgatgatctagctagtccttgcaggtagtactagccgttcttgtacatgtacctaattaatcaactcccccgccggctcgtcctggccatgagctatgataattttatgctagctcctctttgcattatattccttcttccgtccatcgccgtccagttgttgacttgttgtacatggaaccgaattaatcatcgatttctcttcagatcaaattgcttccgctggatgatacgtgtgtatccttttatcagtctcttcttgatggcagtaagatgatgcaccgaaagggtcaatcggttccatatatacatctctgctagctagatatatagtagcctattgtcgtgcgtgatgggactgtccgtgcgcggttggtgcatatttagagttgttaatgcaaaagcagtgagagcgc

SEQ ID NO: 32397 - DNA, 1453 bp, Zea Mays
cttcgttcctcttcggtgccttgttccttcttccctttgttctttttttttaaaaaaaataaggtagcggcaaggcaaaggtgtgaatttgggtcggctagggtttcacacctgcatgcatggcacaagaaaacaagcacggaaaaggtcagcggcggcaggcaagggcaagggcaagggcgagaagcggcagcggcagccgcggttcgcgttcttgaccaagagcgaggtcgaccaccttgaggacggctaccggtggcgcaagtacggccagaaggccgtcaagaacagcccataccccaggagctactaccggtgcacgacgcagaagtgccccgtgaagaagcgggtggagcggtcgtcccaggacccggcggtggtgatcaccacgtacgagggcaagcacacgcaccccatcccggtcacgctccgcggcagcacccacatcctcgccgcgcagctgcaccaccaccacaaccaccacctcggcgccttcccgacgccgctgccgcagacgggcgcggcgccgttcgggcgggctgcaggcggaggcgtcatcgacatgctggggctcctgcccccgcgcaaccacggcatgagcggcggcccgatgagcgccgtggctggcgccgcgacgacgacggccgccaccattactactacctccaccacaccgtcgtatcccccctcgctccagatgcagcacttcatggcgcaggacttcgggctcctgcaggacatcatgctgccgtccttcggcggcggcggcggtaacatccagccctgaatcgatcccaattgctcaccgccatcgcaagcgcagcaagctaatgaggaaggaagctagctagataagagatagtagtttggttcttgttgatgcttaccctctttaatccttggttttttttttcaccgacgacgatttactcctctagacgggaccgtgccatgcatatcggtccttgatttgcctttccgcctgcagctgtactggcgccggcaggcctggtctcgtaacgtttcttaattatgcatgatgatctagctagtccttgcaggtagtactagccgttcttgtacatgtacctaattaatcaactcccccgccggctcgtcctggccatgagctatgataattttatgctagctcctctttgcattatattccttcttccgtccatcgccgtccagttgttgacttgttgtacatggaaccgaattaatcatcgatttctcttcagatcaaattgcttccgctggatgatacgtgtgtatccttttatcagtctcttcttgatggcagtaagatgatgcaccgaaagggtcaatcggttccatatatacatctctgctagctagatatatagtagcctattgtcgtgcgtgatgggactgtccgtgcgcggttggtgcatatttagagttgttaatgcaaaagcagtgagagcgc

SEQ ID NO: 32398 - DNA, 1408 bp, Zea Mays
caaatatatgcttactcattctaaacatgttaaagcactctctaggataatttaagtgtagcgtacaaaagaagaaacaaccaacgacaggattcacaaatgaaaaactggctgggggctgccgtgctgaagaaaaacggtccatgtctcggtccatttctccgtgccctctccagctctcctctccattcaaacagttcacaaacattacagattatgtacatatttcaaacaaaacagttcaaaactttgggctaaaaattacagtagtgcctgcatctatgacgcagtttgctcttccatattggagtgaccaagtcagaaaaatgagttacctgtgcaaagcgatcgtcgtcattgtcctcttgactgtgagcggcatttggcgctgaaatattggcaccacgaccactggtggcaccacggccaccagagaaggaagcaccaataggtcgaggcataccacgtccacgagagaagatgcttcatgctccacgaccacctctaggaccctcactagtcgtccgtggaactcgggatcctctgcccgtaacaccacgaccaataccaattgatcgagaatgactgcaacccctatgaccatcacgaaccggagtagcggagtagttggcagctgactgggactgacgaagttcatgaaatgcaattttctggaactccacgccactggagttgaggtccaacccatccactctaccagatcacggagaagggataaactgctccctatgaacacttaacgccacttcatctgagaagagacccctgttcatgcgattggagggtgacctcgtaggggttgtgtggtactcagcctcatcgaagaacatggctgcaattagagagataaaacaatgaataatgaacgagtatatacaaacaatcaatactcagaatatatctcatcaaatagaggactccaacatctgaaccatggctcaagcacctactatctgaagctgctgttaggaaggtaatgtggtcatttactatctgaagctactatctgaaccatgataagctgtgtgtatcataactatgtagaggctcaggacaggaaacattttcaatgtgtgtatgatatatcatgggcaaacaacctatcaaaactttcaggccaaacaaggtgaaatggaccgatttatacaacgtcaaacacctcctcagattaaaaaaaagtaaagttaaatacaacaccctgatacatctgaaatctggccatctccatgcattgactcgccataccattcagatcatagcatagcatagcatggtcattatgtatgaagcaagcacatctccaatcttttattcagattactggtcatggaattacacaacaaccaaaacacataagagtacataacgtcatgtggtagcagtgtat

SEQ ID NO: 32399 - DNA, 326 bp, Zea Mays
atcaaatcaaaatgtgaggaaaccaatcaatcaaataaagaggacgcgattttgtaccagcaactgcaaatcccatgcaatccttaggcctcccctcaaccaacgttacggcaaaagctgaggtgaaagtgtcaccagcccccgtggtatcaataccttctgtggcaggaattatcggctgtctgattggctcctatccctcaacaaacaaagcagcagatccttgcgatccaagtttaactagtacttctttcacaccctgcacaaggaaatgataaagaaatcacgggttctgaaaatgaatgtaatccctgtcaaaacttgac

SEQ ID NO: 32400 - DNA, 2400 bp, Zea Mays
gggccatgttccttatagatttactagcagataatgtcactgtgcaatatcattgaaggatttgcatcaaacaataatatccaaacacacagtcattgttaaccatccaaagcaatgtagtaagtcagttaaattataagctaaagcagataaaggagaaaatattgtggaggatataatgaaaatccaattcagatatctcaccattttatggcattctcctgcggcctggctgatctgttcaaatgtctcagtaggcatcccagtcaaatgcgctagctctgtttcaggagcatccacgctgttcggctatgacaaaagaaaattgttgctgcagctgctgcaacagtacttttgtggttgagcgggaagccgcagcacggcagcagtaacagctgccttttaccgcagccgaacagcgtaccatccccattttgcgcgctttgaggcactgttcatcactccagcagcctccccatccggccctgcaaaatagaggcaaccaatttcactccctttttctccgggttctctctcctccacgcaaagtaaaatggggatggggaacgggatggagaggccgttggagtgatgaataccttttatagcgtgcaaaatggggatggggagcgggatgaggaggctgctagaggagacggatgcacgctaaaaggcaactgttgcccagatatggatgcggatgtgcaacactgctagaaacggagacggatgtacgacactgttcatactgaggaaggaccttactttagggatgcggagcggaggctgctggagttggtctaataatgggttcctacacactcaaaatacataagagatgaaggtatgtaattttccaagttcgcaaagtgcttgagctttttatgttagacacataataatcttataaatgtacaataggagcattgtaggaaagtgataaatactttatttattctgttgattaggaatacaagagttttctctaggtttgtgggttgactcaaaactcatttaatggaaaccaatccatttatcaaaaaaagtggtatagaatgaaccaaaaaatagactcataaccactgggtacccactagcaccaatacactgtattaagttacagagagagtcaatgcaggattgaaccttcatacaacagatgattggttcaaatggagtctcatgatactaatcttcctaaaatcgccaaaatatgactgaagtacatgtgcagtgtaatgacattggatccattgcacatatgcatggaagcatgcaatagatatggaagaaatagaacttgaagatacccttctgcaccattggatttctattcttgttggtcagacaaaacatataattggtccattgagcacttcaacaattgagattttagaagatcccaccatctagtcatgggaagccccttaaacactagaaaaaaaaacatagatattcatttcatctacgaacagagactgttggaggctgaaagtttcaaattagagttcatttaatggaggcgagttgttagggtgacaggcattgttttcttccaattgtcatgtggatgcaaatgttgaattaatcaactcttttgttcccaagaaccacgatttgcaaggaacaactggcttgtgcatgccaatgtctacacatagttgagctagatggaactgagttttagtttcagacaggaagcagaggtctacttggctagctgagtttggcaaggtaactagtaactacagaggtttgctctggtggttgtcaaggtgaataaagaggattgaggccacccatgaggccatgacaccatacatttgaagacagtaatagtagcaaagtaactaatcaaagaccaaggtaacaatactgaacctagaaattaccaaatgatcccacaggttggcccaaatacagcttgaatataataaccccctacagtgatcctataccacgtgatagaaagtacttcctctgttccaaaaaggatgcaactatgaaatttgtgcaagtcaaacaagcttggctttgaccaagtttatagtaaatagtgttaacatttatgtctgtaactaggtttactatgaaatatattttataattaattcatacttattttatatcataaatattagtatttttggtatagatttagtcaaacctcaaattttttgacttctcttttctggatgaatagagtaccatagaagattaccattaaagttactaaatcctcaaccaaagagagactcagcaacatatttggctgcataaagtactataaggagaatggagtcgcatcaatgctgccaaaacagcatcctttgggaaaaaacagtacctagctagatgtcagtagcaaatttccttatacattgactaataatcttttac

SEQ ID NO: 32401 - DNA, 2543 bp, Zea Mays
attatttcttctagtggagtttgtatctaccaatgagattctagggctacaaataatctttaatcattattttacaagcctctttactatgtaactaggttattatatggacttactaatggaagttcctaacatacaatgcattcccaacacaaaactcaaaacatttacgagtagcgtacattgaattatggagggtcaaagatgttagaaagaaaaaagatgaaaaagaaaagggaaaaagataatatggacttttatttgcgaaggcacagccgccgccattacttcatcttcctcgcagcgccggcgccccatcctgcggccctcgtgatcgggctctcagcgacggcgtcagcggcttccccttccgcctctcgccagtcgcctcgcgccctcgcctccggccctccacacaccggcctgcgaccttgcgtgcctgcctctctctctctcctccttccggtggaacggcgcccggctgcgccgcgcgcgccttgagggtagcgggagccaacagccgctgctccaccaaggcggtcgcgccgctttgggagcgcttatgccccaaagcgaagcgtcacccgtccgcttagcgcgctgaagcgcgcgcttagtgccgcttcttggaaccctaacggctgtacctggcaaaaagagggcaattattgtgtgtgcaacagagcacatgcagaaagatctgattcaagtgtggaaactttgtgagacggctatcttttttttcaaagtcagcgtcttttcggtggatctgtagaggactttaattctctgaaggagtgcaatggtcaagttgcctgcactgagaatgaagaggatgtttcatggtgatgattgtgctaatgagttcaaaatcaggaccatgaaatccatgaaagtttcacactttcatgtcagcgagttagagcagtcagctatgtcgaacttatcagataaaactcctcaagatgagccagacccaaccattcaacttgctgaccaggatattagggtaacagaagcttctggcttgcatgatctgattggaggaaaatccatgctcgaggatttaacatccgaagtgatagattcaccaaattcagagggtgactcctctgctaattatgatgacaacaaatctgtgttacatgcagtgaattatgttggcaaagagtttgcagatgatggtgtagattcttcattccagaatttctgttttagtgatcatgaggcgaactggggtttgaatgagtgttgcagactgatggatatttatagtccagatgacgatttctcttatttgcttgatagtccacctgatcttctgcctagttatactggattttgtgatgaatttgtatcaatagatgcattgatgaatatgagtagcagatgtggaatcttcccacttattgagagcgctacggaagccagtgttgataataagccatgctcatctgaggtggatttgtgctttaataattctgaggtattagagtggctcaaccctaatctattggagggggatttaccagatcttgttgattttgctgagttaaattcaaatgctacccctgcaaaaaaagagcaatggaccaggaatgttactctcgtgcttgatttggatgaaacccttgttcattcaactatgaagcattgtgatgacgctgatttcacattttctatgttctatgatatgaaagagcatgttgtatacgtgaaaaagagaccgcatgtccatatgttcctccaaaggatggttgaaatgtttgaggtagtgatatttactgccagtcaaagtgtttatgcagaccagttgcttgacatgctggatccagagaagaaacttttctccaagcgtttcttccgggaatcgtgtttgatcacagacagcggctacagaaaagatctgactgttgttggagtcgaccttgccaaggttgccataattgacaacactccacaggtttttgagctgcaagtgaacaatggtataccaatagagagttggtatagcaaccccttggacgaggcgttacctcagttgatcccattcttggagaccctcgctgtagcagatgatgtccggcctatcattgccaagaagtttggcaatataatagataatcgctaaggttcttaaataagtatagggttagtcttgtttactggaagaacctagatgacatctttaactggtcaaggtgggggcatttttctcttaagggctagtttgggaaccctattttcctaagttttttttttccattttcccaagtaaaattagttcattttttcttgggaaaatataaatcccttggaaaatgaagttctcaaaccaactctaagggctagttggcccgtaggaattaagagtaggaattaagagtttcggtgatggggctattccttagaagaactgtacatatcctaaattttgttttgcaactttgtacataggatggttggaattgaaagacaaacatctatgcaaagtttctttgcattttgctcaatgtggtttaatgttcgcagctgtacgatgt

SEQ ID NO: 32402 - DNA, 2671 bp, Zea Mays
attatttcttctagtggagtttgtatctaccaatgagattctagggctacaaataatctttaatcattattttacaagcctctttactatgtaactaggttattatatggacttactaatggaagttcctaacatacaatgcattcccaacacaaaactcaaaacatttacgagtagcgtacattgaattatggagggtcaaagatgttagaaagaaaaaagatgaaaaagaaaagggaaaaagataatatggacttttatttgcgaaggcacagccgccgccattacttcatcttcctcgcagcgccggcgccccatcctgcggccctcgtgatcgggctctcagcgacggcgtcagcggcttccccttccgcctctcgccagtcgcctcgcgccctcgcctccggccctccacacaccggcctgcgaccttgcgtgcctgcctctctctctctcctccttccggtggaacggcgcccggctgcgccgcgcgcgccttgagggtagcgggagccaacagccgctgctccaccaaggcggtcgcgccgctttgggagcgcttatgccccaaagcgaagcgtcacccgtccgcttagcgcgctgaagcgcgcgcttagtgccgcttcttggaaccctaacggctgtacctggcaaaaagagggcaattattgtgtgtgcaacagagcacatgcagaaagatctgattcaagtgtggaaactttgtgagacggctatcttttttttcaaagtcagcgtcttttcgggtaggttatagtaaattcggcttttaatttccttcgcttcatgaatctggctctggtggcactgacgttatttggcaagttttagtggatctgtagaggactttaattctctgaaggagtgcaatggtcaagttgcctgcactgagaatgaagaggatgtttcatggtgatgattgtgctaatgagttcaaaatcaggaccatgaaatccatgaaagtttcacactttcatgtcagcgagttagagcagtcagctatgtcgaacttatcagataaaactcctcaagatgagccagacccaaccattcaacttgctgaccaggatattagggtaacagaagcttctggcttgcatgatctgattggaggaaaatccatgctcgaggatttaacatccgaagtgatagattcaccaaattcagagggtgactcctctgctaattatgatgacaacaaatctgtgttacatgcagtgaattatgttggcaaagatgatggtgtagattcttcattccagaatttctgttttagtgatcatgaggcgaactggggtttgaatgagtgttgcagactgatggatatttatagtccagatgacgatttctcttatttgcttgatagtccacctgatcttctgcctagttatactggattttgtgatgaatttgtatcaatagatgcattgatgaatatgagtagcagatgtggaatcttcccacttattgagagcgctacggaagccagtgttgataataagccatgctcatctgaggtggatttgtgctttaataattctgaggtattagagtggctcaaccctaatctattggagggggatttaccagatcttgttgattttgctgagttaaattcaaatgctacccctgcaaaaaaagagcaatggaccaggaatgttactctcgtgcttgatttggatgaaacccttgttcattcaactatgaagcattgtgatgacgctgatttcacattttctatgttctatgatatgaaagagcatgttgtatacgtgaaaaagagaccgcatgtccatatgttcctccaaaggatggttgaaatgtttgaggtagtgatatttactgccagtcaaagtgtttatgcagaccagttgcttgacatgctggatccagagaagaaacttttctccaagcgtttcttccgggaatcgtgtttgatcacagacagcggctacagaaaagatctgactgttgttggagtcgaccttgccaaggttgccataattgacaacactccacaggtttttgagctgcaagtgaacaatggtataccaatagagagttggtatagcaaccccttggacgaggcgttacctcagttgatcccattcttggagaccctcgctgtagcagatgatgtccggcctatcattgccaagaagtttggcaatataatagataatcgctaaggttcttaaataagtatagggttagtcttgtttactggaagaacctagatgacatctttaactggtcaaggtgggggcatttttctcttaagggctagtttgggaaccctattttcctaagttttttttttccattttcccaagtaaaattagttcattttttcttgggaaaatataaatcccttggaaaatgaagttctcaaaccaactctaagggctagtttgggagtcacttccggttttgtggctcccaaactagccctaaaaggcaggttggcccgtaggaattaagagtaggaattaagagtttcggtgatggggctattccttagaagaactgtacatatcctaaattttgttttgcaactttgtacataggatggttggaattgaaagacaaacatctatgcaaagtttctttgcattttgctcaatgtggtttaatgttcgcagctgtacgatgt

SEQ ID NO: 32403 - DNA, 3292 bp, Zea Mays
aggggcctcaggctctaaggtaaagacacgaagaagcaactgaatgctactacttagaacaagtttaataatataagtcaacatcgggttttataaaaaaaatgtcatattacatgtagccaactaaaagtatacatatataataactctccaatagtataattttggtccacctctttggttcacaaaatgtcttggagtgtctaaacaacaagctttaatttccttgttgctccatttctctttttttttcatgtcattataatttgatgtggcacctcttacatacaccttgttatatttgctctacacagacatgatgtggacagggcgtagcgacactccatctaataattgaggatggaattaattaatcgaatggttgcccccacgcatgcctcgatctgtcggtcacagttttatgattggccgatagtggtgacacaaacgcaagagacgctgcaccactgaagtgcgcgatcgagcccctttatttcatccaccataacaatgcgcgccttgtcagtggacatgatcgagaacatgcgaagaataatatagtagtagtaataatatggtagcagagccctgcaaccgctctggtccactgtgtttcgaagtttgaacggtataagtgcttcttgttgctgaatagtgtatagccgtatgcccatatatatagttactcacaccagatgagctatttcttaattacaaaaaaaatgatatagggactcgctgtttaattttattgtctattttaaactttactttataaataaaaatgtagaataatattttgtacgacatatgtaacgatattttacgttactctcgtggtctatatatggcatttgtaaaccagccggcgccaaaggaaatgctgccaagtagatgattggtctcctcggtcgatcgatcgatcgatcgctcacgtacgctagctgccagctagtgggtcgcgcgcggcatggaataatccggcacgtggtccgcacgtacgcccttggcacggaattatatatccagttgttgacaggcacacggtgggggccgcgtgcatgcatgattgactcggaagcttcaatcacgcagcgcgctggcatggcacgtacggtggaatttcccgtaccgtcgttcgagacattagaggcagcaaaagagcttgtgtgcagagatttgtagctagtgcatgcagctgtagcagacgacgacgagtcgacgacaagtggcccgtgccgcgtgggcgtggactccatttccggaaaccggaagctctagaaatcatcgcaaccggcgactcgaggcaggcagcagggtcactgtacgtgtgtcttattaattgatcgatcgatcgattggatccaataatgaatggatgcgtcgacgtactcccaacaacaattatactctgatccccaccacacacaccttcaaagctactgctacaaaagcatcgtcgatcgagcacatattttatctccccctttctcagcgagaagacagaaaaaataaaataaaaaggaccttagcttgttgtatatgctttcggtgatatgtatgcatgattccgtaaagttcataaattaaagcagcagcagtcttgtgctaagcctacctagctaaccgaaatgggtgcagaccagcgtggcatgcatgcagcgctccacccttttttcttctgggctaaggaataccctactactataccggccccgtatgagttgaagtaaccggagtcgatctctactacggcagcaactcacatggtatttcccagagttgctgccgtagccgtaggtttggaggtgccatggcggcaagtgcaaacaacagctccactaatcaatgcatgcagtggatggatggagtacagttcaatgccagtagtagtgaccgatggtgtagttctgttgctctacagcacagagcaccgtgcaccatgcatcttcctataaactgtactactactagtatctgatgaggttattattgttatttatgtttcgatttaatgtgaaagctgtcctctctctcactctcgacgagagacggacctcaaagagctactactactaccattggtagagctaaacagtactccggccgacagcaacagcagcagcagcagcttgttgttttccgtttccgggctgcccgcacgcacgggcatgcacggcagccgcgacagcaacggggtccatatctacgtcggcgccggccggcaagcctatccacaaaccacgcacaagctggctgcacgtatggacagccttgcatttggcttgcgcgcctgccgggcggccatccctgaccctgaggcagacaggaccactgggctgggcttgtaggtactgtatgtaatgctcttggaaaggtaagagactgaggcactgtgctttgccctcctgcatgcttgcccgcccccttcctcccttttccagggcactgttgcctctactaggagctagagccagcagatctcggttttcatcccgtggcacttgcgggtgtgccacttgcccacttgactcgctgttcctgagctattgtttcattctcttgcttagcgtatgttagaaatatagacattttccgtaccattttaattccataaattaacattatgatgatgacatataatagataatcaaacatagataacatgatctaaaaaatatcaataataatatggatcatgagaacacaaagcatatgaagcatgtaaatcatataaataaaataagtatataaacatggttcatggattattgcggaacaactggaaataaacagataacaatataaacaggatgactgtaaaattaagacagacagatataacatattataatacgatagaacaaagctacatacgacatatataatatgcagaatataaaattgtaatgaaactgaattgatcataccctctcatgcgctccgaggatcctgatccttgtccaacttctcttgtcatccgatcgagatgaagacgccaagaaccagcgatgaagacaacgacaaacgttgggcagtcgcgtagacgctccccaaaaacctaattgccgatccctcgtgcaaggtctcgaacggcaccagcttcggaggcacccgctctctcgcttctctgtgcgtgcagagtcacgagatggaaataccctcactcggcggctggactgtgagactaaaagtgtttctcgcgtgtaccgagtgacaggggtgctcctctatttaacctctcgcagagggaagctgaaggagaaaggtcgccgagtcacgccaagagtcg

SEQ ID NO: 32404 - DNA, 2564 bp, Zea Mays
atttgagaaattatttttaatccatctcttctcggccgcagcccacatataaagcaaggcgagggcgaggtagggaggatcttggaatttggccgccgtctgcgttgcttgggtggggaaggagcaggcggccaggcgcagagccgcaaaagcagacgcgaaaaagcccaggcccgagccgaagcggggaggcgacaccgctgcacctgcactaccgctcgcacggtcagcgatttgccgcctcgcgggagccagctttggcgtcggcgtcggcgtcatcgtcggcggggagttcccggagagggattccggtgaggatgagcagcggcggcggtggagggggagccaggggaccgtcggggcccgtgccggcgtccgcgaggaagctcgtgcaggggctcaaggagatcgtgaaccgccccgacgcggagatctacgcagcgctgcgggagtgcaacatggacccggacgaggcggtcagccgcctcctctcccaagatacttttcaagaggtaaagagcaagcgtgataggaaaaaagaggttaaagaaactccagagccaagatctcgaggagcaagtaactccagtcgatccagtagaggtggtgtggaccgtgctggacgaggcaattcagttcagtctggatcgagtggcactgattatatggcttcaaggtcatcaatattgggacctgctgtggcagctaccaatgccatgcagaagccaacagttcctagtttgtccacaaacaaagatgtggttcctaatggatcagttggagcacaacaatcatcatctggttttcagcacaattggtttggggtgccaggtcagatgtcaatggctgatatagtgaaaatgggaagacctcaagtgaggtcttctggcaagcctatggctgcaggagacacatcatatgctggtcaaaccccatctttatctagctctataaaccagaactcaaaacaatcggcaagcacagccctaccaactacttttgaccagggctttcctgctctcccagaccctattccacacacagtgaattctagtcatggttcagctgggaacaaccatacacatgagaatgattggtttcctcaggacgacctgccatctggagttcagcccacatgcattgaggcgtctggtgaccagtcgctatttgtggcatcactggaccaatctatgttggttgccgatgcttcttactcacaagaaatttctcatgcagaagagaacaactccactgcagttgaagcaacactgtcttccgaaagacacttggaaattgtggaggatgacaatcatttcaacgacgggttattgcagaactcaagcgcttaccaggctcaagtgcattcctatgttgataatgaagttgggatttccaatgttgatgcagaatcagcttcgatgaacttccagcatttaagcctgcagaatgaagatatagctgcaaccaagtctgctgaggataaccctgcggttatactccctgatcatctacaagctgcaaatgcagattgtgctcatttgagctttggtagttttgaatctggtgccttctctggcttgctttcatcaaaggtcccaaaaggcagtttggaggacgacgaggtgctcattccagatgaatcccgatcagttaatcgaatagatgttaggaatcaagattactatgatgacgatgctctaaattcttcagaaaatgtggatgttgagacaagaattggtaatatggataacattgatggaccttcagtttcagaatctgatgcactgaggcagggtgccatagatgtgcctggtcttcaatatgacctgccatcagtttcaagtcatgcatattcaaacacaacacagccaagtacaatggaagaaccacaaggaaacacacaagcacaacccctttcccatttttctggcttactgcaagcaaatactctacccaataacttgttggggtcaaatcttacccctcttcgggagtttgacttctcccagttccttcagacacagtcagctacaaaatataacccatctgttgcacctaataatctgccaccaatctccatgcaagagacttcaaaacagggaggcttccccaatactcagtctacgcaacatgttcccagtacaagcatttcgtcgggtcttcctctcccacaacaattgcctgtatactctcagccaactctgccccttgggccttttaccagcctggttggctatccatatttgcctcagaactattacctaccttcagcgccattccagcaagcgtactcaagtaatgggcctttccatcaatctgctgctcctgccgtgcctggagctggtatgaagtatccgatgccacaatacaagagcagccctcctgcttcgaccctaccacaaccatcatcactctctggttacggagggttcggaagtgcaaataatatccctggaaatttcagccaaaatcagggtgctcccgctgcacctacaactttgggatttgatgaagctttaggcacacaattcaaacaccccaatcattatgcagcactacagcag

SEQ ID NO: 32405 - DNA, 2550 bp, Zea Mays
aattatttttaatccatctcttctcggccgcagcccacatataaagcaaggcgagggcgaggtagggaggatcttggaatttggccgccgtctgcgttgcttgggtggggaaggagcaggcggccaggcgcagagccgcaaaagcagacgcgaaaaagcccaggcccgagccgaagcggggaggcgacaccgctgcacctgcactaccgctcgcacggtcagcgatttgccgcctcgcgggagccagctttggcgtcggcgtcggcgtcatcgtcggcggggagttcccggagagggattccggtgaggatgagcagcggcggcggtggagggggagccaggggaccgtcggggcccgtgccggcgtccgcgaggaagctcgtgcaggggctcaaggagatcgtgaaccgccccgacgcggagatctacgcagcgctgcgggagtgcaacatggacccggacgaggcggtcagccgcctcctctcccaagatacttttcaagaggtaaagagcaagcgtgataggaaaaaagaggttaaagaaactccagagccaagatctcgaggagcaagtaactccagtcgatccagtagaggtggtgtggaccgtgctggacgaggcaattcagttcagtctggatcgagtgattatatggcttcaaggtcatcaatattgggacctgctgtggcagctaccaatgccatgcagaagccaacagttcctagtttgtccacaaacaaagatgtggttcctaatggatcagttggagcacaacaatcatcatctggttttcagcacaattggtttggggtgccaggtcagatgtcaatggctgatatagtgaaaatgggaagacctcaagtgaggtcttctggcaagcctatggctgcaggagacacatcatatgctggtcaaaccccatctttatctagctctataaaccagaactcaaaacaatcggcaagcacagccctaccaactacttttgaccagggctttcctgctctcccagaccctattccacacacagtgaattctagtcatggttcagctgggaacaaccatacacatgagaatgattggtttcctcaggacgacctgccatctggagttcagcccacatgcattgaggcgtctggtgaccagtcgctatttgtggcatcactggaccaatctatgttggttgccgatgcttcttactcacaagaaatttctcatgcagaagagaacaactccactgcagttgaagcaacactgtcttccgaaagacacttggaaattgtggaggatgacaatcatttcaacgacgggttattgcagaactcaagcgcttaccaggctcaagtgcattcctatgttgataatgaagttgggatttccaatgttgatgcagaatcagcttcgatgaacttccagcatttaagcctgcagaatgaagatatagctgcaaccaagtctgctgaggataaccctgcggttatactccctgatcatctacaagctgcaaatgcagattgtgctcatttgagctttggtagttttgaatctggtgccttctctggcttgctttcatcaaaggtcccaaaaggcagtttggaggacgacgaggtgctcattccagatgaatcccgatcagttaatcgaatagatgttaggaatcaagattactatgatgacgatgctctaaattcttcagaaaatgtggatgttgagacaagaattggtaatatggataacattgatggaccttcagtttcagaatctgatgcactgaggcagggtgccatagatgtgcctggtcttcaatatgacctgccatcagtttcaagtcatgcatattcaaacacaacacagccaagtacaatggaagaaccacaaggaaacacacaagcacaacccctttcccatttttctggcttactgcaagcaaatactctacccaataacttgttggggtcaaatcttacccctcttcgggagtttgacttctcccagttccttcagacacagtcagctacaaaatataacccatctgttgcacctaataatctgccaccaatctccatgcaagagacttcaaaacagggaggcttccccaatactcagtctacgcaacatgttcccagtacaagcatttcgtcgggtcttcctctcccacaacaattgcctgtatactctcagccaactctgccccttgggccttttaccagcctggttggctatccatatttgcctcagaactattacctaccttcagcgccattccagcaagcgtactcaagtaatgggcctttccatcaatctgctgctcctgccgtgcctggagctggtatgaagtatccgatgccacaatacaagagcagccctcctgcttcgaccctaccacaaccatcatcactctctggttacggagggttcggaagtgcaaataatatccctggaaatttcagccaaaatcagggtgctcccgctgcacctacaactttgggatttgatgaagctttaggcacacaattcaaacaccccaatcattatgcagcactacagcag

SEQ ID NO: 32406 - DNA, 2508 bp, Zea Mays
attatttttaatccatctcttctcggccgcagcccacatataaagcaaggcgagggcgaggtagggaggatcttggaatttggccgccgtctgcgttgcttgggtggggaaggagcaggcggccaggcgcagagccgcaaaagcagacgcgaaaaagcccaggcccgagccgaagcggggaggcgacaccgctgcacctgcactaccgctcgcacggtcagcgatttgccgcctcgcgggagccagctttggcgtcggcgtcggcgtcatcgtcggcggggagttcccggagagggattccggtgaggatgagcagcggcggcggtggagggggagccaggggaccgtcggggcccgtgccggcgtccgcgaggaagctcgtgcaggggctcaaggagatcgtgaaccgccccgacgcggagatctacgcagcgctgcgggagtgcaacatggacccggacgaggcggtcagccgcctcctctcccaagatacttttcaagaggtaaagagcaagcgtgataggaaaaaagaggttaaagaaactccagagccaagatctcgaggagcaagtaactccagtcgatccagtagaggtggtgtggaccgtgctggacgaggcaattcagttcagtctggatcgagtggcactgattatatggcttcaaggtcatcaatattgggacctgctgtggcagctaccaatgccatgcagaagccaacagttcctagtttgtccacaaacaaagatgtggttcctaatggatcagttggagcacaacaatcatcatctggttttcagcacaattggtttggggtgccaggtcagatgtcaatggctgatatagtgaaaatgggaagacctcaagtgaggtcttctggcaagcctatggctgcaggagacacatcatatgctggtcaaaccccatctttatctagctctataaaccagaactcaaaacaatcggcaagcacagccctaccaactacttttgaccagggctttcctgctctcccagaccctattccacacacagtgaattctagtcatggttcagctgggaacaaccatacacatgagaatgattggtttcctcaggacgacctgccatctggagttcagcccacatgcattgaggcgtctggtgaccagtcgctatttgtggcatcactggaccaatctatgttggttgccgatgcttcttactcacaagaaatttctcatgcagaagagaacaactccactgcagttgaagcaacactgtcttccgaaagacacttggaaattgtggaggatgacaatcatttcaacgacgggttattgcagaactcaagcgcttaccaggctcaagtgcattcctatgttgataatgaagttgggatttccaatgttgatgcagaatcagcttcgatgaacttccagcatttaagcctgcagaatgaagatatagctgcaaccaagtctgctgaggataaccctgcggttatactccctgatcatctacaagctgcaaatgcagattgtgctcatttgagctttggtagttttgaatctggtgccttctctggcttgctttcatcaaaggtcccaaaaggcagtttggaggacgacgaggaatcaagattactatgatgacgatgctctaaattcttcagaaaatgtggatgttgagacaagaattggtaatatggataacattgatggaccttcagtttcagaatctgatgcactgaggcagggtgccatagatgtgcctggtcttcaatatgacctgccatcagtttcaagtcatgcatattcaaacacaacacagccaagtacaatggaagaaccacaaggaaacacacaagcacaacccctttcccatttttctggcttactgcaagcaaatactctacccaataacttgttggggtcaaatcttacccctcttcgggagtttgacttctcccagttccttcagacacagtcagctacaaaatataacccatctgttgcacctaataatctgccaccaatctccatgcaagagacttcaaaacagggaggcttccccaatactcagtctacgcaacatgttcccagtacaagcatttcgtcgggtcttcctctcccacaacaattgcctgtatactctcagccaactctgccccttgggccttttaccagcctggttggctatccatatttgcctcagaactattacctaccttcagcgccattccagcaagcgtactcaagtaatgggcctttccatcaatctgctgctcctgccgtgcctggagctggtatgaagtatccgatgccacaatacaagagcagccctcctgcttcgaccctaccacaaccatcatcactctctggttacggagggttcggaagtgcaaataatatccctggaaatttcagccaaaatcagggtgctcccgctgcacctacaactttgggatttgatgaagctttaggcacacaattcaaacaccccaatcattatgcagcactacagcag

SEQ ID NO: 32407 - DNA, 2118 bp, Zea Mays
cccacatataaagcaaggcgagggcgaggtagggaggatcttggaatttggccgccgtctgcgttgcttgggtggggaaggagcaggcggccaggcgcagagccgcaaaagcagacgcgaaaaagcccaggcccgagccgaagcggggaggcgacaccgctgcacctgcactaccgctcgcacggtcagcgatttgccgcctcgcgggagccagctttggcgtcggcgtcggcgtcatcgtcggcggggagttcccggagagggattccggtgaggatgagcagcggcggcggtggagggggagccaggggaccgtcggggcccgtgccggcgtccgcgaggaagctcgtgcaggggctcaaggagatcgtgaaccgccccgacgcggagatctacgcagcgctgcgggagtgcaacatggacccggacgaggcggtcagccgcctcctctcccaagatacttttcaagaggtaaagagcaagcgtgataggaaaaaagaggttaaagaaactccagagccaagatctcgaggagcaagtaactccagtcgatccagtagaggtggtgtggaccgtgctggacgaggcaattcagttcagtctggatcgagtggcactgattatatggcttcaaggtcatcaatattgggacctgctgtggcagctaccaatgccatgcagaagccaacagttcctagtttgtccacaaacaaagatgtggttcctaatggatcagttggagcacaacaatcatcatctggttttcagcacaattggtttggggtgccagaagagaacaactccactgcagttgaagcaacactgtcttccgaaagacacttggaaattgtggaggatgacaatcatttcaacgacgggttattgcagaactcaagcgcttaccaggctcaagtgcattcctatgttgataatgaagttgggatttccaatgttgatgcagaatcagcttcgatgaacttccagcatttaagcctgcagaatgaagatatagctgcaaccaagtctgctgaggataaccctgcggttatactccctgatcatctacaagctgcaaatgcagattgtgctcatttgagctttggtagttttgaatctggtgccttctctggcttgctttcatcaaaggtcccaaaaggcagtttggaggacgacgaggtgctcattccagatgaatcccgatcagttaatcgaatagatgttaggaatcaagattactatgatgacgatgctctaaattcttcagaaaatgtggatgttgagacaagaattggtaatatggataacattgatggaccttcagtttcagaatctgatgcactgaggcagggtgccatagatgtgcctggtcttcaatatgacctgccatcagtttcaagtcatgcatattcaaacacaacacagccaagtacaatggaagaaccacaaggaaacacacaagcacaacccctttcccatttttctggcttactgcaagcaaatactctacccaataacttgttggggtcaaatcttacccctcttcgggagtttgacttctcccagttccttcagacacagtcagctacaaaatataacccatctgttgcacctaataatctgccaccaatctccatgcaagagacttcaaaacagggaggcttccccaatactcagtctacgcaacatgttcccagtacaagcatttcgtcgggtcttcctctcccacaacaattgcctgtatactctcagccaactctgccccttgggccttttaccagcctggttggctatccatatttgcctcagaactattacctaccttcagcgccattccagcaagcgtactcaagtaatgggcctttccatcaatctgctgctcctgccgtgcctggagctggtatgaagtatccgatgccacaatacaagagcagccctcctgcttcgaccctaccacaaccatcatcactctctggttacggagggttcggaagtgcaaataatatccctggaaatttcagccaaaatcagggtgctcccgctgcacctacaactttgggatttgatgaagctttaggcacacaattcaaacaccccaatcattatgcagcactacagcag

SEQ ID NO: 32408 - DNA, 3239 bp, Zea Mays
tcttggaatttggccgccgtctgcgttgcttgggtggggaaggagcaggcggccaggcgcagagccgcaaaagcagacgcgaaaaagcccaggcccgagccgaagcggggaggcgacaccgctgcacctgcactaccgctcgcacggtcagcgatttgccgcctcgcgggagccagctttggcgtcggcgtcggcgtcatcgtcggcggggagttcccggagagggattccggtgaggatgagcagcggcggcggtggagggggagccaggggaccgtcggggcccgtgccggcgtccgcgaggaagctcgtgcaggggctcaaggagatcgtgaaccgccccgacgcggagatctacgcagcgctgcgggagtgcaacatggacccggacgaggcggtcagccgcctcctctcccaagatacttttcaagaggtaaagagcaagcgtgataggaaaaaagaggttaaagaaactccagagccaagatctcgaggagcaagtaactccagtcgatccagtagaggtggtgtggaccgtgctggacgaggcaattcagttcagtctggatcgagtggcactgattatatggcttcaaggtcatcaatattgggacctgctgtggcagctaccaatgccatgcagaagccaacagttcctagtttgtccacaaacaaagatgtggttcctaatggatcagttggagcacaacaatcatcatctggttttcagcacaattggtttggggtgccaggtcagatgtcaatggctgatatagtgaaaatgggaagacctcaagtgaggtcttctggcaagcctatggctgcaggagacacatcatatgctggtcaaaccccatctttatctagctctataaaccagaactcaaaacaatcggcaagcacagccctaccaactacttttgaccagggctttcctgctctcccagaccctattccacacacagtgaattctagtcatggttcagctgggaacaaccatacacatgagaatgattggtttcctcaggacgacctgccatctggagttcagcccacatgcattgaggcgtctggtgaccagtcgctatttgtggcatcactggaccaatctatgttggttgccgatgcttcttactcacaagaaatttctcatgcagaagagaacaactccactgcagttgaagcaacactgtcttccgaaagacacttggaaattgtggaggatgacaatcatttcaacgacgggttattgcagaactcaagcgcttaccaggctcaagtgcattcctatgttgataatgaagttgggatttccaatgttgatgcagaatcagcttcgatgaacttccagcatttaagcctgcagaatgaagatatagctgcaaccaagtctgctgaggataaccctgcggttatactccctgatcatctacaagctgcaaatgcagattgtgctcatttgagctttggtagttttgaatctggtgccttctctggcttgctttcatcaaaggtcccaaaaggcagtttggaggacgacgaggtgctcattccagatgaatcccgatcagttaatcgaatagatgttaggaatcaagattactatgatgacgatgctctaaattcttcagaaaatgtggatgttgagacaagaattggtaatatggataacattgatggaccttcagtttcagaatctgatgcactgaggcagggtgccatagatgtgcctggtcttcaatatgacctgccatcagtttcaagtcatgcatattcaaacacaacacagccaagtacaatggaagaaccacaaggaaacacacaagcacaacccctttcccatttttctggcttactgacttcaaaacagggaggcttccccaatactcagtctacgcaacatgttcccagtacaagcatttcgtcgggtcttcctctcccacaacaattgcctgtatactctcagccaactctgccccttgggccttttaccagcctggttggctatccatatttgcctcagaactattacctaccttcagcgccattccagcaagcgtactcaagtaatgggcctttccatcaatctgctgctcctgccgtgcctggagctggtatgaagtatccgatgccacaatacaagagcagccctcctgcttcgaccctaccacaaccatcatcactctctggttacggagggttcggaagtgcaaataatatccctggaaatttcagccaaaatcagggtgctcccgctgcacctacaactttgggatttgatgaagctttaggcacacaattcaaacaccccaatcattatgcagcactacagcagagtgataattcaacgatgtggcttcatggaggcgctggttcaagaacaatttctgcagttccgcctggtaacttctatggtttccagggccagagtcagcatggtggcttccgccaggcacatcagccatctcagtacggtggtcttgggtatccaagcttctaccagtcgcagaccagtctgccacaggagcacccccagaaccccactgagggaagcttgaacaatccccagggggtaccatcccagccttcacaccagctctggcagcacatctactaaaccttctgtgctctccttggagatgcctctctacgctgccagcttacctgcaagcgagcagactagctgagcccaacagcaatgaagtgtgttgtttttctttctttcttttttttctccagctgtgtgttctggaactaaattaggctgtcgtggtttttacttgatagtgagtggtgttgcagaggtgctatcttgtaacggtaaagtcctaactcatctaacagatctgcttttcataccctgtaatgtgccgttttgttcttgatgcctagaagcttctacgtgctgcagctacttttgatatgcatgcatgcttatgaagttgcagccctggtttgcagaatcgtacaggatgagaatgggtactgctagcctgctacaaatttcccatgggctttgtttgcttggagaagcattgaagaacccaacaatattgaagtcaccaatccggtggactcaactgcgatgttcacatgcaatgcaaatgttcatgcaaaccagtgtatcaatttataagcctgctatgttgttatcgaaccagttttaacaaaacagccgcagagtgtcaggcagttccatggaaattgagctgtaccgtatgcattggagttaaattcca

SEQ ID NO: 32409 - DNA, 3381 bp, Zea Mays
tcttggaatttggccgccgtctgcgttgcttgggtggggaaggagcaggcggccaggcgcagagccgcaaaagcagacgcgaaaaagcccaggcccgagccgaagcggggaggcgacaccgctgcacctgcactaccgctcgcacggtcagcgatttgccgcctcgcgggagccagctttggcgtcggcgtcggcgtcatcgtcggcggggagttcccggagagggattccggtgaggatgagcagcggcggcggtggagggggagccaggggaccgtcggggcccgtgccggcgtccgcgaggaagctcgtgcaggggctcaaggagatcgtgaaccgccccgacgcggagatctacgcagcgctgcgggagtgcaacatggacccggacgaggcggtcagccgcctcctctcccaagatacttttcaagaggtaaagagcaagcgtgataggaaaaaagaggttaaagaaactccagagccaagatctcgaggagcaagtaactccagtcgatccagtagaggtggtgtggaccgtgctggacgaggcaattcagttcagtctggatcgagtggcactgattatatggcttcaaggtcatcaatattgggacctgctgtggcagctaccaatgccatgcagaagccaacagttcctagtttgtccacaaacaaagatgtggttcctaatggatcagttggagcacaacaatcatcatctggttttcagcacaattggtttggggtgccaggtcagatgtcaatggctgatatagtgaaaatgggaagacctcaagtgaggtcttctggcaagcctatggctgcaggagacacatcatatgctggtcaaaccccatctttatctagctctataaaccagaactcaaaacaatcggcaagcacagccctaccaactacttttgaccagggctttcctgctctcccagaccctattccacacacagtgaattctagtcatggttcagctgggaacaaccatacacatgagaatgattggtttcctcaggacgacctgccatctggagttcagcccacatgcattgaggcgtctggtgaccagtcgctatttgtggcatcactggaccaatctatgttggttgccgatgcttcttactcacaagaaatttctcatgcagaagagaacaactccactgcagttgaagcaacactgtcttccgaaagacacttggaaattgtggaggatgacaatcatttcaacgacgggttattgcagaactcaagcgcttaccaggctcaagtgcattcctatgttgataatgaagttgggatttccaatgttgatgcagaatcagcttcgatgaacttccagcatttaagcctgcagaatgaagatatagctgcaaccaagtctgctgaggataaccctgcggttatactccctgatcatctacaagctgcaaatgcagattgtgctcatttgagctttggtagttttgaatctggtgccttctctggcttgctttcatcaaaggtcccaaaaggcagtttggaggacgacgaggtgctcattccagatgaatcccgatcagttaatcgaatagatgttagattactatgatgacgatgctctaaattcttcagaaaatgtggatgttgagacaagaattggtaatatggataacattgatggaccttcagtttcagaatctgatgcactgaggcagggtgccatagatgtgcctggtcttcaatatgacctgccatcagtttcaagtcatgcatattcaaacacaacacagccaagtacaatggaagaaccacaaggaaacacacaagcacaacccctttcccatttttctggcttactgcaagcaaatactctacccaataacttgttggggtcaaatcttacccctcttcgggagtttgacttctcccagttccttcagacacagtcagctacaaaatataacccatctgttgcacctaataatctgccaccaatctccatgcaagagacttcaaaacagggaggcttccccaatactcagtctacgcaacatgttcccagtacaagcatttcgtcgggtcttcctctcccacaacaattgcctgtatactctcagccaactctgccccttgggccttttaccagcctggttggctatccatatttgcctcagaactattacctaccttcagcgccattccagcaagcgtactcaagtaatgggcctttccatcaatctgctgctcctgccgtgcctggagctggtatgaagtatccgatgccacaatacaagagcagccctcctgcttcgaccctaccacaaccatcatcactctctggttacggagggttcggaagtgcaaataatatccctggaaatttcagccaaaatcagggtgctcccgctgcacctacaactttgggatttgatgaagctttaggcacacaattcaaacaccccaatcattatgcagcactacagcagagtgataattcaacgatgtggcttcatggaggcgctggttcaagaacaatttctgcagttccgcctggtaacttctatggtttccagggccagagtcagcatggtggcttccgccaggcacatcagccatctcagtacggtggtcttgggtatccaagcttctaccagtcgcagaccagtctgccacaggagcacccccagaaccccactgagggaagcttgaacaatccccagggggtaccatcccagccttcacaccagctctggcagcacatctactaaaccttctgtgctctccttggagatgcctctctacgctgccagcttacctgcaagcgagcagactagctgagcccaacagcaatgaagtgtgttgtttttctttctttcttttttttctccagctgtgtgttctggaactaaattaggctgtcgtggtttttacttgatagtgagtggtgttgcagaggtgctatcttgtaacggtaaagtcctaactcatctaacagatctgcttttcataccctgtaatgtgccgttttgttcttgatgcctagaagcttctacgtgctgcagctacttttgatatgcatgcatgcttatgaagttgcagccctggtttgcagaatcgtacaggatgagaatgggtactgctagcctgctacaaatttcccatgggctttgtttgcttggagaagcattgaagaacccaacaatattgaagtcaccaatccggtggactcaactgcgatgttcacatgcaatgcaaatgttcatgcaaaccagtgtatcaatttataagcctgctatgttgttatcgaaccagttttaacaaaacagccgcagagtgtcaggcagttccatggaaattgagctgtaccgtatgcattggagttaaattcca

SEQ ID NO: 32410 - DNA, 2978 bp, Zea Mays
tcttggaatttggccgccgtctgcgttgcttgggtggggaaggagcaggcggccaggcgcagagccgcaaaagcagacgcgaaaaagcccaggcccgagccgaagcggggaggcgacaccgctgcacctgcactaccgctcgcacggtcagcgatttgccgcctcgcgggagccagctttggcgtcggcgtcggcgtcatcgtcggcggggagttcccggagagggattccggtgaggatgagcagcggcggcggtggagggggagccaggggaccgtcggggcccgtgccggcgtccgcgaggaagctcgtgcaggggctcaaggagatcgtgaaccgccccgacgcggagatctacgcagcgctgcgggagtgcaacatggacccggacgaggcggtcagccgcctcctctcccaagatacttttcaagaggtaaagagcaagcgtgataggaaaaaagaggttaaagaaactccagagccaagatctcgaggagcaagtaactccagtcgatccagtagaggtggtgtggaccgtgctggacgaggcaattcagttcagtctggatcgagtgattatatggcttcaaggtcatcaatattgggacctgctgtggcagctaccaatgccatgcagaagccaacagttcctagtttgtccacaaacaaagatgtggttcctaatggatcagttggagcacaacaatcatcatctggttttcagcacaattggtttggggtgccagaagagaacaactccactgcagttgaagcaacactgtcttccgaaagacacttggaaattgtggaggatgacaatcatttcaacgacgggttattgcagaactcaagcgcttaccaggctcaagtgcattcctatgttgataatgaagttgggatttccaatgttgatgcagaatcagcttcgatgaacttccagcatttaagcctgcagaatgaagatatagctgcaaccaagtctgctgaggataaccctgcggttatactccctgatcatctacaagctgcaaatgcagattgtgctcatttgagctttggtagttttgaatctggtgccttctctggcttgctttcatcaaaggtcccaaaaggcagtttggaggacgacgaggtgctcattccagatgaatcccgatcagttaatcgaatagatgttaggaatcaagattactatgatgacgatgctctaaattcttcagaaaatgtggatgttgagacaagaattggtaatatggataacattgatggaccttcagtttcagaatctgatgcactgaggcagggtgccatagatgtgcctggtcttcaatatgacctgccatcagtttcaagtcatgcatattcaaacacaacacagccaagtacaatggaagaaccacaaggaaacacacaagcacaacccctttcccatttttctggcttactgcaagcaaatactctacccaataacttgttggggtcaaatcttacccctcttcgggagtttgacttctcccagttccttcagacacagtcagctacaaaatataacccatctgttgcacctaataatctgccaccaatctccatgcaagagacttcaaaacagggaggcttccccaatactcagtctacgcaacatgttcccagtacaagcatttcgtcgggtcttcctctcccacaacaattgcctgtatactctcagccaactctgccccttgggccttttaccagcctggttggctatccatatttgcctcagaactattacctaccttcagcgccattccagcaagcgtactcaagtaatgggcctttccatcaatctgctgctcctgccgtgcctggagctggtatgaagtatccgatgccacaatacaagagcagccctcctgcttcgaccctaccacaaccatcatcactctctggttacggagggttcggaagtgcaaataatatccctggaaatttcagccaaaatcagggtgctcccgctgcacctacaactttgggatttgatgaagctttaggcacacaattcaaacaccccaatcattatgcagcactacagcagagtgataattcaacgatgtggcttcatggaggcgctggttcaagaacaatttctgcagttccgcctggtaacttctatggtttccagggccagagtcagcatggtggcttccgccaggcacatcagccatctcagtacggtggtcttgggtatccaagcttctaccagtcgcagaccagtctgccacaggagcacccccagaaccccactgagggaagcttgaacaatccccagggggtaccatcccagccttcacaccagctctggcagcacatctactaaaccttctgtgctctccttggagatgcctctctacgctgccagcttacctgcaagcgagcagactagctgagcccaacagcaatgaagtgtgttgtttttctttctttcttttttttctccagctgtgtgttctggaactaaattaggctgtcgtggtttttacttgatagtgagtggtgttgcagaggtgctatcttgtaacggtaaagtcctaactcatctaacagatctgcttttcataccctgtaatgtgccgttttgttcttgatgcctagaagcttctacgtgctgcagctacttttgatatgcatgcatgcttatgaagttgcagccctggtttgcagaatcgtacaggatgagaatgggtactgctagcctgctacaaatttcccatgggctttgtttgcttggagaagcattgaagaacccaacaatattgaagtcaccaatccggtggactcaactgcgatgttcacatgcaatgcaaatgttcatgcaaaccagtgtatcaatttataagcctgctatgttgttatcgaaccagttttaacaaaacagccgcagagtgtcaggcagttccatggaaattgagctgtaccgtatgcattggagttaaattcca

SEQ ID NO: 32411 - DNA, 830 bp, Zea Mays
aataaagccattcaaaccatgccctagatggataacatactgtgttatagaacacatatcatttcctttactgttcctttttaaaagaaatttcctttgctgttctgctcattaggttgaacgcaacattaggacgcttgcaatattaaagaaaccaaataaattacccataatgacaacacatatttgagattcagtcaggctatcatgcatgcagtatcctccaaccttggtctgtgaccaagctggtttccagtttttacacagccccaggaactggctctgtcgcttgttccaactgttgggcacctagagccacattgtcacttaatcgcatgggatttaaaccctaaccgaataacctcctaccccccaaaaaagttaagatcttgtactctgacccttatacttcagttacagacttctaagcttgtagccgacatgcacttttagtttctccttttcagtagtacttactgtaaaaaagaatttgttccacttctatgtgtcttctgcaaaaggcaacatgctcacttgagagttaaaacagagcaggaccattcatactccttgaggagacagctgtaaatatacataatctgaatatcataggtaagtagacaattgacaagtcgtctgttttttttttaaaaaaaactagcaggtatgtatatacaaaagctagtacaaaataaaaggagtgccgtgtttcagtgctactcagatccaaatgcaacataaatgattcctattataagtacattgcaagtatggtcactgttcagataaacttatggagtacggctttactttgttttcaggagtgaagg

SEQ ID NO: 32412 - DNA, 1498 bp, Zea Mays
agccaacagccacaacccacgcgccacgcgcccacgcccactggccaccgccccacccccacccgtgcccgtcccgtgctagcttagctctcggctctcgccatggacgctgcggagaggaggctggctcgcgtcgctgcccacctcgttccgtccttcccggtcccacacgccaccgggcctcccctcgcgccttctcccgcggcagcgtcctcgtcgtcgtcctcgccggcgggggacagctacaggcgcgtgcacggcgacgtgccgtcggagccaccggagtggcgcaccgccacagacgagtcagggaaggagttcgtcgacatcatctacgagaaggccgtcggagagggcatcgccaagatcaccattaaccggcctgacagaaggaacgccttccgtccgctgaccgtgaaggaactaatgcgcgcgttcaacgatgccagagatgatagttcgattggagtcatcattcttacagggaagggaaccaaggcgttctgcagcggcggtgaccaggcgttaagagattctgatggatatgtggacttcgatagctttggccgcctcaatgtcttagatctccaggtgcagattcgccgtcttccaaagcctgtcattgctatggttgctggttatgctgttggtggtggacatgttttgcacatggtgtgtgatataacaattgcagcagagaacgcgatatttgggcagacagggcccaaggttggaagctttgatgctggttatggatcttcgataatgtcccggttggtgagttatcatactatcaatctagtgaggttggacccaagagagcccgtgaaatgtggtttctgtcacggttctacacagctgacgaagctgacaaaatgggactcgtgaacaccgtagtaccgcttgctgaactggagcaggaaactgtcaaatggtgccgtcagatcttaagaaacagccccatggctattcgcgtgctgaaatctgcactcaacgcggcagatgatggccatgcaggccttcaggagcttggcgggaatgccacgctaatattctacggcacggaggaggcaaaggaagggaagaacgcgtacatggagagacgacgcccagatttctccaagttcccacgcaaaccttgagtttcagctctttgctgaactggccaattattttactgatccccccaccccacccaacttggatcattatgcttactctacattgaggagacggacgataatcattttcactccaatcaattttcatatatacacgataaatgtattttgcatgaaaattcagatcaatgaaaagtaaatcttgatgtatttgattcacctttgccttcactggccgggcaggagggagatccttaataattatatatgcgcttcaacattcgtgcttcttacgagtagcgcggagaaacttttcatggttttcttcctcattctaggcagaaagctggctttacttgagtttcgcttgctgattt

SEQ ID NO: 32413 - DNA, 1811 bp, Zea Mays
agccaacagccacaacccacgcgccacgcgcccacgcccactggccaccgccccacccccacccgtgcccgtcccgtgctagcttagctctcggctctcgccatggacgctgcggagaggaggctggctcgcgtcgctgcccacctcgttccgtccttcccggtcccacacgccaccgggcctcccctcgcgccttctcccgcggcagcgtcctcgtcgtcgtcctcgccggcgggggacagctacaggcgcgtgcacggcgacgtgccgtcggagccaccggagtggcgcaccgccacagacgagtcagggaaggagttcgtcgacatcatctacgagaaggccgtcggagagggcatcgccaagatcaccattaaccggcctgacagaaggaacgccttccgtccgctgaccgtgaaggaactaatgcgcgcgttcaacgatgccagagatgatagttcgattggagtcatcattcttacagggaagggaaccaaggcgttctgcagcggcggtgaccaggcgttaagagattctgatggatatgtggacttcgatagctttggccgcctcaatgtcttagatctccaggagcagattttccttgccgttggcacttctagtctgtgtaaaaaaactaaaaatgattaacctttaaggcattagtggttatctttgtactgagaacatcggacggaccattttttccttcaggtgcagattcgccgtcttccaaagcctgtcattgctatggttgctggttatgctgttggtggtggacatgttttgcacatggtgtgtgatataacaattgcagcagagaacgcgatatttgggcagacagggcccaaggttggaagctttgatgctggttatggatcttcgataatgtcccggttggtgagttatcatactatcaatctagtgaggtagtagaaaatgtcgcattattcctcacacactttgaaaagaaacaccttcaatactcaaaagtttttattcttaataacacattcttaaaagttgacttgtacgctattccatttcatattatcgacatgctcgtgatacataaacagcatgctgttgttgctccaattatatatttctcatggacaggttggacccaagagagcccgtgaaatgtggtttctgtcacggttctacacagctgacgaagctgacaaaatgggactcgtgaacaccgtagtaccgcttgctgaactggagcaggaaactgtcaaatggtgccgtcagatcttaagaaacagccccatggctattcgcgtgctgaaatctgcactcaacgcggcagatgatggccatgcaggccttcaggagcttggcgggaatgccacgctaatattctacggcacggaggaggcaaaggaagggaagaacgcgtacatggagagacgacgcccagatttctccaagttcccacgcaaaccttgagtttcagctctttgctgaactggccaattattttactgatccccccaccccacccaacttggatcattatgcttactctacattgaggagacggacgataatcattttcactccaatcaattttcatatatacacgataaatgtattttgcatgaaaattcagatcaatgaaaagtaaatcttgatgtatttgattcacctttgccttcactggccgggcaggagggagatccttaataattatatatgcgcttcaacattcgtgcttcttacgagtagcgcggagaaacttttcatggttttcttcctcattctaggcagaaagctggctttacttgagtttcgcttgctgattt

SEQ ID NO: 32414 - DNA, 623 bp, Zea Mays
gtcatttgtagagaaagatgaattgcagctagcttagtattgtgtttcttatatgtgccattttttcggggactatgtgagctactgaatgggtgaagggaaaaccaatggatgaagttttgacaatcaagaacacggagatcgcgaagcacttgtcccttccaccagtaaagctccattgcagcatgcttgccgaggatgcgattaaagctgctgtaaaagactacgaagccaagaagtcgaagatggggcagaagggtgaagacagcccttcagagaaggctgctgaagcatgaaaggttctgccgtgaagtatattgtgctgatacgtttctcagtccatgactatccgccgcatattgccaaagataaatgattctgtttgtgaggcgagggattgtgtgtaatgttcacgaagtgtggtagtgcggcatgtggctcaactgttttaaggatggtgacgactgatttcaaataaatttgctgtcatcgtagaattagaagaaagtactatgtggatttacaggagctgtttctggaatttgtgatatcatggtactttctttttgcaagaatgttactgttggtattggcattccggcagtataggttgacgattgacg

SEQ ID NO: 32415 - DNA, 602 bp, Zea Mays
gtccaaaaggggaggcccggtgcagtgttgatgttgagagttgtctcactgagtcatcagctactgaatgggtgaagggaaaaccaatggatgaagttttgacaatcaagaacacggagatcgcgaagcacttgtcccttccaccagtaaagctccattgcagcatgcttgccgaggatgcgattaaagctgctgtaaaagactacgaagccaagaagtcgaagatggggcagaagggtgaagacagcccttcagagaaggctgctgaagcatgaaaggttctgccgtgaagtatattgtgctgatacgtttctcagtccatgactatccgccgcatattgccaaagataaatgattctgtttgtgaggcgagggattgtgtgtaatgttcacgaagtgtggtagtgcggcatgtggctcaactgttttaaggatggtgacgactgatttcaaataaatttgctgtcatcgtagaattagaagaaagtactatgtggatttacaggagctgtttctggaatttgtgatatcatggtactttctttttgcaagaatgttactgttggtattggcattccggcagtataggttgacgattgacg

SEQ ID NO: 32416 - DNA, 2006 bp, Zea Mays
ctgagaggtaacgtgcgtccatgccctcacacgtcatctctctcaccgtgcactgtctctatcctctcccatccacctccctccgcacactccgccgcctcaccttctccccctctccctccccgccgccgcggtccccgccgccacgctgtggcccttcttcgacgccgtctgctccgacaccgccatcaccttcggctcgctcgtcgcgctccacgagtacctttgagaattcgtcggtctttactacgactgcaactttgaagtttggtattcatataatcaataggctcaacagtatgtcccttgtaaatgttcttgtttcttacaagtggtgatggtggtagtggtctggtctctatgtgagcattggtctagagtatcgtgaagctatgcggctcttctttcatgttcaagatgaagttcatgaagcttggatcgaatctggatacctttaatgatgatggcaatgaaatcagatgatcgatcgcttcttttaatttggcttttaccttgtttctttaatgttgcctttgaatccttgtgttgttcttagaatctgactgatttttatttatttcaattataaatggtatgatctgactaagaaattcctagacgcattctccctgattgctgttactgttgatggatactagatgattatataatatgtggtaaagttttcccaataagctcagttgtgcagatcgtttgtttcttcttcttagttagagtgaaattatttactttatgaataactagatccatataggatatagtgatgttatttaggatggagggattcttatcgctctttggtgcttctccctataatcagtgctgaataactagatccatagtgctgataaatttttggtgcttctccctataatcagtaatagcatactaaaagtacctttgaactagaaaccttatgatattatttttccacaataaattcttggtgctactccctgtatatcagaggttataatcactcctgagcacaacgaagaagggatttacacgatcagattctacattcagcgaagatgcaggctatctcctgctaatgttgctgccgaagaaatgaacttcttacttttatgtagaggcaacacttactaatatgatgctcgaatttgcaatgaatgatgtgtgtgtgtgctattttcggaccactggtatttaaaactgacaaccatgaaattttggtacacatgaatcccaagcaatttgtgtaacatatggctaaacaaaacattgatgcttgatttgtgatccagctgattttgatgtcaatttattatacatgtatatatctttgcaataacttcttatgtatatggttatattgcaaatactattgtctctttactgtctcctgatagggcgcccgaatgggtgcctcctcttctagttatcttagttctgagagttccctttgacccgggaacaggatctggatgtcgcctagaggggggtgaataggcgaataaaacttattactttaaaacttaaattcttactctactcgaagacttaatacgcagtggagtgagaagactcttcgagtaggttgcagcggaatcggagatcctgtctcaaaatgtcctgcacttcaaataaaacttataccacggataagtattgaagtgcagatataatatcgagtaagacagagagtcaggatacaatacagagcacacagacgcaaggatttatcccgaggttcggccaagcctgaaatgcttgccaagtcctcgttggagttagccacacctgggcttggagtctatttcaactccttcctccgtttgctcagatctgtcagtatgacagatagagcctttcagtattgagttgggttacaacaacaccgtggctgcttacaaacttcttggcagcacctcggtagagtaacgatacgctcaagaccttgctctagctcttagcagcacttctcctctctctaaaggcttatagctgtgctgatgttctcg

SEQ ID NO: 32417 - DNA, 2478 bp, Zea Mays
ctctatcctctcccatccacctccctccgcacactccgccgcctcaccttctccccctctccctccccgccgccgcggtccccgccgccacgctgtggcccttcttcgacgccgtctgctccgacaccgccatcaccttcggctcgctcgtcgcgctccacgagtacctttgagaattcgtcgtccaggtagtaccattgtatcattgcactggattaaatcgatgctattcagtcctatatccccgaaggagacgccttgaagttgatagccggacagttcatcaggtagacaagtcaaatcagtgctgcataatatacttgcctcttctgaagtaagcaaaatattttagtataagacaggataattatcgatcataaatacatatgcatgcttataatataatttcagttgatagtagcgattgtttgcaatagattttatcgaaaaacagaccattcagtagttatagattctctaatatgtcagccaaatgaactaagaattctgtccagatgaaaataaaagattaaagatgttctcaaagacaaataaaatatgttcgttgggtcattcactgaaaagttttctgctcccaaagccagctatggtgtgacaaaaaatatagcaagtaaatagactccactctgcagcgctataaaatcagaagacaagatgatacgacccaacatgtaatcttgtttgttgcaggtctttactacgactgcaactttgaagtttggtattcatataatcaataggctcaacagtatgtcccttgtaaatgttcttgtttcttacaagtggtgatggtggtagtggtctggtctctatgtgagcattggtctagagtatcgtgaagctatgcggctcttctttcatgttcaagatgaagttcatgaagcttggatcgaatctggatacctttaatgatgatggcaatgaaatcagatgatcgatcgcttcttttaatttggcttttaccttgtttctttaatgttgcctttgaatccttgtgttgttcttagaatctgactgatttttatttatttcaattataaatggtatgatctgactaagaaattcctagacgcattctccctgattgctgttactgttgatggatactagatgattatataatatgtggtaaagttttcccaataagctcagttgtgcagatcgtttgtttcttcttcttagttagagtgaaattatttactttatgaataactagatccatataggatatagtgatgttatttaggatggagggattcttatcgctctttggtgcttctccctataatcagtgctgaataactagatccatagtgctgataaatttttggtgcttctccctataatcagtaatagcatactaaaagtacctttgaactagaaaccttatgatattatttttccacaataaattcttggtgctactccctgtatatcagaggttataatcactcctgagcacaacgaagaagggatttacacgatcagattctacattcagcgaagatgcaggctatctcctgctaatgttgctgccgaagaaatgaacttcttacttttatgtagaggcaacacttactaatatgatgctcgaatttgcaatgaatgatgtgtgtgtgtgctattttcggaccactggtatttaaaactgacaaccatgaaattttggtacacatgaatcccaagcaatttgtgtaacatatggctaaacaaaacattgatgcttgatttgtgatccagctgattttgatgtcaatttattatacatgtatatatctttgcaataacttcttatgtatatggttatattgcaaatactattgtctctttactgtctcctgatagggcgcccgaatgggtgcctcctcttctagttatcttagttctgagagttccctttgacccgggaacaggatctggatgtcgcctagaggggggtgaataggcgaataaaacttattactttaaaacttaaattcttactctactcgaagacttaatacgcagtggagtgagaagactcttcgagtaggttgcagcggaatcggagatcctgtctcaaaatgtcctgcacttcaaataaaacttataccacggataagtattgaagtgcagatataatatcgagtaagacagagagtcaggatacaatacagagcacacagacgcaaggatttatcccgaggttcggccaagcctgaaatgcttgccaagtcctcgttggagttagccacacctgggcttggagtctatttcaactccttcctccgtttgctcagatctgtcagtatgacagatagagcctttcagtattgagttgggttacaacaacaccgtggctgcttacaaacttcttggcagcacctcggtagagtaacgatacgctcaagaccttgctctagctcttagcagcacttctcctctctctaaaggcttatagctgtgctgatgttctcg

SEQ ID NO: 32418 - DNA, 1947 bp, Zea Mays
atcctctcccatccacctccctccgcacactccgccgcctcaccttctccccctctccctccccgccgccgcggtccccgccgccacgctgtggcccttcttcgacgccgtctgctccgacaccgccatcaccttcggctcgctcgtcgcgctccacgagtacctttgagaattcgtcggatcagagtgcttctgctatgtcatcttcgacacttcctggtgtttgcaacaaacaaagtgcttctatgctgtgcagttcttgtttcttacaagtggtgatggtggtagtggtctggtctctatgtgagcattggtctagagtatcgtgaagctatgcggctcttctttcatgttcaagatgaagttcatgaagcttggatcgaatctggatacctttaatgatgatggcaatgaaatcagatgatcgatcgcttcttttaatttggcttttaccttgtttctttaatgttgcctttgaatccttgtgttgttcttagaatctgactgatttttatttatttcaattataaatggtatgatctgactaagaaattcctagacgcattctccctgattgctgttactgttgatggatactagatgattatataatatgtggtaaagttttcccaataagctcagttgtgcagatcgtttgtttcttcttcttagttagagtgaaattatttactttatgaataactagatccatataggatatagtgatgttatttaggatggagggattcttatcgctctttggtgcttctccctataatcagtgctgaataactagatccatagtgctgataaatttttggtgcttctccctataatcagtaatagcatactaaaagtacctttgaactagaaaccttatgatattatttttccacaataaattcttggtgctactccctgtatatcagaggttataatcactcctgagcacaacgaagaagggatttacacgatcagattctacattcagcgaagatgcaggctatctcctgctaatgttgctgccgaagaaatgaacttcttacttttatgtagaggcaacacttactaatatgatgctcgaatttgcaatgaatgatgtgtgtgtgtgctattttcggaccactggtatttaaaactgacaaccatgaaattttggtacacatgaatcccaagcaatttgtgtaacatatggctaaacaaaacattgatgcttgatttgtgatccagctgattttgatgtcaatttattatacatgtatatatctttgcaataacttcttatgtatatggttatattgcaaatactattgtctctttactgtctcctgatagggcgcccgaatgggtgcctcctcttctagttatcttagttctgagagttccctttgacccgggaacaggatctggatgtcgcctagaggggggtgaataggcgaataaaacttattactttaaaacttaaattcttactctactcgaagacttaatacgcagtggagtgagaagactcttcgagtaggttgcagcggaatcggagatcctgtctcaaaatgtcctgcacttcaaataaaacttataccacggataagtattgaagtgcagatataatatcgagtaagacagagagtcaggatacaatacagagcacacagacgcaaggatttatcccgaggttcggccaagcctgaaatgcttgccaagtcctcgttggagttagccacacctgggcttggagtctatttcaactccttcctccgtttgctcagatctgtcagtatgacagatagagcctttcagtattgagttgggttacaacaacaccgtggctgcttacaaacttcttggcagcacctcggtagagtaacgatacgctcaagaccttgctctagctcttagcagcacttctcctctctctaaaggcttatagctgtgctgatgttctcg

SEQ ID NO: 32419 - DNA, 2423 bp, Zea Mays
atcctctcccatccacctccctccgcacactccgccgcctcaccttctccccctctccctccccgccgccgcggtccccgccgccacgctgtggcccttcttcgacgccgtctgctccgacaccgccatcaccttcggctcgctcgtcgcgctccacgagtacctttgagaattcgtcgtcctatatccccgaaggagacgccttgaagttgatagccggacagttcatcaggtagacaagtcaaatcagtgctgcataatatacttgcctcttctgaagtaagcaaaatattttagtataagacaggataattatcgatcataaatacatatgcatgcttataatataatttcagttgatagtagcgattgtttgcaatagattttatcgaaaaacagaccattcagtagttatagattctctaatatgtcagccaaatgaactaagaattctgtccagatgaaaataaaagattaaagatgttctcaaagacaaataaaatatgttcgttgggtcattcactgaaaagttttctgctcccaaagccagctatggtgtgacaaaaaatatagcaagtaaatagactccactctgcagcgctataaaatcagaagacaagatgatacgacccaacatgtaatcttgtttgttgcaggtctttactacgactgcaactttgaagtttggtattcatataatcaataggctcaacagtatgtcccttgtaaatgttcttgtttcttacaagtggtgatggtggtagtggtctggtctctatgtgagcattggtctagagtatcgtgaagctatgcggctcttctttcatgttcaagatgaagttcatgaagcttggatcgaatctggatacctttaatgatgatggcaatgaaatcagatgatcgatcgcttcttttaatttggcttttaccttgtttctttaatgttgcctttgaatccttgtgttgttcttagaatctgactgatttttatttatttcaattataaatggtatgatctgactaagaaattcctagacgcattctccctgattgctgttactgttgatggatactagatgattatataatatgtggtaaagttttcccaataagctcagttgtgcagatcgtttgtttcttcttcttagttagagtgaaattatttactttatgaataactagatccatataggatatagtgatgttatttaggatggagggattcttatcgctctttggtgcttctccctataatcagtgctgaataactagatccatagtgctgataaatttttggtgcttctccctataatcagtaatagcatactaaaagtacctttgaactagaaaccttatgatattatttttccacaataaattcttggtgctactccctgtatatcagaggttataatcactcctgagcacaacgaagaagggatttacacgatcagattctacattcagcgaagatgcaggctatctcctgctaatgttgctgccgaagaaatgaacttcttacttttatgtagaggcaacacttactaatatgatgctcgaatttgcaatgaatgatgtgtgtgtgtgctattttcggaccactggtatttaaaactgacaaccatgaaattttggtacacatgaatcccaagcaatttgtgtaacatatggctaaacaaaacattgatgcttgatttgtgatccagctgattttgatgtcaatttattatacatgtatatatctttgcaataacttcttatgtatatggttatattgcaaatactattgtctctttactgtctcctgatagggcgcccgaatgggtgcctcctcttctagttatcttagttctgagagttccctttgacccgggaacaggatctggatgtcgcctagaggggggtgaataggcgaataaaacttattactttaaaacttaaattcttactctactcgaagacttaatacgcagtggagtgagaagactcttcgagtaggttgcagcggaatcggagatcctgtctcaaaatgtcctgcacttcaaataaaacttataccacggataagtattgaagtgcagatataatatcgagtaagacagagagtcaggatacaatacagagcacacagacgcaaggatttatcccgaggttcggccaagcctgaaatgcttgccaagtcctcgttggagttagccacacctgggcttggagtctatttcaactccttcctccgtttgctcagatctgtcagtatgacagatagagcctttcagtattgagttgggttacaacaacaccgtggctgcttacaaacttcttggcagcacctcggtagagtaacgatacgctcaagaccttgctctagctcttagcagcacttctcctctctctaaaggcttatagctgtgctgatgttctcg

SEQ ID NO: 32420 - DNA, 1515 bp, Zea Mays
atcctctcccatccacctccctccgcacactccgccgcctcaccttctccccctctccctccccgccgccgcggtccccgccgccacgctgtggcccttcttcgacgccgtctgctccgacaccgccatcaccttcggctcgctcgtcgcgctccacgagtacctttgagaattcgtcggtctttactacgactgcaactttgaagtttggtattcatataatcaataggctcaacagtatgtcccttgtaaatgttcttgtttcttacaagtggtgatggtggtagtggtctggtctctatgtgagcattggtctagagtatcgtgaagctatgcggctcttctttcatgttcaagatgaagttcatgaagcttggatcgaatctggatacctttaatgatgatggcaatgaaatcagatgatcgatcgcttcttttaatttggcttttaccttgtttctttaatgttgcctttgaatccttgtgttgttcttagaatctgactgatttttatttatttcaattataaatggtatgatctgactaagaaattcctagacgcattctccctgattgctgttactgttgatggatactagatgattatataatatgtggtaaagttttcccaataagctcagttgtgcagatcgtttgtttcttcttcttagttagagtgaaattatttactttatgaataactagatccatataggatatagtgatgttatttaggatggagggattcttatcgctctttggtgcttctccctataatcagtgctgaataactagatccatagtgctgataaatttttggtgcttctccctataatcagtaatagcatactaaaagtacctttgaactagaaaccttatgatattatttttccacaataaattcttggtgctactccctgtatatcagaggttataatcactcctgagcacaacgaagaagggatttacacgatcagattctacattcagggggtttgccgcaaaaatcgctcgtgcgcgccgctgcccagtccatgccgtcgtcggccaagaaggaaaggagcgcctccgccctgctcccaaacaagaaaccttcaagacggcggggacaagttcaggaaaaaattcctctacaagaaacaaacaactaggcaagagacgagcatccacacaagaattcctctgcagctcgggaaaccgatcggtcgcggcatcctgtgctgggtatataacggtagaaagggcagtctacagcagggtggaaagaggcagtgagagtgattgacgtcgtgtgcagtttttttttgtttttttgttctttcttttgttttgacctgtacacgtttacggattcctagatttttttaagcggatatggctttaggatttgcaggcctatccctgtaaaactcttcgttaagcccttcaaagagaattttttacatgagcattaccttgtagacttgtagttgtagagagtgaggtaaatgatccaaaggtgaagtttttactact

SEQ ID NO: 32421 - DNA, 443 bp, Zea Mays
ccagtcgaaggcggcggcggcggcggcggcagccggaggcgttcgtacctaccgtacaagcaagagctcgtcgggctgttcgccaacgtcagtgggctgcgccggagctaccacccgttctaaaacgcgatctgtccatgccttccgacctccgtcagtgggccaaaaagtaaaaaaagatgatatcttgctcgtttttctgtggataatactgcctatagtactgtgcactgtttttttacagtacggcggaagcagtagatctgcgtattttctctctaagttatcggcttggataaaatagggttttagttttaattaaaaaaatagcagaacctcagcaaggggaaaagaggtaacgtagcgtgtgtactgctgctagtctgctactcatttgttcacaacttcacatacttgacttcacttgagaaaaataacctgag

SEQ ID NO: 32422 - DNA, 1583 bp, Zea Mays
ccaaaaccttccatttccatggggttttgcacattgccccgcatgtgtccgtgtccgcgcctccgtttgcaacatgtggcggcgttcccggcccgccactgtgccggaaaacgacacattcccgtcaggcctcagcggcagcgcaggcgcagcgcagtccaccactccacattattactgccccgcccccctttactcgccagccctcctccggcctcccgctgctcgctcgccccctcgaaaaccagcggcgaattcgtggccgcatcggcatcggaatgaggacttgaccggcgggcgcgccggggttcgtcgcggcggcggcggcggcgcgatggaggcgagccggcgcgggcggttccaccgccacgatgggcccgccgcgcccgtcccggtggtggaccaggcggactgcacggcgcagacgtgccggtcctgcgtggcggtgacgctggcggacgccatcgcgctcggctgctgcccgtgcgcggtggtcagcctgctggggctggcgctcgtcaaggccccgctcgccctggcgcgccgctgcctgcggcggctgcgcggcgagctgcggcacaggaagcgggtgcgcgacatgcacggccccgccgacaaggccaagtgccgcagctccgacgccggcgccgcgtcgaggggcgcgtgggccttggaggcggccgcgcgggcgagggcgagcaactcgtcgtcgtcaggctcaggcaggctcgacgcggagaaggtgtggatggaggagatgtaccgggtggggcactgggggttcggccgcctgtccgtctccgtctccgtctccgtcacccctcccccgcccgtctggcccggacgcagccccgacggcgacggcggcggcggcgggagaaaggacgtggacctgcggtgcgagtcgtgacaggggaagccgcgcgaccgttcgtccttctgccggacagctccgtggcaatgccggaagttgtcctctgactttgcacggtgaaatgagagtgcatggtccgtgcatcggagctccgaggagaatctgcttgggggaagaagcgctaagctatgattggacccgggcgtggggattgctgcttgattcgccgccttggcggcaggtcgtcgtgtcgcgcagccccagcccagccagaacgattcatcagacttccagtgcacagcggcaaacccggagggccttctgcagttgcccttccaagtggccgtgtcgtagtcgtagcttccatttgtttttcctcctcttggttctggaaccccggccctgtatttttacaagctgtacatattcgagcggccgagttcttccatgctgctgtaatttttttgggcgatctctgactctctgtatatactcgcctttctttttatttcccggaaataatgtgcatccgtggctcgaatcgaatcggatcacttcccggaaatgctcttcatacgaaattattgccttcgtccttgtgtatttatgtgctgaaactggagcatggtgcagaacaggacacaaacaagtttcgtcgttcatgtatctgcgcgccttcgtcatcctcactctgctcggtcaatggcag

SEQ ID NO: 32423 - DNA, 1975 bp, Zea Mays
gcacgttctgccgcgcgcgcatccgcatcccgcaaccgccccagccgtgtatcccgcatacgcccgcagccgccatcaacgcccgcggacccctcagcctcctccttaccgccgcgatccgccagaccaccgccccccccccgcacccgccgcagatctcgccatggcggcgcgcacgccccccaggtcgcagccccgtcaccttcctcccccaccccgaactccgtccccgccgtagatctcgccatcggtaacacacctctcgttcgcatctgacgcgagcggttgggttctcccgcgcgagcggccggcgggtgcgacagaggggtcttgtgaaggccatcggcaacacacctctcattcgcatcaacagcctctccgacgttacaggatgcgaggttcgcgcgtggactcggcgtcatctccgcgtggtcctcgccccccccccccgagacacccgctcgcaatgttcgggagtccgcgcccgccgtcgagagttccagctaacaagggaaatcaaggaagaattgatctttatattagcaggcggatgcaatcactaatcaaaaccacgatgcaaggtaacctaaatggattttaaattttattttggattgttaaatctttatttctgactactattgttttatgtcgtggatgccctcgtgaggttctacgccgacgccttcaggagggattcacagaggccatggtgaggatggccagcttgagtcggctcaccgggagcagcgcgagatccgctacaactaaatgataggaggcgattcccatttctcagtgatgtcgatgtcctgtactcctgtatatttggattcaacaatatgccattagtatgctgtcaagcgtcctatttgcaagagataaatggcttacgcccgaggggcttattcttccttatcatggtcggtcgtgactttggttatccactgaaaagatatgcttggtggtgctttcttgtgttgaagaacaagtatcccacggaaccacaaccgtttgtattatctggtgatttcctacattattagctggcctaactaaaccatgcgctcagaccctaaaccagctgtaagtctgtaacttaaaagcacagtgcactagcggaatggggttccttgctttttggagcgtttccccagtcagatcggcggcagggcaggtcacgtggacggggctccttgttgctggaactaaataccgtggagagtttgaagtgagactaaagaaacttatggaggaaattaagcaaaatgaagacattattctctttattgattaagtgcacacactgattggagcaggtgcagcagaagtgcattggtgccacaacactggatgagtataggaagcatatagagaaagatcctgccttggaaagaaggtttcaaccagttaaggttccagagcctactatggatgaaacaatacagatcttaagaggacttcgtgagagatatgaacttcatcacaaactgagatacacagatgatgctttaattgctgctgcacagctgtcttatcagtatatcagcgatcgttttctgcctgacaaagccattgacttgattgatgaagctggatctcgtgttaggctgaggcatgcgcagctccctgatgaagccaaagagctggacaaagagctgcggcagataagcaagcagaaaaatgaggctgtacgtggccaagattttgagaaggtatactgttgtttggcacagcggtgacaaagccgatccgctcccacctctctagcaacgtcgatatggttaataccaagcattatgttgtttccttttgagataaatattttgttactgattttaccttttgtctcctcttcttgttttttgttctagaatctgtagcaaatggctaacgatgaggatatccattactttgtttatgacaataaaactgatatgttcaagattccgtagcaacgcacgggcatctaact

SEQ ID NO: 32424 - DNA, 2774 bp, Zea Mays
gttctgccgcgcgcgcatccgcatcccgcaaccgccccagccgtgtatcccgcatacgcccgcagccgccatcaacgcccgcggacccctcagcctcctccttaccgccgcgatccgccagaccaccgccccccccccgcacccgccgcagatctcgccatggcggcgcgcacgccccccaggtcgcagccccgtcaccttcctcccccaccccgaactccgtccccgccgtagatctcgccatcggtaacacacctctcgttcgcatctgacgcgagcggttgggttctcccgcgcgagcggccggcgggtgcgacagaggggtcttgtgaaggccatcggcaacacacctctcattcgcatcaacagcctctccgacgttacaggatgcgaggttcgcgcgtggactcggcgtcatctccgcgtggtcctcgccccccccccccgagacacccgctcgcaatgttcgggagtccgcgcccgccgtcgagaggagtgctgcatctgccttgcgtagtacggggagaaggaggaggttcggcagctgccgtgcacacacgtgtttcatctcaagtgcatatacaggtggctcaggatcatctcctcttgccctctctgcaagcaagagctcaagtgaactttatattcattacacacatgacattctcgcttattctttggatcaaggtgttagtatcctagacacaacagatattttccagctaacaagggaaatcaaggaagaattgatctttatattagcaggcggatgcaatcactaatcaaaaccacgatgcaaggtaacctaaatggattttaaattttattttggattgttaaatctttatttctgactactattgttttatgtcgtggatgccctcgtgaggttctacgccgacgccttcaggagggattcacagaggccatggtgaggatggccagcttgagtcggctcaccgggagcagcgcgagatccgctacaactaaatgataggaggtattttctagaaattacaaccccacctctgtcaggccttctgttgagtgaatttggtttgcacaccctcaccctgcacgctcttaccggactaccgctcctagcacccactcacacgagattgcaccccgctcgccatgccaccatagatccagctagggcgacatcattgtgggcaatcctgtgcgagagaatgtgaaattgttgtaggattgataatgaccaggggtttctccgcccacatgcaccaggtttcgctgccatttgcagcgactgtgttccagttcgaccgtttggggaaaaggcaaggaaacaggatctgtcacggaagtgtgttgttctgaaacagtcacaaagagggcctaagaagctgatggaatcctcattcaccgccgctaaggagtttgagcgggatcggagaggagacgtcagttcttcctcctctgctcaatgcggccattcgccctgtcccccaaccctgaactccacactgccactccgtgctcattttttctgaaggggaaatattcatctccttgttgttttgtaccatggatactttagcatcattctcatactactaggagtgtaggcgattcccatttctcagtgatgtcgatgtcctgtactcctgtatatttggattcaacaatatgccattagtatgctgtcaagcgtcctatttgcaagagataaatggcttacgcccgaggggcttattcttccttatcatggtcggtcgtgactttggttatccactgaaaagatatgcttggtggtgctttcttgtgttgaagaacaagtatcccacggaaccacaaccgtttgtattatctggtgatttcctacattattagctggcctaactaaaccatgcgctcagaccctaaaccagctgtaagtctgtaacttaaaagcacagtgcactagcggaatggggttccttgctttttggagcgtttccccagtcagatcggcggcagggcaggtcacgtggacggggctccttgttgctggaactaaataccgtggagagtttgaagtgagactaaagaaacttatggaggaaattaagcaaaatgaagacattattctctttattgattaagtgcacacactgattggagcagtgcattggtgccacaacactggatgagtataggaagcatatagagaaagatcctgccttggaaagaaggtttcaaccagttaaggttccagagcctactatggatgaaacaatacagatcttaagaggacttcgtgagagatatgaacttcatcacaaactgagatacacagatgatgctttaattgctgctgcacagctgtcttatcagtatatcagcgatcgttttctgcctgacaaagccattgacttgattgatgaagctggatctcgtgttaggctgaggcatgcgcagctccctgatgaagccaaagagctggacaaagagctgcggcagataagcaagcagaaaaatgaggctgtacgtggccaagattttgagaaggtatactgttgtttggcacagcggtgacaaagccgatccgctcccacctctctagcaacgtcgatatggttaataccaagcattatgttgtttccttttgagataaatattttgttactgattttaccttttgtctcctcttcttgttttttgttctagaatctgtagcaaatggctaacgatgaggatatccattactttgtttatgacaataaaactgatatgttcaagattccgtagcaacgcacgggcatctaact

SEQ ID NO: 32425 - DNA, 3213 bp, Zea Mays
ccgcgcgcgcatccgcatcccgcaaccgccccagccgtgtatcccgcatacgcccgcagccgccatcaacgcccgcggacccctcagcctcctccttaccgccgcgatccgccagaccaccgccccccccccgcacccgccgcagatctcgccatggcggcgcgcacgccccccaggtcgcagccccgtcaccttcctcccccaccccgaactccgtccccgccgtagatctcgccatcggtaacacacctctcgttcgcatctgacgcgagcggttgggttctcccgcgcgagcggccggcgggtgcgacagaggggtcttgtgaaggccatcggcaacacacctctcattcgcatcaacagcctctccgacgttacaggatgcgaggttcgcgcgtggactcggcgtcatctccgcgtggtcctcgccccccccccccgagacacccgctcgcaatgttcgggagtccgcgcccgccgtcgagaggagtgctgcatctgccttgcgtagtacggggagaaggaggaggttcggcagctgccgtgcacacacgtgtttcatctcaagtgcatatacagttccagctaacaagggaaatcaaggaagaattgatctttatattagcaggcggatgcaatcactaatcaaaaccacgatgcaaggtaacctaaatggattttaaattttattttggattgttaaatctttatttctgactactattgttttatgtcgtggatgccctcgtgaggttctacgccgacgccttcaggagggattcacagaggccatggtgaggatggccagcttgagtcggctcaccgggagcagcgcgagatccgctacaactaaatgataggaggtattttctagaaattacaaccccacctctgtcaggccttctgttgagtgaatttggtttgcacaccctcaccctgcacgctcttaccggactaccgctcctagcacccactcacacgagattgcaccccgctcgccatgccaccatagatccagctagggcgacatcattgtgggcaatcctgtgcgagagaatgtgaaattgttgtaggattgataatgaccaggggtttctccgcccacatgcaccaggtttcgctgccatttgcagcgactgtgttccagttcgaccgtttggggaaaaggtgagtcctcccatttcatgtagatgcatgggttgataaacatttgggagaaatgtcccctctttaattcgaaaaatagttgtgtatttgttcgacttatctgcggcgatgtacctttgtacgcgtacaaacatctatagacaaaaacaaaatgacacttcatggatgtagcaagagcgggctacgagaaactagcagatcatgcctaaaattcaattagcattagggtcagacaaaatactacattttctggattacaataatgtataggtgcatgaaaaaaacttgattccaatgtgtgacaaagtgtgaagatgaaagtgcactttcacgctgtcataacgcggatttgttttccttgctcatggaatgtgcatttgtgtgtttgcgtctactgtgcggctacaggcaaggaaacaggatctgtcacggaaggtatgtacacattacagtaaacgttgttcgtagaacatgcactttgtggagtggtctttgaatgagatgcgtttagaattaccttttcatgcagatctcttgttcagaacctggttgcttagtccattcttgttttgggttgctactacaaaaaagcggcaatgctttatatgaatcgcctcttactaatatccagggtcaaatggtggtccttcagtgaccagactaatatttgagcattaatcttatttgtttcacagtcatttcttgtttatcaatatgaatgctatttttttgcgagtggacttgttaactaataagctcatagatatttgaacaaaaaatagtgttttgttctaaaactgtcataaagagtgcatacatcatagctatggtttcaactgtgatttgatgtcctataatattgagtgtcctatagtgtgttgttctgaaacagtcacaaagagggcctaagaagctgatggaatcctcattcaccgccgctaaggagtttgagcgggatcggagaggagacgtcagttcttcctcctctgctcaatgcggccattcgccctgtcccccaaccctgaactccacactgccactccgtgctcattttttctgaaggggaaatattcatctccttgttgttttgtaccatggatactttagcatcattctcatactactaggagtgtaggtaaggagtccacacacgagtttgcaaacaccattaagcctattttgcttgattagtgccctgcaacacttcatatgttcaagacaaaatccatacccatgtctattgttgtatgatattatttgcattgaccgttgctgctcttcttgattgcagtcactaacattgcattaatctatgtgatacatttattcaggcgattcccatttctcagtgatgtcgatgtcctgtactcctgtatatttggattcaacaatatgccattagtgcattggtgccacaacactggatgagtataggaagcatatagagaaagatcctgccttggaaagaaggtttcaaccagttaaggttccagagcctactatggatgaaacaatacagatcttaagaggacttcgtgagagatatgaacttcatcacaaactgagatacacagatgatgctttaattgctgctgcacagctgtcttatcagtatatcagcgatcgttttctgcctgacaaagccattgacttgattgatgaagctggatctcgtgttaggctgaggcatgcgcagctccctgatgaagccaaagagctggacaaagagctgcggcagataagcaagcagaaaaatgaggctgtacgtggccaagattttgagaaggtatactgttgtttggcacagcggtgacaaagccgatccgctcccacctctctagcaacgtcgatatggttaataccaagcattatgttgtttccttttgagataaatattttgttactgattttaccttttgtctcctcttcttgttttttgttctagaatctgtagcaaatggctaacgatgaggatatccattactttgtttatgacaataaaactgatatgttcaagattccgtagcaacgcacgggcatctaact

SEQ ID NO: 32426 - DNA, 3179 bp, Zea Mays
gcgcatccgcatcccgcaaccgccccagccgtgtatcccgcatacgcccgcagccgccatcaacgcccgcggacccctcagcctcctccttaccgccgcgatccgccagaccaccgccccccccccgcacccgccgcagatctcgccatggcggcgcgcacgccccccaggtcgcagccccgtcaccttcctcccccaccccgaactccgtccccgccgtagatctcgccatcggtaacacacctctcgttcgcatctgacgcgagcggttgggttctcccgcgcgagcggccggcgggtgcgacagaggggtcttgtgaaggccatcggcaacacacctctcattcgcatcaacagcctctccgacgttacaggatgcgaggttcgcgcgtggactcggcgtcatctccgcgtggtcctcgccccccccccccgagacacccgctcgcaatgttcgggagtccgcgcccgccgtcgagaggagtgctgcatctgccttgcgtagtacggggagaaggaggaggttcggcagctgccgtgcacacacgtgtttcatctcaagtgcatatacaggtgttagtatcctagacacaacagatattttccagctaacaagggaaatcaaggaagaattgatctttatattagcaggcggatgcaatcactaatcaaaaccacgatgcaaggttctacgccgacgccttcaggagggattcacagaggccatggtgaggatggccagcttgagtcggctcaccgggagcagcgcgagatccgctacaactaaatgataggaggtttcgctgccatttgcagcgactgtgttccagttcgaccgtttggggaaaaggtgagtcctcccatttcatgtagatgcatgggttgataaacatttgggagaaatgtcccctctttaattcgaaaaatagttgtgtatttgttcgacttatctgcggcgatgtacctttgtacgcgtacaaacatctatagacaaaaacaaaatgacacttcatggatgtagcaagagcgggctacgagaaactagcagatcatgcctaaaattcaattagcattagggtcagacaaaatactacattttctggattacaataatgtataggtgcatgaaaaaaacttgattccaatgtgtgacaaagtgtgaagatgaaagtgcactttcacgctgtcataacgcggatttgttttccttgctcatggaatgtgcatttgtgtgtttgcgtctactgtgcggctacaggcaaggaaacaggatctgtcacggaaggtatgtacacattacagtaaacgttgttcgtagaacatgcactttgtggagtggtctttgaatgagatgcgtttagaattaccttttcatgcagatctcttgttcagaacctggttgcttagtccattcttgttttgggttgctactacaaaaaagcggcaatgctttatatgaatcgcctcttactaatatccagggtcaaatggtggtccttcagtgaccagactaatatttgagcattaatcttatttgtttcacagtcatttcttgtttatcaatatgaatgctatttttttgcgagtggacttgttaactaataagctcatagatatttgaacaaaaaatagtgttttgttctaaaactgtcataaagagtgcatacatcatagctatggtttcaactgtgatttgatgtcctataatattgagtgtcctatagtgtgttgttctgaaacagtcacaaagagggcctaagaagctgatggaatcctcattcaccgccgctaaggagtttgagcgggatcggagaggagacgtcagttcttcctcctctgctcaatgcggccattcgccctgtcccccaaccctgaactccacactgccactccgtgctcattttttctgaaggggaaatattcatctccttgttgttttgtaccatggatactttagcatcattctcatactactaggagtgtaggcgattcccatttctcagtgatgtcgatgtcctgtactcctgtatatttggattcaacaatatgccattagtatgctgtcaagcgtcctatttgcaagagataaatggcttacgcccgaggggcttattcttccttatcatggtcggtcgtgactttggttatccactgaaaagatatgcttggtggtgctttcttgtgttgaagaacaagtatcccacggaaccacaaccgtttgtattatctggtgatttcctacattattagctggcctaactaaaccatgcgctcagaccctaaaccagctgtaagtctgtaacttaaaagcacagtgcactagcggaatggggttccttgctttttggagcgtttccccagtcagatcggcggcagggcaggtcacgtggacggggctccttgttgctggaactaaataccgtggagagtttgaagtgagactaaagaaacttatggaggaaattaagcaaaatgaagacattattctctttattgattaagtgcacacactgattggagcaggtgcagcagaagtgcattggtgccacaacactggatgagtataggaagcatatagagaaagatcctgccttggaaagaaggtttcaaccagttaaggttccagagcctactatggatgaaacaatacagatcttaagaggacttcgtgagagatatgaacttcatcacaaactgagatacacagatgatgctttaattgctgctgcacagctgtcttatcagtatatcagcgatcgttttctgcctgacaaagccattgacttgattgatgaagctggatctcgtgttaggctgaggcatgcgcagctccctgatgaagccaaagagctggacaaagagctgcggcagataagcaagcagaaaaatgaggctgtacgtggccaagattttgagaaggtatactgttgtttggcacagcggtgacaaagccgatccgctcccacctctctagcaacgtcgatatggttaataccaagcattatgttgtttccttttgagataaatattttgttactgattttaccttttgtctcctcttcttgttttttgttctagaatctgtagcaaatggctaacgatgaggatatccattactttgtttatgacaataaaactgatatgttcaagattccgtagcaacgcacgggcatctaact

SEQ ID NO: 32427 - DNA, 3138 bp, Zea Mays
cgccccagccgtgtatcccgcatacgcccgcagccgccatcaacgcccgcggacccctcagcctcctccttaccgccgcgatccgccagaccaccgccccccccccgcacccgccgcagatctcgccatggcggcgcgcacgccccccaggtcgcagccccgtcaccttcctcccccaccccgaactccgtccccgccgtagatctcgccatcggtaacacacctctcgttcgcatctgacgcgagcggttgggttctcccgcgcgagcggccggcgggtgcgacagaggggtcttgtgaaggccatcggcaacacacctctcattcgcatcaacagcctctccgacgttacaggatgcgaggttcgcgcgtggactcggcgtcatctccgcgtggtcctcgccccccccccccgagacacccgctcgcaatgttcgggagtccgcgcccgccgtcgagaggagtgctgcatctgccttgcgtagtacggggagaaggaggaggttcggcagctgccgtgcacacacgtgtttcatctcaagtgcatatacaggtggctcaggatcatctcctcttgccctctctgcaagcaagagctcaagtgaactttatattcattacacacatgacattctcgcttattctttggatcaaggtgttagtatcctagacacaacagatattttccagctaacaagggaaatcaaggaagaattgatctttatattagcaggcggatgcaatcactaatcaaaaccacgatgcaaggtaacctaaatggattttaaattttattttggattgttaaatctttatttctgactactattgttttatgtcgtggatgccctcgtgaggttctacgccgacgccttcaggagggattcacagaggccatggtgaggatggccagcttgagtcggctcaccgggagcagcgcgagatccgctacaactaaatgataggaggtttcgctgccatttgcagcgactgtgttccagttcgaccgtttggggaaaaggcaaggaaacaggatctgtcacggaaggtatgtacacattacagtaaacgttgttcgtagaacatgcactttgtggagtggtctttgaatgagatgcgtttagaattaccttttcatgcagatctcttgttcagaacctggttgcttagtccattcttgttttgggttgctactacaaaaaagcggcaatgctttatatgaatcgcctcttactaatatccagggtcaaatggtggtccttcagtgaccagactaatatttgagcattaatcttatttgtttcacagtcatttcttgtttatcaatatgaatgctatttttttgcgagtggacttgttaactaataagctcatagatatttgaacaaaaaatagtgttttgttctaaaactgtcataaagagtgcatacatcatagctatggtttcaactgtgatttgatgtcctataatattgagtgtcctatagtgtgttgttctgaaacagtcacaaagagggcctaagaagctgatggaatcctcattcaccgccgctaaggagtttgagcgggatcggagaggagacgtcagttcttcctcctctgctcaatgcggccattcgccctgtcccccaaccctgaactccacactgccactccgtgctcattttttctgaaggggaaatattcatctccttgttgttttgtaccatggatactttagcatcattctcatactactaggagtgtaggtaaggagtccacacacgagtttgcaaacaccattaagcctattttgcttgattagtgccctgcaacacttcatatgttcaagacaaaatccatacccatgtctattgttgtatgatattatttgcattgaccgttgctgctcttcttgattgcagtcactaacattgcattaatctatgtgatacatttattcaggcgattcccatttctcagtgatgtcgatgtcctgtactcctgtatatttggattcaacaatatgccattagtatgctgtcaagcgtcctatttgcaagagataaatggcttacgcccgaggggcttattcttccttatcatggtcggtcgtgactttggttatccactgaaaagatatgcttggtggtgctttcttgtgttgaagaacaagtatcccacggaaccacaaccgtttgtattatctggtgatttcctacattattagctggcctaactaaaccatgcgctcagaccctaaaccagctgtaagtctgtaacttaaaagcacagtgcactagcggaatggggttccttgctttttggagcgtttccccagtcagatcggcggcagggcaggtcacgtggacggggctccttgttgctggaactaaataccgtggagagtttgaagtgagactaaagaaacttatggaggaaattaagcaaaatgaagacattattctctttattgattaagtgcacacactgattggagcaggtgcagcagaagtgcattggtgccacaacactggatgagtataggaagcatatagagaaagatcctgccttggaaagaaggtttcaaccagttaaggttccagagcctactatggatgaaacaatacagatcttaagaggacttcgtgagagatatgaacttcatcacaaactgagatacacagatgatgctttaattgctgctgcacagctgtcttatcagtatatcagcgatcgttttctgcctgacaaagccattgacttgattgatgaagctggatctcgtgttaggctgaggcatgcgcagctccctgatgaagccaaagagctggacaaagagctgcggcagataagcaagcagaaaaatgaggctgtacgtggccaagattttgagaaggtatactgttgtttggcacagcggtgacaaagccgatccgctcccacctctctagcaacgtcgatatggttaataccaagcattatgttgtttccttttgagataaatattttgttactgattttaccttttgtctcctcttcttgttttttgttctagaatctgtagcaaatggctaacgatgaggatatccattactttgtttatgacaataaaactgatatgttcaagattccgtagcaacgcacgggcatctaact

SEQ ID NO: 32428 - DNA, 3429 bp, Zea Mays
cccgcatacgcccgcagccgccatcaacgcccgcggacccctcagcctcctccttaccgccgcgatccgccagaccaccgccccccccccgcacccgccgcagatctcgccatggcggcgcgcacgccccccaggtcgcagccccgtcaccttcctcccccaccccgaactccgtccccgccgtagatctcgccatcggtaacacacctctcgttcgcatctgacgcgagcggttgggttctcccgcgcgagcggccggcgggtgcgacagaggggtcttgtgaaggccatcggcaacacacctctcattcgcatcaacagcctctccgacgttacaggatgcgaggttcgcgcgtggactcggcgtcatctccgcgtggtcctcgccccccccccccgagacacccgctcgcaatgttcgggagtccgcgcccgccgtcgagaggagtgctgcatctgccttgcgtagtacggggagaaggaggaggttcggcagctgccgtgcacacacgtgtttcatctcaagtgcatatacaggtggctcaggatcatctcctcttgccctctctgcaagcaagagctcaagtgaactttatattcattacacacatgacattctcgcttattctttggatcaaggtgttagtatcctagacacaacagatattttccagctaacaagggaaatcaaggaagaattgatctttatattagcaggcggatgcaatcactaatcaaaaccacgatgcaaggttctacgccgacgccttcaggagggattcacagaggccatggtgaggatggccagcttgagtcggctcaccgggagcagcgcgagatccgctacaactaaatgataggaggtttcgctgccatttgcagcgactgtgttccagttcgaccgtttggggaaaaggtgagtcctcccatttcatgtagatgcatgggttgataaacatttgggagaaatgtcccctctttaattcgaaaaatagttgtgtatttgttcgacttatctgcggcgatgtacctttgtacgcgtacaaacatctatagacaaaaacaaaatgacacttcatggatgtagcaagagcgggctacgagaaactagcagatcatgcctaaaattcaattagcattagggtcagacaaaatactacattttctggattacaataatgtataggtgcatgaaaaaaacttgattccaatgtgtgacaaagtgtgaagatgaaagtgcactttcacgctgtcataacgcggatttgttttccttgctcatggaatgtgcatttgtgtgtttgcgtctactgtgcggctacaggcaaggaaacaggatctgtcacggaaggtatgtacacattacagtaaacgttgttcgtagaacatgcactttgtggagtggtctttgaatgagatgcgtttagaattaccttttcatgcagatctcttgttcagaacctggttgcttagtccattcttgttttgggttgctactacaaaaaagcggcaatgctttatatgaatcgcctcttactaatatccagggtcaaatggtggtccttcagtgaccagactaatatttgagcattaatcttatttgtttcacagtcatttcttgtttatcaatatgaatgctatttttttgcgagtggacttgttaactaataagctcatagatatttgaacaaaaaatagtgttttgttctaaaactgtcataaagagtgcatacatcatagctatggtttcaactgtgatttgatgtcctataatattgagtgtcctatagtgtgttgttctgaaacagtcacaaagagggcctaagaagctgatggaatcctcattcaccgccgctaaggagtttgagcgggatcggagaggagacgtcagttcttcctcctctgctcaatgcggccattcgccctgtcccccaaccctgaactccacactgccactccgtgctcattttttctgaaggggaaatattcatctccttgttgttttgtaccatggatactttagcatcattctcatactactaggagtgtaggtaaggagtccacacacgagtttgcaaacaccattaagcctattttgcttgattagtgccctgcaacacttcatatgttcaagacaaaatccatacccatgtctattgttgtatgatattatttgcattgaccgttgctgctcttcttgattgcagtcactaacattgcattaatctatgtgatacatttattcaggcgattcccatttctcagtgatgtcgatgtcctgtactcctgtatatttggattcaacaatatgccattagtatgctgtcaagcgtcctatttgcaagagataaatggcttacgcccgaggggcttattcttccttatcatggtcggtcgtgactttggttatccactgaaaagatatgcttggtggtgctttcttgtgttgaagaacaagtatcccacggaaccacaaccgtttgtattatctggtgatttcctacattattagctggcctaactaaaccatgcgctcagaccctaaaccagctgtaagtctgtaacttaaaagcacagtgcactagcggaatggggttccttgctttttggagcgtttccccagtcagatcggcggcagggcaggtcacgtggacggggctccttgttgctggaactaaataccgtggagagtttgaagtgagactaaagaaacttatggaggaaattaagcaaaatgaagacattattctctttattgattaagtgcacacactgattggagcagtgcattggtgccacaacactggatgagtataggaagcatatagagaaagatcctgccttggaaagaaggtttcaaccagttaaggttccagagcctactatggatgaaacaatacagatcttaagaggacttcgtgagagatatgaacttcatcacaaactgagatacacagatgatgctttaattgctgctgcacagctgtcttatcagtatatcagcgatcgttttctgcctgacaaagccattgacttgattgatgaagctggatctcgtgttaggctgaggcatgcgcagctccctgatgaagccaaagagctggacaaagagctgcggcagataagcaagcagaaaaatgaggctgtacgtggccaagattttgagaaggtatactgttgtttggcacagcggtgacaaagccgatccgctcccacctctctagcaacgtcgatatggttaataccaagcattatgttgtttccttttgagataaatattttgttactgattttaccttttgtctcctcttcttgttttttgttctagaatctgtagcaaatggctaacgatgaggatatccattactttgtttatgacaataaaactgatatgttcaagattccgtagcaacgcacgggcatctaact

SEQ ID NO: 32429 - DNA, 1975 bp, Zea Mays
cccgcatacgcccgcagccgccatcaacgcccgcggacccctcagcctcctccttaccgccgcgatccgccagaccaccgccccccccccgcacccgccgcagatctcgccatggcggcgcgcacgccccccaggtcgcagccccgtcaccttcctcccccaccccgaactccgtccccgccgtagatctcgccatcggtaacacacctctcgttcgcatctgacgcgagcggttgggttctcccgcgcgagcggccggcgggtgcgacagaggggtcttgtgaaggccatcggcaacacacctctcattcgcatcaacagcctctccgacgttacaggatgcgaggttcgcgcgtggactcggcgtcatctccgcgtggtcctcgccccccccccccgagacacccgctcgcaatgttcgggagtccgcgcccgccgtcgagaggagtgctgcatctgccttgcgtagtacggggagaaggaggaggttcggcagctgccgtgcacacacgtgtttcatctcaagtgcatatacaggtggctcaggatcatctcctcttgccctctctgcaagcaagagctcaagtgaactttatattcattacacacatgacattctcgcttattctttggatcaaggtgttagtatcctagacacaacagatattttccagctaacaagggaaatcaaggaagaattgatctttatattagcaggcggatgcaatcactaatcaaaaccacgatgcaaggtaacctaaatggattttaaattttattttggattgttaaatctttatttctgactactattgttttatgtcgtggatgccctcgtgaggttctacgccgacgccttcaggagggattcacagaggccatggtgaggatggccagcttgagtcggctcaccgggagcagcgcgagatccgctacaactaaatgataggaggcgattcccatttctcagtgatgtcgatgtcctgtactcctgtatatttggattcaacaatatgccattagtatgctgtcaagcgtcctatttgcaagagataaatggcttacgcccgaggggcttattcttccttatcatggtcggtcgtgactttggttatccactgaaaagatatgcttggtggtgctttcttgtgttgaagaacaagtatcccacggaaccacaaccgtttgtattatctggtgatttcctacattattagctggcctaactaaaccatgcgctcagaccctaaaccagctgtaagtctgtaacttaaaagcacagtgcactagcggaatggggttccttgctttttggagcgtttccccagtcagatcggcggcagggcaggtcacgtggacggggctccttgttgctggaactaaataccgtggagagtttgaagtgagactaaagaaacttatggaggaaattaagcaaaatgaagacattattctctttattgattaagtgcacacactgattggagcagtgcattggtgccacaacactggatgagtataggaagcatatagagaaagatcctgccttggaaagaaggtttcaaccagttaaggttccagagcctactatggatgaaacaatacagatcttaagaggacttcgtgagagatatgaacttcatcacaaactgagatacacagatgatgctttaattgctgctgcacagctgtcttatcagtatatcagcgatcgttttctgcctgacaaagccattgacttgattgatgaagctggatctcgtgttaggctgaggcatgcgcagctccctgatgaagccaaagagctggacaaagagctgcggcagataagcaagcagaaaaatgaggctgtacgtggccaagattttgagaagaatctgtagcaaatggctaacgatgaggatatccattactttgtttatgacaataaaactgatatgttcaagattccgtagcaacgcacgggcatctaact

SEQ ID NO: 32430 - DNA, 1816 bp, Zea Mays
cgcatacgcccgcagccgccatcaacgcccgcggacccctcagcctcctccttaccgccgcgatccgccagaccaccgccccccccccgcacccgccgcagatctcgccatggcggcgcgcacgccccccaggtcgcagccccgtcaccttcctcccccaccccgaactccgtccccgccgtagatctcgccatcggtaacacacctctcgttcgcatctgacgcgagcggttgggttctcccgcgcgagcggccggcgggtgcgacagaggggtcttgtgaaggccatcggcaacacacctctcattcgcatcaacagcctctccgacgttacaggatgcgaggttcgcgcgtggactcggcgtcatctccgcgtggtcctcgccccccccccccgagacacccgctcgcaatgttcgggagtccgcgcccgccgtcgagaggagtgctgcatctgccttgcgtagtacggggagaaggaggaggttcggcagctgccgtgcacacacgtgtttcatctcaagtgcatatacaggtggctcaggatcatctcctcttgccctctctgcaagcaagagctcaagtgaactttatattcattacacacatgacattctcgcttattctttggatcaaggtgttagtatcctagacacaacagatattttccagctaacaagggaaatcaaggaagaattgatctttatattagcaggcggatgcaatcactaatcaaaaccacgatgcaaggtaacctaaatggattttaaattttattttggattgttaaatctttatttctgactactattgttttatgtcgtggatgccctcgtgaggttctacgccgacgccttcaggagggattcacagaggccatggtgaggatggccagcttgagtcggctcaccgggagcagcgcgagatccgctacaactaaatgataggaggtttcgctgccatttgcagcgactgtgttccagttcgaccgtttggggaaaaggcaaggaaacaggatctgtcacggaaggcgattcccatttctcagtgatgtcgatgtcctgtactcctgtatatttggattcaacaatatgccattagtatgctgtcaagcgtcctatttgcaagagataaatggcttacgcccgaggggcttattcttccttatcatgtgcattggtgccacaacactggatgagtataggaagcatatagagaaagatcctgccttggaaagaaggtttcaaccagttaaggttccagagcctactatggatgaaacaatacagatcttaagaggacttcgtgagagatatgaacttcatcacaaactgagatacacagatgatgctttaattgctgctgcacagctgtcttatcagtatatcagcgatcgttttctgcctgacaaagccattgacttgattgatgaagctggatctcgtgttaggctgaggcatgcgcagctccctgatgaagccaaagagctggacaaagagctgcggcagataagcaagcagaaaaatgaggctgtacgtggccaagattttgagaaggtatactgttgtttggcacagcggtgacaaagccgatccgctcccacctctctagcaacgtcgatatggttaataccaagcattatgttgtttccttttgagataaatattttgttactgattttaccttttgtctcctcttcttgttttttgttctagaatctgtagcaaatggctaacgatgaggatatccattactttgtttatgacaataaaactgatatgttcaagattccgtagcaacgcacgggcatctaact

SEQ ID NO: 32431 - DNA, 4047 bp, Zea Mays
cgcatacgcccgcagccgccatcaacgcccgcggacccctcagcctcctccttaccgccgcgatccgccagaccaccgccccccccccgcacccgccgcagatctcgccatggcggcgcgcacgccccccaggtcgcagccccgtcaccttcctcccccaccccgaactccgtccccgccgtagatctcgccatcggtaacacacctctcgttcgcatctgacgcgagcggttgggttctcccgcgcgagcggccggcgggtgcgacagaggggtcttgtgaaggccatcggcaacacacctctcattcgcatcaacagcctctccgacgttacaggatgcgaggttcgcgcgtggactcggcgtcatctccgcgtggtcctcgccccccccccccgagacacccgctcgcaatgttcgggagtccgcgcccgccgtcgagaggagtgctgcatctgccttgcgtagtacggggagaaggaggaggttcggcagctgccgtgcacacacgtgtttcatctcaagtgcatatacaggtggctcaggatcatctcctcttgccctctctgcaagcaagagctcaagtgaactttatattcattacacacatgacattctcgcttattctttggatcaaggtgttagtatcctagacacaacagatattttccagctaacaagggaaatcaaggaagaattgatctttatattagcaggcggatgcaatcactaatcaaaaccacgatgcaaggtaacctaaatggattttaaattttattttggattgttaaatctttatttctgactactattgttttatgtcgtggatgccctcgtgaggttctacgccgacgccttcaggagggattcacagaggccatggtgaggatggccagcttgagtcggctcaccgggagcagcgcgagatccgctacaactaaatgataggaggtattttctagaaattacaaccccacctctgtcaggccttctgttgagtgaatttggtttgcacaccctcaccctgcacgctcttaccggactaccgctcctagcacccactcacacgagattgcaccccgctcgccatgccaccatagatccagctagggcgacatcattgtgggcaatcctgtgcgagagaatgtgaaattgttgtaggattgataatgaccaggggtttctccgcccacatgcaccaggtttcgctgccatttgcagcgactgtgttccagttcgaccgtttggggaaaaggtgagtcctcccatttcatgtagatgcatgggttgataaacatttgggagaaatgtcccctctttaattcgaaaaatagttgtgtatttgttcgacttatctgcggcgatgtacctttgtacgcgtacaaacatctatagacaaaaacaaaatgacacttcatggatgtagcaagagcgggctacgagaaactagcagatcatgcctaaaattcaattagcattagggtcagacaaaatactacattttctggattacaataatgtataggtgcatgaaaaaaacttgattccaatgtgtgacaaagtgtgaagatgaaagtgcactttcacgctgtcataacgcggatttgttttccttgctcatggaatgtgcatttgtgtgtttgcgtctactgtgcggctacaggcaaggaaacaggatctgtcacggaaggtatgtacacattacagtaaacgttgttcgtagaacatgcactttgtggagtggtctttgaatgagatgcgtttagaattaccttttcatgcagatctcttgttcagaacctggttgcttagtccattcttgttttgggttgctactacaaaaaagcggcaatgctttatatgaatcgcctcttactaatatccagggtcaaatggtggtccttcagtgaccagactaatatttgagcattaatcttatttgtttcacagtcatttcttgtttatcaatatgaatgctatttttttgcgagtggacttgttaactaataagctcatagatatttgaacaaaaaatagtgttttgttctaaaactgtcataaagagtgcatacatcatagctatggtttcaactgtgatttgatgtcctataatattgagtgtcctatagtgtgttgttctgaaacagtcacaaagagggcctaagaagctgatggaatcctcattcaccgccgctaaggagtttgagcgggatcggagaggagacgtcagttcttcctcctctgctcaatgcggccattcgccctgtcccccaaccctgaactccacactgccactccgtgctcattttttctgaaggggaaatattcatctccttgttgttttgtaccatggatactttagcatcattctcatactactaggagtgtaggtaaggagtccacacacgagtttgcaaacaccattaagcctattttgcttgattagtgccctgcaacacttcatatgttcaagacaaaatccatacccatgtctattgttgtatgatattatttgcattgaccgttgctgctcttcttgattgcagtcactaacattgcattaatctatgtgatacatttattcaggcgattcccatttctcagtgatgtcgatgtcctgtactcctgtatatttggattcaacaatatgccattagtatgctgtcaagcgtcctatttgcaagagataaatggcttacgcccgaggggcttattcttccttatcatggtatgatataattatcatacaaaaatgttacactgcttttacagggtgtacctcatctatttgcttgtacaattcatcttactactgctttgacaaacattggtctgctctgctttggtctgtgctttaggattctgtttcattgggagaaacaaatgcccttgcttactttcattataactgtgctatttttttgatccaatgttgttctaagatcaagaagtggaatacttgttctaagggtcccaagttgggtggtggtggtgggaagcgttttcaggtcggtcgtgactttggttatccactgaaaagatatgcttggtggtgctttcttgtgttgaagaacaagtatcccacggaaccacaaccgtttgtattatctggtgatttcctacattattagctggcctaactaaaccatgcgctcagaccctaaaccagctgtaagtctgtaacttaaaagcacagtgcactagcggaatggggttccttgctttttggagcgtttccccagtcagatcggcggcagggcaggtcacgtggacggggctccttgttgctggaactaaataccgtggagagtttgaagtgagactaaagaaacttatggaggaaattaagcaaaatgaagacattattctctttattgattaagtgcacacactgattggagcagtgcattggtgccacaacactggatgagtataggaagcatatagagaaagatcctgccttggaaagaaggtttcaaccagttaaggttccagagcctactatggatgaaacaatacagatcttaagaggacttcgtgagagatatgaacttcatcacaaactgagatacacagatgatgctttaattgctgctgcacagctgtcttatcagtatatcagcgatcgttttctgcctgacaaagccattgacttgattgatgaagctggatctcgtgttaggctgaggcatgcgcagctccctgatgaagccaaagagctggacaaagagctgcggcagataagcaagcagaaaaatgaggctgtacgtggccaagattttgagaaggtatactgttgtttggcacagcggtgacaaagccgatccgctcccacctctctagcaacgtcgatatggttaataccaagcattatgttgtttccttttgagataaatattttgttactgattttaccttttgtctcctcttcttgttttttgttctagaatctgtagcaaatggctaacgatgaggatatccattactttgtttatgacaataaaactgatatgttcaagattccgtagcaacgcacgggcatctaact

SEQ ID NO: 32432 - DNA, 3608 bp, Zea Mays
cgcatacgcccgcagccgccatcaacgcccgcggacccctcagcctcctccttaccgccgcgatccgccagaccaccgccccccccccgcacccgccgcagatctcgccatggcggcgcgcacgccccccaggtcgcagccccgtcaccttcctcccccaccccgaactccgtccccgccgtagatctcgccatcggtaacacacctctcgttcgcatctgacgcgagcggttgggttctcccgcgcgagcggccggcgggtgcgacagaggggtcttgtgaaggccatcggcaacacacctctcattcgcatcaacagcctctccgacgttacaggatgcgaggttcgcgcgtggactcggcgtcatctccgcgtggtcctcgccccccccccccgagacacccgctcgcaatgttcgggagtccgcgcccgccgtcgagaggagtgctgcatctgccttgcgtagtacggggagaaggaggaggttcggcagctgccgtgcacacacgtgtttcatctcaagtgcatatacaggtggctcaggatcatctcctcttgccctctctgcaagcaagagctcaagtgaactttatattcattacacacatgacattctcgcttattctttggatcaaggtgttagtatcctagacacaacagatattttccagctaacaagggaaatcaaggaagaattgatctttatattagcaggcggatgcaatcactaatcaaaaccacgatgcaaggtaacctaaatggattttaaattttattttggattgttaaatctttatttctgactactattgttttatgtcgtggatgccctcgtgaggttctacgccgacgccttcaggagggattcacagaggccatggtgaggatggccagcttgagtcggctcaccgggagcagcgcgagatccgctacaactaaatgataggaggtattttctagaaattacaaccccacctctgtcaggccttctgttgagtgaatttggtttgcacaccctcaccctgcacgctcttaccggactaccgctcctagcacccactcacacgagattgcaccccgctcgccatgccaccatagatccagctagggcgacatcattgtgggcaatcctgtgcgagagaatgtgaaattgttgtaggattgataatgaccaggggtttctccgcccacatgcaccaggtttcgctgccatttgcagcgactgtgttccagttcgaccgtttggggaaaaggtgagtcctcccatttcatgtagatgcatgggttgataaacatttgggagaaatgtcccctctttaattcgaaaaatagttgtgtatttgttcgacttatctgcggcgatgtacctttgtacgcgtacaaacatctatagacaaaaacaaaatgacacttcatggatgtagcaagagcgggctacgagaaactagcagatcatgcctaaaattcaattagcattagggtcagacaaaatactacattttctggattacaataatgtataggtgcatgaaaaaaacttgattccaatgtgtgacaaagtgtgaagatgaaagtgcactttcacgctgtcataacgcggatttgttttccttgctcatggaatgtgcatttgtgtgtttgcgtctactgtgcggctacaggcaaggaaacaggatctgtcacggaagtgtgttgttctgaaacagtcacaaagagggcctaagaagctgatggaatcctcattcaccgccgctaaggagtttgagcgggatcggagaggagacgtcagttcttcctcctctgctcaatgcggccattcgccctgtcccccaaccctgaactccacactgccactccgtgctcattttttctgaaggggaaatattcatctccttgttgttttgtaccatggatactttagcatcattctcatactactaggagtgtaggtaaggagtccacacacgagtttgcaaacaccattaagcctattttgcttgattagtgccctgcaacacttcatatgttcaagacaaaatccatacccatgtctattgttgtatgatattatttgcattgaccgttgctgctcttcttgattgcagtcactaacattgcattaatctatgtgatacatttattcaggcgattcccatttctcagtgatgtcgatgtcctgtactcctgtatatttggattcaacaatatgccattagtatgctgtcaagcgtcctatttgcaagagataaatggcttacgcccgaggggcttattcttccttatcatggtatgatataattatcatacaaaaatgttacactgcttttacagggtgtacctcatctatttgcttgtacaattcatcttactactgctttgacaaacattggtctgctctgctttggtctgtgctttaggattctgtttcattgggagaaacaaatgcccttgcttactttcattataactgtgctatttttttgatccaatgttgttctaagatcaagaagtggaatacttgttctaagggtcccaagttgggtggtggtggtgggaagcgttttcaggtcggtcgtgactttggttatccactgaaaagatatgcttggtggtgctttcttgtgttgaagaacaagtatcccacggaaccacaaccgtttgtattatctggtgatttcctacattattagctggcctaactaaaccatgcgctcagaccctaaaccagctgtaagtctgtaacttaaaagcacagtgcactagcggaatggggttccttgctttttggagcgtttccccagtcagatcggcggcagggcaggtcacgtggacggggctccttgttgctggaactaaataccgtggagagtttgaagtgagactaaagaaacttatggaggaaattaagcaaaatgaagacattattctctttattgattaagtgcacacactgattggagcagtgcattggtgccacaacactggatgagtataggaagcatatagagaaagatcctgccttggaaagaaggtttcaaccagttaaggttccagagcctactatggatgaaacaatacagatcttaagaggacttcgtgagagatatgaacttcatcacaaactgagatacacagatgatgctttaattgctgctgcacagctgtcttatcagtatatcagcgatcgttttctgcctgacaaagccattgacttgattgatgaagctggatctcgtgttaggctgaggcatgcgcagctccctgatgaagccaaagagctggacaaagagctgcggcagataagcaagcagaaaaatgaggctgtacgtggccaagattttgagaaggtatactgttgtttggcacagcggtgacaaagccgatccgctcccacctctctagcaacgtcgatatggttaataccaagcattatgttgtttccttttgagataaatattttgttactgattttaccttttgtctcctcttcttgttttttgttctagaatctgtagcaaatggctaacgatgaggatatccattactttgtttatgacaataaaactgatatgttcaagattccgtagcaacgcacgggcatctaact

SEQ ID NO: 32433 - DNA, 3129 bp, Zea Mays
cgcatacgcccgcagccgccatcaacgcccgcggacccctcagcctcctccttaccgccgcgatccgccagaccaccgccccccccccgcacccgccgcagatctcgccatggcggcgcgcacgccccccaggtcgcagccccgtcaccttcctcccccaccccgaactccgtccccgccgtagatctcgccatcggtaacacacctctcgttcgcatctgacgcgagcggttgggttctcccgcgcgagcggccggcgggtgcgacagaggggtcttgtgaaggccatcggcaacacacctctcattcgcatcaacagcctctccgacgttacaggatgcgaggttcgcgcgtggactcggcgtcatctccgcgtggtcctcgccccccccccccgagacacccgctcgcaatgttcgggagtccgcgcccgccgtcgagaggagtgctgcatctgccttgcgtagtacggggagaaggaggaggttcggcagctgccgtgcacacacgtgtttcatctcaagtgcatatacaggtggctcaggatcatctcctcttgccctctctgcaagcaagagctcaagtgaactttatattcattacacacatgacattctcgcttattctttggatcaaggtgttagtatcctagacacaacagatattttccagctaacaagggaaatcaaggaagaattgatctttatattagcaggcggatgcaatcactaatcaaaaccacgatgcaaggtaacctaaatggattttaaattttattttggattgttaaatctttatttctgactactattgttttatgtcgtggatgccctcgtgaggttctacgccgacgccttcaggagggattcacagaggccatggtgaggatggccagcttgagtcggctcaccgggagcagcgcgagatccgctacaactaaatgataggaggtttcgctgccatttgcagcgactgtgttccagttcgaccgtttggggaaaaggcaaggaaacaggatctgtcacggaaggtatgtacacattacagtaaacgttgttcgtagaacatgcactttgtggagtggtctttgaatgagatgcgtttagaattaccttttcatgcagatctcttgttcagaacctggttgcttagtccattcttgttttgggttgctactacaaaaaagcggcaatgctttatatgaatcgcctcttactaatatccagggtcaaatggtggtccttcagtgaccagactaatatttgagcattaatcttatttgtttcacagtcatttcttgtttatcaatatgaatgctatttttttgcgagtggacttgttaactaataagctcatagatatttgaacaaaaaatagtgttttgttctaaaactgtcataaagagtgcatacatcatagctatggtttcaactgtgatttgatgtcctataatattgagtgtcctatagtgtgttgttctgaaacagtcacaaagagggcctaagaagctgatggaatcctcattcaccgccgctaaggagtttgagcgggatcggagaggagacgtcagttcttcctcctctgctcaatgcggccattcgccctgtcccccaaccctgaactccacactgccactccgtgctcattttttctgaaggggaaatattcatctccttgttgttttgtaccatggatactttagcatcattctcatactactaggagtgtaggtaaggagtccacacacgagtttgcaaacaccattaagcctattttgcttgattagtgccctgcaacacttcatatgttcaagacaaaatccatacccatgtctattgttgtatgatattatttgcattgaccgttgctgctcttcttgattgcagtcactaacattgcattaatctatgtgatacatttattcaggcgattcccatttctcagtgatgtcgatgtcctgtactcctgtatatttggattcaacaatatgccattagtatgctgtcaagcgtcctatttgcaagagataaatggcttacgcccgaggggcttattcttccttatcatgcgttttcaggtcggtcgtgactttggttatccactgaaaagatatgcttggtggtgctttcttgtgttgaagaacaagtatcccacggaaccacaaccgtttgtattatctggtgatttcctacattattagctggcctaactaaaccatgcgctcagaccctaaaccagctgtaagtctgtaacttaaaagcacagtgcactagcggaatggggttccttgctttttggagcgtttccccagtcagatcggcggcagggcaggtcacgtggacggggctccttgttgctggaactaaataccgtggagagtttgaagtgagactaaagaaacttatggaggaaattaagcaaaatgaagacattattctctttattgattaagtgcacacactgattggagcaggtgcagcagaagtgcattggtgccacaacactggatgagtataggaagcatatagagaaagatcctgccttggaaagaaggtttcaaccagttaaggttccagagcctactatggatgaaacaatacagatcttaagaggacttcgtgagagatatgaacttcatcacaaactgagatacacagatgatgctttaattgctgctgcacagctgtcttatcagtatatcagcgatcgttttctgcctgacaaagccattgacttgattgatgaagctggatctcgtgttaggctgaggcatgcgcagctccctgatgaagccaaagagctggacaaagagctgcggcagataagcaagcagaaaaatgaggctgtacgtggccaagattttgagaaggtatactgttgtttggcacagcggtgacaaagccgatccgctcccacctctctagcaacgtcgatatggttaataccaagcattatgttgtttccttttgagataaatattttgttactgattttaccttttgtctcctcttcttgttttttgttctagaatctgtagcaaatggctaacgatgaggatatccattactttgtttatgacaataaaactgatatgttcaagattccgtagcaacgcacgggcatctaact

SEQ ID NO: 32434 - DNA, 2097 bp, Zea Mays
cgcatacgcccgcagccgccatcaacgcccgcggacccctcagcctcctccttaccgccgcgatccgccagaccaccgccccccccccgcacccgccgcagatctcgccatggcggcgcgcacgccccccaggtcgcagccccgtcaccttcctcccccaccccgaactccgtccccgccgtagatctcgccatcggtaacacacctctcgttcgcatctgacgcgagcggttgggttctcccgcgcgagcggccggcgggtgcgacagaggggtcttgtgaaggccatcggcaacacacctctcattcgcatcaacagcctctccgacgttacaggatgcgaggttcgcgcgtggactcggcgtcatctccgcgtggtcctcgccccccccccccgagacacccgctcgcaatgttcgggagtccgcgcccgccgtcgagaggagtgctgcatctgccttgcgtagtacggggagaaggaggaggttcggcagctgccgtgcacacacgtgtttcatctcaagtgcatatacagttccagctaacaagggaaatcaaggaagaattgatctttatattagcaggcggatgcaatcactaatcaaaaccacgatgcaaggtaacctaaatggattttaaattttattttggattgttaaatctttatttctgactactattgttttatgtcgtggatgccctcgtgaggttctacgccgacgccttcaggagggattcacagaggccatggtgaggatggccagcttgagtcggctcaccgggagcagcgcgagatccgctacaactaaatgataggaggtttcgctgccatttgcagcgactgtgttccagttcgaccgtttggggaaaagtcacaaagagggcctaagaagctgatggaatcctcattcaccgccgctaaggagtttgagcgggatcggagaggagacgtcagttcttcctcctctgctcaatgcggccattcgccctgtcccccaaccctgaactccacactgccactccgtgctcattttttctgaaggggaaatattcatctccttgttgttttgtaccatggatactttagcatcattctcatactactaggagtgtaggtaaggagtccacacacgagtttgcaaacaccattaagcctattttgcttgattagtgccctgcaacacttcatatgttcaagacaaaatccatacccatgtctattgttgtatgatattatttgcattgaccgttgctgctcttcttgattgcagtcactaacattgcattaatctatgtgatacatttattcaggcgattcccatttctcagtgatgtcgatgtcctgtactcctgtatatttggattcaacaatatgccattagtatgctgtcaagcgtcctatttgcaagagataaatggcttacgcccgaggggcttattcttccttatcatgtgcattggtgccacaacactggatgagtataggaagcatatagagaaagatcctgccttggaaagaaggtttcaaccagttaaggttccagagcctactatggatgaaacaatacagatcttaagaggacttcgtgagagatatgaacttcatcacaaactgagatacacagatgatgctttaattgctgctgcacagctgtcttatcagtatatcagcgatcgttttctgcctgacaaagccattgacttgattgatgaagctggatctcgtgttaggctgaggcatgcgcagctccctgatgaagccaaagagctggacaaagagctgcggcagataagcaagcagaaaaatgaggctgtacgtggccaagattttgagaaggtatactgttgtttggcacagcggtgacaaagccgatccgctcccacctctctagcaacgtcgatatggttaataccaagcattatgttgtttccttttgagataaatattttgttactgattttaccttttgtctcctcttcttgttttttgttctagaatctgtagcaaatggctaacgatgaggatatccattactttgtttatgacaataaaactgatatgttcaagattccgtagcaacgcacgggcatctaact

SEQ ID NO: 32435 - DNA, 2871 bp, Zea Mays
cgcatacgcccgcagccgccatcaacgcccgcggacccctcagcctcctccttaccgccgcgatccgccagaccaccgccccccccccgcacccgccgcagatctcgccatggcggcgcgcacgccccccaggtcgcagccccgtcaccttcctcccccaccccgaactccgtccccgccgtagatctcgccatcggtaacacacctctcgttcgcatctgacgcgagcggttgggttctcccgcgcgagcggccggcgggtgcgacagaggggtcttgtgaaggccatcggcaacacacctctcattcgcatcaacagcctctccgacgttacaggatgcgaggttcgcgcgtggactcggcgtcatctccgcgtggtcctcgccccccccccccgagacacccgctcgcaatgttcgggagtccgcgcccgccgtcgagaggagtgctgcatctgccttgcgtagtacggggagaaggaggaggttcggcagctgccgtgcacacacgtgtttcatctcaagtgcatatacaggtggctcaggatcatctcctcttgccctctctgcaagcaagagctcaagtgaactttatattcattacacacatgacattctcgcttattctttggatcaaggtgttagtatcctagacacaacagatattttccagctaacaagggaaatcaaggaagaattgatctttatattagcaggcggatgcaatcactaatcaaaaccacgatgcaaggtaacctaaatggattttaaattttattttggattgttaaatctttatttctgactactattgttttatgtcgtggatgccctcgtgaggttctacgccgacgccttcaggagggattcacagaggccatggtgaggatggccagcttgagtcggctcaccgggagcagcgcgagatccgctacaactaaatgataggaggtattttctagaaattacaaccccacctctgtcaggccttctgttgagtgaatttggtttgcacaccctcaccctgcacgctcttaccggactaccgctcctagcacccactcacacgagattgcaccccgctcgccatgccaccatagatccagctagggcgacatcattgtgggcaatcctgtgcgagagaatgtgaaattgttgtaggattgataatgaccaggggtttctccgcccacatgcaccaggtttcgctgccatttgcagcgactgtgttccagttcgaccgtttggggaaaaggtgagtcctcccatttcatgtagatgcatgggttgataaacatttgggagaaatgtcccctctttaattcgaaaaatagttgtgtatttgttcgacttatctgcggcgatgtacctttgtacgcgtacaaacatctatagacaaaaacaaaatgacacttcatggatgtagcaagagcgggctacgagaaactagcagatcatgcctaaaattcaattagcattagggtcagacaaaatactacattttctggattacaataatgtataggtgcatgaaaaaaacttgattccaatgtgtgacaaagtgtgaagatgaaagtgcactttcacgctgtcataacgcggatttgttttccttgctcatggaatgtgcatttgtgtgtttgcgtctactgtgcggctacaggcaaggaaacaggatctgtcacggaaggcgattcccatttctcagtgatgtcgatgtcctgtactcctgtatatttggattcaacaatatgccattagtatgctgtcaagcgtcctatttgcaagagataaatggcttacgcccgaggggcttattcttccttatcatggtcggtcgtgactttggttatccactgaaaagatatgcttggtggtgctttcttgtgttgaagaacaagtatcccacggaaccacaaccgtttgtattatctggtgatttcctacattattagctggcctaactaaaccatgcgctcagaccctaaaccagctgtaagtctgtaacttaaaagcacagtgcactagcggaatggggttccttgctttttggagcgtttccccagtcagatcggcggcagggcaggtcacgtggacggggctccttgttgctggaactaaataccgtggagagtttgaagtgagactaaagaaacttatggaggaaattaagcaaaatgaagacattattctctttattgattaagtgcacacactgattggagcagtgcattggtgccacaacactggatgagtataggaagcatatagagaaagatcctgccttggaaagaaggtttcaaccagttaaggttccagagcctactatggatgaaacaatacagatcttaagaggacttcgtgagagatatgaacttcatcacaaactgagatacacagatgatgctttaattgctgctgcacagctgtcttatcagtatatcagcgatcgttttctgcctgacaaagccattgacttgattgatgaagctggatctcgtgttaggctgaggcatgcgcagctccctgatgaagccaaagagctggacaaagagctgcggcagataagcaagcagaaaaatgaggctgtacgtggccaagattttgagaaggtatactgttgtttggcacagcggtgacaaagccgatccgctcccacctctctagcaacgtcgatatggttaataccaagcattatgttgtttccttttgagataaatattttgttactgattttaccttttgtctcctcttcttgttttttgttctagaatctgtagcaaatggctaacgatgaggatatccattactttgtttatgacaataaaactgatatgttcaagattccgtagcaacgcacgggcatctaact

SEQ ID NO: 32436 - DNA, 4059 bp, Zea Mays
cgcatacgcccgcagccgccatcaacgcccgcggacccctcagcctcctccttaccgccgcgatccgccagaccaccgccccccccccgcacccgccgcagatctcgccatggcggcgcgcacgccccccaggtcgcagccccgtcaccttcctcccccaccccgaactccgtccccgccgtagatctcgccatcggtaacacacctctcgttcgcatctgacgcgagcggttgggttctcccgcgcgagcggccggcgggtgcgacagaggggtcttgtgaaggccatcggcaacacacctctcattcgcatcaacagcctctccgacgttacaggatgcgaggttcgcgcgtggactcggcgtcatctccgcgtggtcctcgccccccccccccgagacacccgctcgcaatgttcgggagtccgcgcccgccgtcgagaggagtgctgcatctgccttgcgtagtacggggagaaggaggaggttcggcagctgccgtgcacacacgtgtttcatctcaagtgcatatacaggtggctcaggatcatctcctcttgccctctctgcaagcaagagctcaagtgaactttatattcattacacacatgacattctcgcttattctttggatcaaggtgttagtatcctagacacaacagatattttccagctaacaagggaaatcaaggaagaattgatctttatattagcaggcggatgcaatcactaatcaaaaccacgatgcaaggtaacctaaatggattttaaattttattttggattgttaaatctttatttctgactactattgttttatgtcgtggatgccctcgtgaggttctacgccgacgccttcaggagggattcacagaggccatggtgaggatggccagcttgagtcggctcaccgggagcagcgcgagatccgctacaactaaatgataggaggtattttctagaaattacaaccccacctctgtcaggccttctgttgagtgaatttggtttgcacaccctcaccctgcacgctcttaccggactaccgctcctagcacccactcacacgagattgcaccccgctcgccatgccaccatagatccagctagggcgacatcattgtgggcaatcctgtgcgagagaatgtgaaattgttgtaggattgataatgaccaggggtttctccgcccacatgcaccaggtttcgctgccatttgcagcgactgtgttccagttcgaccgtttggggaaaaggtgagtcctcccatttcatgtagatgcatgggttgataaacatttgggagaaatgtcccctctttaattcgaaaaatagttgtgtatttgttcgacttatctgcggcgatgtacctttgtacgcgtacaaacatctatagacaaaaacaaaatgacacttcatggatgtagcaagagcgggctacgagaaactagcagatcatgcctaaaattcaattagcattagggtcagacaaaatactacattttctggattacaataatgtataggtgcatgaaaaaaacttgattccaatgtgtgacaaagtgtgaagatgaaagtgcactttcacgctgtcataacgcggatttgttttccttgctcatggaatgtgcatttgtgtgtttgcgtctactgtgcggctacaggcaaggaaacaggatctgtcacggaaggtatgtacacattacagtaaacgttgttcgtagaacatgcactttgtggagtggtctttgaatgagatgcgtttagaattaccttttcatgcagatctcttgttcagaacctggttgcttagtccattcttgttttgggttgctactacaaaaaagcggcaatgctttatatgaatcgcctcttactaatatccagggtcaaatggtggtccttcagtgaccagactaatatttgagcattaatcttatttgtttcacagtcatttcttgtttatcaatatgaatgctatttttttgcgagtggacttgttaactaataagctcatagatatttgaacaaaaaatagtgttttgttctaaaactgtcataaagagtgcatacatcatagctatggtttcaactgtgatttgatgtcctataatattgagtgtcctatagtgtgttgttctgaaacagtcacaaagagggcctaagaagctgatggaatcctcattcaccgccgctaaggagtttgagcgggatcggagaggagacgtcagttcttcctcctctgctcaatgcggccattcgccctgtcccccaaccctgaactccacactgccactccgtgctcattttttctgaaggggaaatattcatctccttgttgttttgtaccatggatactttagcatcattctcatactactaggagtgtaggtaaggagtccacacacgagtttgcaaacaccattaagcctattttgcttgattagtgccctgcaacacttcatatgttcaagacaaaatccatacccatgtctattgttgtatgatattatttgcattgaccgttgctgctcttcttgattgcagtcactaacattgcattaatctatgtgatacatttattcaggcgattcccatttctcagtgatgtcgatgtcctgtactcctgtatatttggattcaacaatatgccattagtatgctgtcaagcgtcctatttgcaagagataaatggcttacgcccgaggggcttattcttccttatcatggtatgatataattatcatacaaaaatgttacactgcttttacagggtgtacctcatctatttgcttgtacaattcatcttactactgctttgacaaacattggtctgctctgctttggtctgtgctttaggattctgtttcattgggagaaacaaatgcccttgcttactttcattataactgtgctatttttttgatccaatgttgttctaagatcaagaagtggaatacttgttctaagggtcccaagttgggtggtggtggtgggaagcgttttcaggtcggtcgtgactttggttatccactgaaaagatatgcttggtggtgctttcttgtgttgaagaacaagtatcccacggaaccacaaccgtttgtattatctggtgatttcctacattattagctggcctaactaaaccatgcgctcagaccctaaaccagctgtaagtctgtaacttaaaagcacagtgcactagcggaatggggttccttgctttttggagcgtttccccagtcagatcggcggcagggcaggtcacgtggacggggctccttgttgctggaactaaataccgtggagagtttgaagtgagactaaagaaacttatggaggaaattaagcaaaatgaagacattattctctttattgattaagtgcacacactgattggagcaggtgcagcagaagtgcattggtgccacaacactggatgagtataggaagcatatagagaaagatcctgccttggaaagaaggtttcaaccagttaaggttccagagcctactatggatgaaacaatacagatcttaagaggacttcgtgagagatatgaacttcatcacaaactgagatacacagatgatgctttaattgctgctgcacagctgtcttatcagtatatcagcgatcgttttctgcctgacaaagccattgacttgattgatgaagctggatctcgtgttaggctgaggcatgcgcagctccctgatgaagccaaagagctggacaaagagctgcggcagataagcaagcagaaaaatgaggctgtacgtggccaagattttgagaaggtatactgttgtttggcacagcggtgacaaagccgatccgctcccacctctctagcaacgtcgatatggttaataccaagcattatgttgtttccttttgagataaatattttgttactgattttaccttttgtctcctcttcttgttttttgttctagaatctgtagcaaatggctaacgatgaggatatccattactttgtttatgacaataaaactgatatgttcaagattccgtagcaacgcacgggcatctaact

SEQ ID NO: 32437 - DNA, 3678 bp, Zea Mays
cgcatacgcccgcagccgccatcaacgcccgcggacccctcagcctcctccttaccgccgcgatccgccagaccaccgccccccccccgcacccgccgcagatctcgccatggcggcgcgcacgccccccaggtcgcagccccgtcaccttcctcccccaccccgaactccgtccccgccgtagatctcgccatcggtaacacacctctcgttcgcatctgacgcgagcggttgggttctcccgcgcgagcggccggcgggtgcgacagaggggtcttgtgaaggccatcggcaacacacctctcattcgcatcaacagcctctccgacgttacaggatgcgaggttcgcgcgtggactcggcgtcatctccgcgtggtcctcgccccccccccccgagacacccgctcgcaatgttcgggagtccgcgcccgccgtcgagaggagtgctgcatctgccttgcgtagtacggggagaaggaggaggttcggcagctgccgtgcacacacgtgtttcatctcaagtgcatatacaggtggctcaggatcatctcctcttgccctctctgcaagcaagagctcaagtgaactttatattcattacacacatgacattctcgcttattctttggatcaaggtgttagtatcctagacacaacagatattttccagctaacaagggaaatcaaggaagaattgatctttatattagcaggcggatgcaatcactaatcaaaaccacgatgcaaggtaacctaaatggattttaaattttattttggattgttaaatctttatttctgactactattgttttatgtcgtggatgccctcgtgaggttctacgccgacgccttcaggagggattcacagaggccatggtgaggatggccagcttgagtcggctcaccgggagcagcgcgagatccgctacaactaaatgataggaggtattttctagaaattacaaccccacctctgtcaggccttctgttgagtgaatttggtttgcacaccctcaccctgcacgctcttaccggactaccgctcctagcacccactcacacgagattgcaccccgctcgccatgccaccatagatccagctagggcgacatcattgtgggcaatcctgtgcgagagaatgtgaaattgttgtaggattgataatgaccaggggtttctccgcccacatgcaccaggtttcgctgccatttgcagcgactgtgttccagttcgaccgtttggggaaaaggtgagtcctcccatttcatgtagatgcatgggttgataaacatttgggagaaatgtcccctctttaattcgaaaaatagttgtgtatttgttcgacttatctgcggcgatgtacctttgtacgcgtacaaacatctatagacaaaaacaaaatgacacttcatggatgtagcaagagcgggctacgagaaactagcagatcatgcctaaaattcaattagcattagggtcagacaaaatactacattttctggattacaataatgtataggtgcatgaaaaaaacttgattccaatgtgtgacaaagtgtgaagatgaaagtgcactttcacgctgtcataacgcggatttgttttccttgctcatggaatgtgcatttgtgtgtttgcgtctactgtgcggctacaggcaaggaaacaggatctgtcacggaaggtatgtacacattacagtaaacgttgttcgtagaacatgcactttgtggagtggtctttgaatgagatgcgtttagaattaccttttcatgcagatctcttgttcagaacctggttgcttagtccattcttgttttgggttgctactacaaaaaagcggcaatgctttatatgaatcgcctcttactaatatccagggtcaaatggtggtccttcagtgaccagactaatatttgagcattaatcttatttgtttcacagtcatttcttgtttatcaatatgaatgctatttttttgcgagtggacttgttaactaataagctcatagatatttgaacaaaaaatagtgttttgttctaaaactgtcataaagagtgcatacatcatagctatggtttcaactgtgatttgatgtcctataatattgagtgtcctatagtgtgttgttctgaaacagtcacaaagagggcctaagaagctgatggaatcctcattcaccgccgctaaggagtttgagcgggatcggagaggagacgtcagttcttcctcctctgctcaatgcggccattcgccctgtcccccaaccctgaactccacactgccactccgtgctcattttttctgaaggggaaatattcatctccttgttgttttgtaccatggatactttagcatcattctcatactactaggagtgtaggcgattcccatttctcagtgatgtcgatgtcctgtactcctgtatatttggattcaacaatatgccattagtatgctgtcaagcgtcctatttgcaagagataaatggcttacgcccgaggggcttattcttccttatcatgcgttttcaggtcggtcgtgactttggttatccactgaaaagatatgcttggtggtgctttcttgtgttgaagaacaagtatcccacggaaccacaaccgtttgtattatctggtgatttcctacattattagctggcctaactaaaccatgcgctcagaccctaaaccagctgtaagtctgtaacttaaaagcacagtgcactagcggaatggggttccttgctttttggagcgtttccccagtcagatcggcggcagggcaggtcacgtggacggggctccttgttgctggaactaaataccgtggagagtttgaagtgagactaaagaaacttatggaggaaattaagcaaaatgaagacattattctctttattgattaagtgcacacactgattggagcaggtgcagcagaaggtgtaattgatgctgctaatattttgaagccagcattttgtaattttcccaaaataaccacattgctggtgattttatctgtgtagtgcattggtgccacaacactggatgagtataggaagcatatagagaaagatcctgccttggaaagaaggtttcaaccagttaaggttccagagcctactatggatgaaacaatacagatcttaagaggacttcgtgagagatatgaacttcatcacaaactgagatacacagatgatgctttaattgctgctgcacagctgtcttatcagtatatcagcgatcgttttctgcctgacaaagccattgacttgattgatgaagctggatctcgtgttaggctgaggcatgcgcagctccctgatgaagccaaagagctggacaaagagctgcggcagataagcaagcagaaaaatgaggctgtacgtggccaagattttgagaaggtatactgttgtttggcacagcggtgacaaagccgatccgctcccacctctctagcaacgtcgatatggttaataccaagcattatgttgtttccttttgagataaatattttgttactgattttaccttttgtctcctcttcttgttttttgttctagaatctgtagcaaatggctaacgatgaggatatccattactttgtttatgacaataaaactgatatgttcaagattccgtagcaacgcacgggcatctaact

SEQ ID NO: 32438 - DNA, 2949 bp, Zea Mays
cgcatacgcccgcagccgccatcaacgcccgcggacccctcagcctcctccttaccgccgcgatccgccagaccaccgccccccccccgcacccgccgcagatctcgccatggcggcgcgcacgccccccaggtcgcagccccgtcaccttcctcccccaccccgaactccgtccccgccgtagatctcgccatcggtaacacacctctcgttcgcatctgacgcgagcggttgggttctcccgcgcgagcggccggcgggtgcgacagaggggtcttgtgaaggccatcggcaacacacctctcattcgcatcaacagcctctccgacgttacaggatgcgaggttcgcgcgtggactcggcgtcatctccgcgtggtcctcgccccccccccccgagacacccgctcgcaatgttcgggagtccgcgcccgccgtcgagaggagtgctgcatctgccttgcgtagtacggggagaaggaggaggttcggcagctgccgtgcacacacgtgtttcatctcaagtgcatatacaggtggctcaggatcatctcctcttgccctctctgcaagcaagagctcaagtgaactttatattcattacacacatgacattctcgcttattctttggatcaaggtgttagtatcctagacacaacagatattttccagctaacaagggaaatcaaggaagaattgatctttatattagcaggcggatgcaatcactaatcaaaaccacgatgcaaggtaacctaaatggattttaaattttattttggattgttaaatctttatttctgactactattgttttatgtcgtggatgccctcgtgaggttctacgccgacgccttcaggagggattcacagaggccatggtgaggatggccagcttgagtcggctcaccgggagcagcgcgagatccgctacaactaaatgataggaggtttcgctgccatttgcagcgactgtgttccagttcgaccgtttggggaaaaggcaaggaaacaggatctgtcacggaagtgtgttgttctgaaacagtcacaaagagggcctaagaagctgatggaatcctcattcaccgccgctaaggagtttgagcgggatcggagaggagacgtcagttcttcctcctctgctcaatgcggccattcgccctgtcccccaaccctgaactccacactgccactccgtgctcattttttctgaaggggaaatattcatctccttgttgttttgtaccatggatactttagcatcattctcatactactaggagtgtaggtaaggagtccacacacgagtttgcaaacaccattaagcctattttgcttgattagtgccctgcaacacttcatatgttcaagacaaaatccatacccatgtctattgttgtatgatattatttgcattgaccgttgctgctcttcttgattgcagtcactaacattgcattaatctatgtgatacatttattcaggcgattcccatttctcagtgatgtcgatgtcctgtactcctgtatatttggattcaacaatatgccattagtatgctgtcaagcgtcctatttgcaagagataaatggcttacgcccgaggggcttattcttccttatcatggtatgatataattatcatacaaaaatgttacactgcttttacagggtgtacctcatctatttgcttgtacaattcatcttactactgctttgacaaacattggtctgctctgctttggtctgtgctttaggattctgtttcattgggagaaacaaatgcccttgcttactttcattataactgtgctatttttttgatccaatgttgttctaagatcaagaagtggaatacttgttctaagggtcccaagttgggtggtggtggtgggaagcgttttcaggtcggtcgtgactttggttatccactgaaaagatatgcttggtggtgctttcttgtgttgaagaacaagtatcccacggaaccacaaccgtttgtattatctggtgatttcctacattattagctggcctaactaaaccatgcgctcagaccctaaaccagctgtaagtctgtaacttaaaagcacagtgcactagcggaatggggttccttgctttttggagcgtttccccagtcagatcggcggcagggcaggtcacgtggacggggctccttgttgctggaactaaataccgtggagagtttgaagtgagactaaagaaacttatggaggaaattaagcaaaatgaagacattattctctttattgattaagtgcacacactgattggagcagtgcattggtgccacaacactggatgagtataggaagcatatagagaaagatcctgccttggaaagaaggtttcaaccagttaaggttccagagcctactatggatgaaacaatacagatcttaagaggacttcgtgagagatatgaacttcatcacaaactgagatacacagatgatgctttaattgctgctgcacagctgtcttatcagtatatcagcgatcgttttctgcctgacaaagccattgacttgattgatgaagctggatctcgtgttaggctgaggcatgcgcagctccctgatgaagccaaagagctggacaaagagctgcggcagataagcaagcagaaaaatgaggctgtacgtggccaagattttgagaaggtatactgttgtttggcacagcggtgacaaagccgatccgctcccacctctctagcaacgtcgatatggttaataccaagcattatgttgtttccttttgagataaatattttgttactgattttaccttttgtctcctcttcttgttttttgttctagaatctgtagcaaatggctaacgatgaggatatccattactttgtttatgacaataaaactgatatgttcaagattccgtagcaacgcacgggcatctaact

SEQ ID NO: 32439 - DNA, 3259 bp, Zea Mays
cgcatacgcccgcagccgccatcaacgcccgcggacccctcagcctcctccttaccgccgcgatccgccagaccaccgccccccccccgcacccgccgcagatctcgccatggcggcgcgcacgccccccaggtcgcagccccgtcaccttcctcccccaccccgaactccgtccccgccgtagatctcgccatcggtaacacacctctcgttcgcatctgacgcgagcggttgggttctcccgcgcgagcggccggcgggtgcgacagaggggtcttgtgaaggccatcggcaacacacctctcattcgcatcaacagcctctccgacgttacaggatgcgaggttcgcgcgtggactcggcgtcatctccgcgtggtcctcgccccccccccccgagacacccgctcgcaatgttcgggagtccgcgcccgccgtcgagaggagtgctgcatctgccttgcgtagtacggggagaaggaggaggttcggcagctgccgtgcacacacgtgtttcatctcaagtgcatatacaggtggctcaggatcatctcctcttgccctctctgcaagcaagagctcaagtgaactttatattcattacacacatgacattctcgcttattctttggatcaaggtgttagtatcctagacacaacagatattttccagctaacaagggaaatcaaggaagaattgatctttatattagcaggcggatgcaatcactaatcaaaaccacgatgcaaggtaacctaaatggattttaaattttattttggattgttaaatctttatttctgactactattgttttatgtcgtggatgccctcgtgaggttctacgccgacgccttcaggagggattcacagaggccatggtgaggatggccagcttgagtcggctcaccgggagcagcgcgagatccgctacaactaaatgataggaggtattttctagaaattacaaccccacctctgtcaggccttctgttgagtgaatttggtttgcacaccctcaccctgcacgctcttaccggactaccgctcctagcacccactcacacgagattgcaccccgctcgccatgccaccatagatccagctagggcgacatcattgtgggcaatcctgtgcgagagaatgtgaaattgttgtaggattgataatgaccaggggtttctccgcccacatgcaccaggtttcgctgccatttgcagcgactgtgttccagttcgaccgtttggggaaaaggtgagtcctcccatttcatgtagatgcatgggttgataaacatttgggagaaatgtcccctctttaattcgaaaaatagttgtgtatttgttcgacttatctgcggcgatgtacctttgtacgcgtacaaacatctatagacaaaaacaaaatgacacttcatggatgtagcaagagcgggctacgagaaactagcagatcatgcctaaaattcaattagcattagggtcagacaaaatactacattttctggattacaataatgtataggtgcatgaaaaaaacttgattccaatgtgtgacaaagtgtgaagatgaaagtgcactttcacgctgtcataacgcggatttgttttccttgctcatggaatgtgcatttgtgtgtttgcgtctactgtgcggctacaggcaaggaaacaggatctgtcacggaagtgtgttgttctgaaacagtcacaaagagggcctaagaagctgatggaatcctcattcaccgccgctaaggagtttgagcgggatcggagaggagacgcgattcccatttctcagtgatgtcgatgtcctgtactcctgtatatttggattcaacaatatgccattagtatgctgtcaagcgtcctatttgcaagagataaatggcttacgcccgaggggcttattcttccttatcatggtatgatataattatcatacaaaaatgttacactgcttttacagggtgtacctcatctatttgcttgtacaattcatcttactactgctttgacaaacattggtctgctctgctttggtctgtgctttaggattctgtttcattgggagaaacaaatgcccttgcttactttcattataactgtgctatttttttgatccaatgttgttctaagatcaagaagtggaatacttgttctaagggtcccaagttgggtggtggtggtgggaagcgttttcaggtcggtcgtgactttggttatccactgaaaagatatgcttggtggtgctttcttgtgttgaagaacaagtatcccacggaaccacaaccgtttgtattatctggtgatttcctacattattagctggcctaactaaaccatgcgctcagaccctaaaccagctgtaagtctgtaacttaaaagcacagtgcactagcggaatggggttccttgctttttggagcgtttccccagtcagatcggcggcagggcaggtcacgtggacggggctccttgttgctggaactaaataccgtggagagtttgaagtgagactaaagaaacttatggaggaaattaagcaaaatgaagacattattctctttattgattaagtgcacacactgattggagcaggtgcagcagaagtgcattggtgccacaacactggatgagtataggaagcatatagagaaagatcctgccttggaaagaaggtttcaaccagttaaggttccagagcctactatggatgaaacaatacagatcttaagaggacttcgtgagagatatgaacttcatcacaaactgagatacacagatgatgctttaattgctgctgcacagctgtcttatcagtatatcagcgatcgttttctgcctgacaaagccattgacttgattgatgaagctggatctcgtgttaggctgaggcatgcgcagctccctgatgaagccaaagagctggacaaagagctgcggcagataagcaagcagaaaaatgaggctgtacgtggccaagattttgagaaggtatactgttgtttggcacagcggtgacaaagccgatccgctcccacctctctagcaacgtcgatatggttaataccaagcattatgttgtttccttttgagataaatattttgttactgattttaccttttgtctcctcttcttgttttttgttctagaatctgtagcaaatggctaacgatgaggatatccattactttgtttatgacaataaaactgatatgttcaagattccgtagcaacgcacgggcatctaact

SEQ ID NO: 32440 - DNA, 3296 bp, Zea Mays
cgcatacgcccgcagccgccatcaacgcccgcggacccctcagcctcctccttaccgccgcgatccgccagaccaccgccccccccccgcacccgccgcagatctcgccatggcggcgcgcacgccccccaggtcgcagccccgtcaccttcctcccccaccccgaactccgtccccgccgtagatctcgccatcggtaacacacctctcgttcgcatctgacgcgagcggttgggttctcccgcgcgagcggccggcgggtgcgacagaggggtcttgtgaaggccatcggcaacacacctctcattcgcatcaacagcctctccgacgttacaggatgcgaggttcgcgcgtggactcggcgtcatctccgcgtggtcctcgccccccccccccgagacacccgctcgcaatgttcgggagtccgcgcccgccgtcgagaggagtgctgcatctgccttgcgtagtacggggagaaggaggaggttcggcagctgccgtgcacacacgtgtttcatctcaagtgcatatacagttccagctaacaagggaaatcaaggaagaattgatctttatattagcaggcggatgcaatcactaatcaaaaccacgatgcaaggtaacctaaatggattttaaattttattttggattgttaaatctttatttctgactactattgttttatgtcgtggatgccctcgtgaggttctacgccgacgccttcaggagggattcacagaggccatggtgaggatggccagcttgagtcggctcaccgggagcagcgcgagatccgctacaactaaatgataggaggtattttctagaaattacaaccccacctctgtcaggccttctgttgagtgaatttggtttgcacaccctcaccctgcacgctcttaccggactaccgctcctagcacccactcacacgagattgcaccccgctcgccatgccaccatagatccagctagggcgacatcattgtgggcaatcctgtgcgagagaatgtgaaattgttgtaggattgataatgaccaggggtttctccgcccacatgcaccaggtttcgctgccatttgcagcgactgtgttccagttcgaccgtttggggaaaaggtgagtcctcccatttcatgtagatgcatgggttgataaacatttgggagaaatgtcccctctttaattcgaaaaatagttgtgtatttgttcgacttatctgcggcgatgtacctttgtacgcgtacaaacatctatagacaaaaacaaaatgacacttcatggatgtagcaagagcgggctacgagaaactagcagatcatgcctaaaattcaattagcattagggtcagacaaaatactacattttctggattacaataatgtataggtgcatgaaaaaaacttgattccaatgtgtgacaaagtgtgaagatgaaagtgcactttcacgctgtcataacgcggatttgttttccttgctcatggaatgtgcatttgtgtgtttgcgtctactgtgcggctacaggcaaggaaacaggatctgtcacggaaggtatgtacacattacagtaaacgttgttcgtagaacatgcactttgtggagtggtctttgaatgagatgcgtttagaattaccttttcatgcagatctcttgttcagaacctggttgcttagtccattcttgttttgggttgctactacaaaaaagcggcaatgctttatatgaatcgcctcttactaatatccagggtcaaatggtggtccttcagtgaccagactaatatttgagcattaatcttatttgtttcacagtcatttcttgtttatcaatatgaatgctatttttttgcgagtggacttgttaactaataagctcatagatatttgaacaaaaaatagtgttttgttctaaaactgtcataaagagtgcatacatcatagctatggtttcaactgtgatttgatgtcctataatattgagtgtcctatagtgtgttgttctgaaacagtcacaaagagggcctaagaagctgatggaatcctcattcaccgccgctaaggagtttgagcgggatcggagaggagacgcgattcccatttctcagtgatgtcgatgtcctgtactcctgtatatttggattcaacaatatgccattagtatgctgtcaagcgtcctatttgcaagagataaatggcttacgcccgaggggcttattcttccttatcatgcgttttcaggtcggtcgtgactttggttatccactgaaaagatatgcttggtggtgctttcttgtgttgaagaacaagtatcccacggaaccacaaccgtttgtattatctggtgatttcctacattattagctggcctaactaaaccatgcgctcagaccctaaaccagctgtaagtctgtaacttaaaagcacagtgcactagcggaatggggttccttgctttttggagcgtttccccagtcagatcggcggcagggcaggtcacgtggacggggctccttgttgctggaactaaataccgtggagagtttgaagtgagactaaagaaacttatggaggaaattaagcaaaatgaagacattattctctttattgattaagtgcacacactgattggagcaggtgcagcagaagtgcattggtgccacaacactggatgagtataggaagcatatagagaaagatcctgccttggaaagaaggtttcaaccagttaaggttccagagcctactatggatgaaacaatacagatcttaagaggacttcgtgagagatatgaacttcatcacaaactgagatacacagatgatgctttaattgctgctgcacagctgtcttatcagtatatcagcgatcgttttctgcctgacaaagccattgacttgattgatgaagctggatctcgtgttaggctgaggcatgcgcagctccctgatgaagccaaagagctggacaaagagctgcggcagataagcaagcagaaaaatgaggctgtacgtggccaagattttgagaaggtatactgttgtttggcacagcggtgacaaagccgatccgctcccacctctctagcaacgtcgatatggttaataccaagcattatgttgtttccttttgagataaatattttgttactgattttaccttttgtctcctcttcttgttttttgttctagaatctgtagcaaatggctaacgatgaggatatccattactttgtttatgacaataaaactgatatgttcaagattccgtagcaacgcacgggcatctaact

SEQ ID NO: 32441 - DNA, 3865 bp, Zea Mays
cgcatacgcccgcagccgccatcaacgcccgcggacccctcagcctcctccttaccgccgcgatccgccagaccaccgccccccccccgcacccgccgcagatctcgccatggcggcgcgcacgccccccaggtcgcagccccgtcaccttcctcccccaccccgaactccgtccccgccgtagatctcgccatcggtaacacacctctcgttcgcatctgacgcgagcggttgggttctcccgcgcgagcggccggcgggtgcgacagaggggtcttgtgaaggccatcggcaacacacctctcattcgcatcaacagcctctccgacgttacaggatgcgaggttcgcgcgtggactcggcgtcatctccgcgtggtcctcgccccccccccccgagacacccgctcgcaatgttcgggagtccgcgcccgccgtcgagaggagtgctgcatctgccttgcgtagtacggggagaaggaggaggttcggcagctgccgtgcacacacgtgtttcatctcaagtgcatatacaggtggctcaggatcatctcctcttgccctctctgcaagcaagagctcaagtgaactttatattcattacacacatgacattctcgcttattctttggatcaagttccagctaacaagggaaatcaaggaagaattgatctttatattagcaggcggatgcaatcactaatcaaaaccacgatgcaaggtaacctaaatggattttaaattttattttggattgttaaatctttatttctgactactattgttttatgtcgtggatgccctcgtgaggttctacgccgacgccttcaggagggattcacagaggccatggtgaggatggccagcttgagtcggctcaccgggagcagcgcgagatccgctacaactaaatgataggaggtttcgctgccatttgcagcgactgtgttccagttcgaccgtttggggaaaaggtgagtcctcccatttcatgtagatgcatgggttgataaacatttgggagaaatgtcccctctttaattcgaaaaatagttgtgtatttgttcgacttatctgcggcgatgtacctttgtacgcgtacaaacatctatagacaaaaacaaaatgacacttcatggatgtagcaagagcgggctacgagaaactagcagatcatgcctaaaattcaattagcattagggtcagacaaaatactacattttctggattacaataatgtataggtgcatgaaaaaaacttgattccaatgtgtgacaaagtgtgaagatgaaagtgcactttcacgctgtcataacgcggatttgttttccttgctcatggaatgtgcatttgtgtgtttgcgtctactgtgcggctacaggcaaggaaacaggatctgtcacggaaggtatgtacacattacagtaaacgttgttcgtagaacatgcactttgtggagtggtctttgaatgagatgcgtttagaattaccttttcatgcagatctcttgttcagaacctggttgcttagtccattcttgttttgggttgctactacaaaaaagcggcaatgctttatatgaatcgcctcttactaatatccagggtcaaatggtggtccttcagtgaccagactaatatttgagcattaatcttatttgtttcacagtcatttcttgtttatcaatatgaatgctatttttttgcgagtggacttgttaactaataagctcatagatatttgaacaaaaaatagtgttttgttctaaaactgtcataaagagtgcatacatcatagctatggtttcaactgtgatttgatgtcctataatattgagtgtcctatagtgtgttgttctgaaacagtcacaaagagggcctaagaagctgatggaatcctcattcaccgccgctaaggagtttgagcgggatcggagaggagacgtcagttcttcctcctctgctcaatgcggccattcgccctgtcccccaaccctgaactccacactgccactccgtgctcattttttctgaaggggaaatattcatctccttgttgttttgtaccatggatactttagcatcattctcatactactaggagtgtaggtaaggagtccacacacgagtttgcaaacaccattaagcctattttgcttgattagtgccctgcaacacttcatatgttcaagacaaaatccatacccatgtctattgttgtatgatattatttgcattgaccgttgctgctcttcttgattgcagtcactaacattgcattaatctatgtgatacatttattcaggcgattcccatttctcagtgatgtcgatgtcctgtactcctgtatatttggattcaacaatatgccattagtatgctgtcaagcgtcctatttgcaagagataaatggcttacgcccgaggggcttattcttccttatcatggtatgatataattatcatacaaaaatgttacactgcttttacagggtgtacctcatctatttgcttgtacaattcatcttactactgctttgacaaacattggtctgctctgctttggtctgtgctttaggattctgtttcattgggagaaacaaatgcccttgcttactttcattataactgtgctatttttttgatccaatgttgttctaagatcaagaagtggaatacttgttctaagggtcccaagttgggtggtggtggtgggaagcgttttcaggtcggtcgtgactttggttatccactgaaaagatatgcttggtggtgctttcttgtgttgaagaacaagtatcccacggaaccacaaccgtttgtattatctggtgatttcctacattattagctggcctaactaaaccatgcgctcagaccctaaaccagctgtaagtctgtaacttaaaagcacagtgcactagcggaatggggttccttgctttttggagcgtttccccagtcagatcggcggcagggcaggtcacgtggacggggctccttgttgctggaactaaataccgtggagagtttgaagtgagactaaagaaacttatggaggaaattaagcaaaatgaagacattattctctttattgattaagtgcacacactgattggagcaggtgcagcagaaggtgtaattgatgctgctaatattttgaagccagcattttgtaattttcccaaaataaccacattgctggtgattttatctgtgtagtgcattggtgccacaacactggatgagtataggaagcatatagagaaagatcctgccttggaaagaaggtttcaaccagttaaggttccagagcctactatggatgaaacaatacagatcttaagaggacttcgtgagagatatgaacttcatcacaaactgagatacacagatgatgctttaattgctgctgcacagctgtcttatcagtatatcagcgatcgttttctgcctgacaaagccattgacttgattgatgaagctggatctcgtgttaggctgaggcatgcgcagctccctgatgaagccaaagagctggacaaagagctgcggcagataagcaagcagaaaaatgaggctgtacgtggccaagattttgagaaggtatactgttgtttggcacagcggtgacaaagccgatccgctcccacctctctagcaacgtcgatatggttaataccaagcattatgttgtttccttttgagataaatattttgttactgattttaccttttgtctcctcttcttgttttttgttctagaatctgtagcaaatggctaacgatgaggatatccattactttgtttatgacaataaaactgatatgttcaagattccgtagcaacgcacgggcatctaact

SEQ ID NO: 32442 - DNA, 1745 bp, Zea Mays
cgcatacgcccgcagccgccatcaacgcccgcggacccctcagcctcctccttaccgccgcgatccgccagaccaccgccccccccccgcacccgccgcagatctcgccatggcggcgcgcacgccccccaggtcgcagccccgtcaccttcctcccccaccccgaactccgtccccgccgtagatctcgccatcggtaacacacctctcgttcgcatctgacgcgagcggttgggttctcccgcgcgagcggccggcgggtgcgacagaggggtcttgtgaaggccatcggcaacacacctctcattcgcatcaacagcctctccgacgttacaggatgcgaggttcgcgcgtggactcggcgtcatctccgcgtggtcctcgccccccccccccgagacacccgctcgcaatgttcgggagtccgcgcccgccgtcgagaggagtgctgcatctgccttgcgtagtacggggagaaggaggaggttcggcagctgccgtgcacacacgtgtttcatctcaagtgcatatacaggtggctcaggatcatctcctcttgccctctctgcaagcaagagctcaagtgaactttatattcattacacacatgacattctcgcttattctttggatcaaggtgttagtatcctagacacaacagatattttccagctaacaagggaaatcaaggaagaattgatctttatattagcaggcggatgcaatcactaatcaaaaccacgatgcaaggtaacctaaatggattttaaattttattttggattgttaaatctttatttctgactactattgttttatgtcgtggatgccctcgtgaggttctacgccgacgccttcaggagggattcacagaggccatggtgaggatggccagcttgagtcggctcaccgggagcagcgcgagatccgctacaactaaatgataggaggtttcgctgccatttgcagcgactgtgttccagttcgaccgtttggggaaaaggcaaggaaacaggatctgtcacggaaggcgattcccatttctcagtgatgtcgatgtcctgtactcctgtatatttggattcaacaatatgccattagtgcattggtgccacaacactggatgagtataggaagcatatagagaaagatcctgccttggaaagaaggtttcaaccagttaaggttccagagcctactatggatgaaacaatacagatcttaagaggacttcgtgagagatatgaacttcatcacaaactgagatacacagatgatgctttaattgctgctgcacagctgtcttatcagtatatcagcgatcgttttctgcctgacaaagccattgacttgattgatgaagctggatctcgtgttaggctgaggcatgcgcagctccctgatgaagccaaagagctggacaaagagctgcggcagataagcaagcagaaaaatgaggctgtacgtggccaagattttgagaaggtatactgttgtttggcacagcggtgacaaagccgatccgctcccacctctctagcaacgtcgatatggttaataccaagcattatgttgtttccttttgagataaatattttgttactgattttaccttttgtctcctcttcttgttttttgttctagaatctgtagcaaatggctaacgatgaggatatccattactttgtttatgacaataaaactgatatgttcaagattccgtagcaacgcacgggcatctaact

SEQ ID NO: 32443 - DNA, 2482 bp, Zea Mays
cgcatacgcccgcagccgccatcaacgcccgcggacccctcagcctcctccttaccgccgcgatccgccagaccaccgccccccccccgcacccgccgcagatctcgccatggcggcgcgcacgccccccaggtcgcagccccgtcaccttcctcccccaccccgaactccgtccccgccgtagatctcgccatcggtaacacacctctcgttcgcatctgacgcgagcggttgggttctcccgcgcgagcggccggcgggtgcgacagaggggtcttgtgaaggccatcggcaacacacctctcattcgcatcaacagcctctccgacgttacaggatgcgaggttcgcgcgtggactcggcgtcatctccgcgtggtcctcgccccccccccccgagacacccgctcgcaatgttcgggagtccgcgcccgccgtcgagaggagtgctgcatctgccttgcgtagtacggggagaaggaggaggttcggcagctgccgtgcacacacgtgtttcatctcaagtgcatatacaggtggctcaggatcatctcctcttgccctctctgcaagcaagagctcaagtgaactttatattcattacacacatgacattctcgcttattctttggatcaaggtgttagtatcctagacacaacagatattttccagctaacaagggaaatcaaggaagaattgatctttatattagcaggcggatgcaatcactaatcaaaaccacgatgcaaggttctacgccgacgccttcaggagggattcacagaggccatggtgaggatggccagcttgagtcggctcaccgggagcagcgcgagatccgctacaactaaatgataggaggtattttctagaaattacaaccccacctctgtcaggccttctgttgagtgaatttggtttgcacaccctcaccctgcacgctcttaccggactaccgctcctagcacccactcacacgagattgcaccccgctcgccatgccaccatagatccagctagggcgacatcattgtgggcaatcctgtgcgagagaatgtgaaattgttgtaggattgataatgaccaggggtttctccgcccacatgcaccaggtttcgctgccatttgcagcgactgtgttccagttcgaccgtttggggaaaaggtgagtcctcccatttcatgtagatgcatgggttgataaacatttgggagaaatgtcccctctttaattcgaaaaatagttgtgtatttgttcgacttatctgcggcgatgtacctttgtacgcgtacaaacatctatagacaaaaacaaaatgacacttcatggatgtagcaagagcgggctacgagaaactagcagatcatgcctaaaattcaattagcattagggtcagacaaaatactacattttctggattacaataatgtataggtgcatgaaaaaaacttgattccaatgtgtgacaaagtgtgaagatgaaagtgcactttcacgctgtcataacgcggatttgttttccttgctcatggaatgtgcatttgtgtgtttgcgtctactgtgcggctacaggcaaggaaacaggatctgtcacggaagtgtgttgttctgaaacagtcacaaagagggcctaagaagctgatggaatcctcattcaccgccgctaaggagtttgagcgggatcggagaggagacgcgattcccatttctcagtgatgtcgatgtcctgtactcctgtatatttggattcaacaatatgccattagtatgctgtcaagcgtcctatttgcaagagataaatggcttacgcccgaggggcttattcttccttatcatgtgcattggtgccacaacactggatgagtataggaagcatatagagaaagatcctgccttggaaagaaggtttcaaccagttaaggttccagagcctactatggatgaaacaatacagatcttaagaggacttcgtgagagatatgaacttcatcacaaactgagatacacagatgatgctttaattgctgctgcacagctgtcttatcagtatatcagcgatcgttttctgcctgacaaagccattgacttgattgatgaagctggatctcgtgttaggctgaggcatgcgcagctccctgatgaagccaaagagctggacaaagagctgcggcagataagcaagcagaaaaatgaggctgtacgtggccaagattttgagaaggtatactgttgtttggcacagcggtgacaaagccgatccgctcccacctctctagcaacgtcgatatggttaataccaagcattatgttgtttccttttgagataaatattttgttactgattttaccttttgtctcctcttcttgttttttgttctagaatctgtagcaaatggctaacgatgaggatatccattactttgtttatgacaataaaactgatatgttcaagattccgtagcaacgcacgggcatctaact

SEQ ID NO: 32444 - DNA, 2233 bp, Zea Mays
cgcatacgcccgcagccgccatcaacgcccgcggacccctcagcctcctccttaccgccgcgatccgccagaccaccgccccccccccgcacccgccgcagatctcgccatggcggcgcgcacgccccccaggtcgcagccccgtcaccttcctcccccaccccgaactccgtccccgccgtagatctcgccatcggtaacacacctctcgttcgcatctgacgcgagcggttgggttctcccgcgcgagcggccggcgggtgcgacagaggggtcttgtgaaggccatcggcaacacacctctcattcgcatcaacagcctctccgacgttacaggatgcgaggttcgcgcgtggactcggcgtcatctccgcgtggtcctcgccccccccccccgagacacccgctcgcaatgttcgggagtccgcgcccgccgtcgagaggagtgctgcatctgccttgcgtagtacggggagaaggaggaggttcggcagctgccgtgcacacacgtgtttcatctcaagtgcatatacaggtggctcaggatcatctcctcttgccctctctgcaagcaagagctcaagtgaactttatattcattacacacatgacattctcgcttattctttggatcaaggtgttagtatcctagacacaacagatattttccagctaacaagggaaatcaaggaagaattgatctttatattagcaggcggatgcaatcactaatcaaaaccacgatgcaaggtaacctaaatggattttaaattttattttggattgttaaatctttatttctgactactattgttttatgtcgtggatgccctcgtgaggttctacgccgacgccttcaggagggattcacagaggccatggtgaggatggccagcttgagtcggctcaccgggagcagcgcgagatccgctacaactaaatgataggaggtttcgctgccatttgcagcgactgtgttccagttcgaccgtttggggaaaaggcaaggaaacaggatctgtcacggaaggcgattcccatttctcagtgatgtcgatgtcctgtactcctgtatatttggattcaacaatatgccattagtatgctgtcaagcgtcctatttgcaagagataaatggcttacgcccgaggggcttattcttccttatcatgcgttttcaggtcggtcgtgactttggttatccactgaaaagatatgcttggtggtgctttcttgtgttgaagaacaagtatcccacggaaccacaaccgtttgtattatctggtgatttcctacattattagctggcctaactaaaccatgcgctcagaccctaaaccagctgtaagtctgtaacttaaaagcacagtgcactagcggaatggggttccttgctttttggagcgtttccccagtcagatcggcggcagggcaggtcacgtggacggggctccttgttgctggaactaaataccgtggagagtttgaagtgagactaaagaaacttatggaggaaattaagcaaaatgaagacattattctctttattgattaagtgcacacactgattggagcaggtgcagcagaagtgcattggtgccacaacactggatgagtataggaagcatatagagaaagatcctgccttggaaagaaggtttcaaccagttaaggttccagagcctactatggatgaaacaatacagatcttaagaggacttcgtgagagatatgaacttcatcacaaactgagatacacagatgatgctttaattgctgctgcacagctgtcttatcagtatatcagcgatcgttttctgcctgacaaagccattgacttgattgatgaagctggatctcgtgttaggctgaggcatgcgcagctccctgatgaagccaaagagctggacaaagagctgcggcagataagcaagcagaaaaatgaggctgtacgtggccaagattttgagaaggtatactgttgtttggcacagcggtgacaaagccgatccgctcccacctctctagcaacgtcgatatggttaataccaagcattatgttgtttccttttgagataaatattttgttactgattttaccttttgtctcctcttcttgttttttgttctagaatctgtagcaaatggctaacgatgaggatatccattactttgtttatgacaataaaactgatatgttcaagattccgtagcaacgcacgggcatctaact

SEQ ID NO: 32445 - DNA, 2224 bp, Zea Mays
cgcatacgcccgcagccgccatcaacgcccgcggacccctcagcctcctccttaccgccgcgatccgccagaccaccgccccccccccgcacccgccgcagatctcgccatggcggcgcgcacgccccccaggtcgcagccccgtcaccttcctcccccaccccgaactccgtccccgccgtagatctcgccatcggtaacacacctctcgttcgcatctgacgcgagcggttgggttctcccgcgcgagcggccggcgggtgcgacagaggggtcttgtgaaggccatcggcaacacacctctcattcgcatcaacagcctctccgacgttacaggatgcgaggttcgcgcgtggactcggcgtcatctccgcgtggtcctcgccccccccccccgagacacccgctcgcaatgttcgggagtccgcgcccgccgtcgagaggagtgctgcatctgccttgcgtagtacggggagaaggaggaggttcggcagctgccgtgcacacacgtgtttcatctcaagtgcatatacaggtggctcaggatcatctcctcttgccctctctgcaagcaagagctcaagtgaactttatattcattacacacatgacattctcgcttattctttggatcaaggtgttagtatcctagacacaacagatattttccagctaacaagggaaatcaaggaagaattgatctttatattagcaggcggatgcaatcactaatcaaaaccacgatgcaaggtaacctaaatggattttaaattttattttggattgttaaatctttatttctgactactattgttttatgtcgtggatgccctcgtgaggttctacgccgacgccttcaggagggattcacagaggccatggtgaggatggccagcttgagtcggctcaccgggagcagcgcgagatccgctacaactaaatgataggaggtttcgctgccatttgcagcgactgtgttccagttcgaccgtttggggaaaaggcaaggaaacaggatctgtcacggaaggcgattcccatttctcagtgatgtcgatgtcctgtactcctgtatatttggattcaacaatatgccattagtatgctgtcaagcgtcctatttgcaagagataaatggcttacgcccgaggggcttattcttccttatcatggtcggtcgtgactttggttatccactgaaaagatatgcttggtggtgctttcttgtgttgaagaacaagtatcccacggaaccacaaccgtttgtattatctggtgatttcctacattattagctggcctaactaaaccatgcgctcagaccctaaaccagctgtaagtctgtaacttaaaagcacagtgcactagcggaatggggttccttgctttttggagcgtttccccagtcagatcggcggcagggcaggtcacgtggacggggctccttgttgctggaactaaataccgtggagagtttgaagtgagactaaagaaacttatggaggaaattaagcaaaatgaagacattattctctttattgattaagtgcacacactgattggagcaggtgcagcagaagtgcattggtgccacaacactggatgagtataggaagcatatagagaaagatcctgccttggaaagaaggtttcaaccagttaaggttccagagcctactatggatgaaacaatacagatcttaagaggacttcgtgagagatatgaacttcatcacaaactgagatacacagatgatgctttaattgctgctgcacagctgtcttatcagtatatcagcgatcgttttctgcctgacaaagccattgacttgattgatgaagctggatctcgtgttaggctgaggcatgcgcagctccctgatgaagccaaagagctggacaaagagctgcggcagataagcaagcagaaaaatgaggctgtacgtggccaagattttgagaaggtatactgttgtttggcacagcggtgacaaagccgatccgctcccacctctctagcaacgtcgatatggttaataccaagcattatgttgtttccttttgagataaatattttgttactgattttaccttttgtctcctcttcttgttttttgttctagaatctgtagcaaatggctaacgatgaggatatccattactttgtttatgacaataaaactgatatgttcaagattccgtagcaacgcacgggcatctaact

SEQ ID NO: 32446 - DNA, 2610 bp, Zea Mays
cgcatacgcccgcagccgccatcaacgcccgcggacccctcagcctcctccttaccgccgcgatccgccagaccaccgccccccccccgcacccgccgcagatctcgccatggcggcgcgcacgccccccaggtcgcagccccgtcaccttcctcccccaccccgaactccgtccccgccgtagatctcgccatcggtaacacacctctcgttcgcatctgacgcgagcggttgggttctcccgcgcgagcggccggcgggtgcgacagaggggtcttgtgaaggccatcggcaacacacctctcattcgcatcaacagcctctccgacgttacaggatgcgaggttcgcgcgtggactcggcgtcatctccgcgtggtcctcgccccccccccccgagacacccgctcgcaatgttcgggagtccgcgcccgccgtcgagaggagtgctgcatctgccttgcgtagtacggggagaaggaggaggttcggcagctgccgtgcacacacgtgtttcatctcaagtgcatatacaggtggctcaggatcatctcctcttgccctctctgcaagcaagagctcaagtgaactttatattcattacacacatgacattctcgcttattctttggatcaaggtgttagtatcctagacacaacagatattttccagctaacaagggaaatcaaggaagaattgatctttatattagcaggcggatgcaatcactaatcaaaaccacgatgcaaggtaacctaaatggattttaaattttattttggattgttaaatctttatttctgactactattgttttatgtcgtggatgccctcgtgaggttctacgccgacgccttcaggagggattcacagaggccatggtgaggatggccagcttgagtcggctcaccgggagcagcgcgagatccgctacaactaaatgataggaggtttcgctgccatttgcagcgactgtgttccagttcgaccgtttggggaaaaggtgagtcctcccatttcatgtagatgcatgggttgataaacatttgggagaaatgtcccctctttaattcgaaaaatagttgtgtatttgttcgacttatctgcggcgatgtacctttgtacgcgtacaaacatctatagacaaaaacaaaatgacacttcatggatgtagcaagagcgggctacgagaaactagcagatcatgcctaaaattcaattagcattagggtcagacaaaatactacattttctggattacaataatgtataggtgcatgaaaaaaacttgattccaatgtgtgacaaagtgtgaagatgaaagtgcactttcacgctgtcataacgcggatttgttttccttgctcatggaatgtgcatttgtgtgtttgcgtctactgtgcggctacaggcaaggaaacaggatctgtcacggaagtgtgttgttctgaaacagtcacaaagagggcctaagaagctgatggaatcctcattcaccgccgctaaggagtttgagcgggatcggagaggagacgtcagttcttcctcctctgctcaatgcggccattcgccctgtcccccaaccctgaactccacactgccactccgtgctcattttttctgaaggggaaatattcatctccttgttgttttgtaccatggatactttagcatcattctcatactactaggagtgtaggtaaggagtccacacacgagtttgcaaacaccattaagcctattttgcttgattagtgccctgcaacacttcatatgttcaagacaaaatccatacccatgtctattgttgtatgatattatttgcattgaccgttgctgctcttcttgattgcagtcactaacattgcattaatctatgtgatacatttattcaggcgattcccatttctcagtgatgtcgatgtcctgtactcctgtatatttggattcaacaatatgccattagtgcattggtgccacaacactggatgagtataggaagcatatagagaaagatcctgccttggaaagaaggtttcaaccagttaaggttccagagcctactatggatgaaacaatacagatcttaagaggacttcgtgagagatatgaacttcatcacaaactgagatacacagatgatgctttaattgctgctgcacagctgtcttatcagtatatcagcgatcgttttctgcctgacaaagccattgacttgattgatgaagctggatctcgtgttaggctgaggcatgcgcagctccctgatgaagccaaagagctggacaaagagctgcggcagataagcaagcagaaaaatgaggctgtacgtggccaagattttgagaaggtatactgttgtttggcacagcggtgacaaagccgatccgctcccacctctctagcaacgtcgatatggttaataccaagcattatgttgtttccttttgagataaatattttgttactgattttaccttttgtctcctcttcttgttttttgttctagaatctgtagcaaatggctaacgatgaggatatccattactttgtttatgacaataaaactgatatgttcaagattccgtagcaacgcacgggcatctaact

SEQ ID NO: 32447 - DNA, 2475 bp, Zea Mays
cgcatacgcccgcagccgccatcaacgcccgcggacccctcagcctcctccttaccgccgcgatccgccagaccaccgccccccccccgcacccgccgcagatctcgccatggcggcgcgcacgccccccaggtcgcagccccgtcaccttcctcccccaccccgaactccgtccccgccgtagatctcgccatcggtaacacacctctcgttcgcatctgacgcgagcggttgggttctcccgcgcgagcggccggcgggtgcgacagaggggtcttgtgaaggccatcggcaacacacctctcattcgcatcaacagcctctccgacgttacaggatgcgaggttcgcgcgtggactcggcgtcatctccgcgtggtcctcgccccccccccccgagacacccgctcgcaatgttcgggagtccgcgcccgccgtcgagaggagtgctgcatctgccttgcgtagtacggggagaaggaggaggttcggcagctgccgtgcacacacgtgtttcatctcaagtgcatatacaggtggctcaggatcatctcctcttgccctctctgcaagcaagagctcaagtgaactttatattcattacacacatgacattctcgcttattctttggatcaaggtgttagtatcctagacacaacagatattttccagctaacaagggaaatcaaggaagaattgatctttatattagcaggcggatgcaatcactaatcaaaaccacgatgcaaggtaacctaaatggattttaaattttattttggattgttaaatctttatttctgactactattgttttatgtcgtggatgccctcgtgaggttctacgccgacgccttcaggagggattcacagaggccatggtgaggatggccagcttgagtcggctcaccgggagcagcgcgagatccgctacaactaaatgataggaggtattttctagaaattacaaccccacctctgtcaggccttctgttgagtgaatttggtttgcacaccctcaccctgcacgctcttaccggactaccgctcctagcacccactcacacgagattgcaccccgctcgccatgccaccatagatccagctagggcgacatcattgtgggcaatcctgtgcgagagaatgtgaaattgttgtaggattgataatgaccaggggtttctccgcccacatgcaccaggtttcgctgccatttgcagcgactgtgttccagttcgaccgtttggggaaaaggtgagtcctcccatttcatgtagatgcatgggttgataaacatttgggagaaatgtcccctctttaattcgaaaaatagttgtgtatttgttcgacttatctgcggcgatgtacctttgtacgcgtacaaacatctatagacaaaaacaaaatgacacttcatggatgtagcaagagcgggctacgagaaactagcagatcatgcctaaaattcaattagcattagggtcagacaaaatactacattttctggattacaataatgtataggtgcatgaaaaaaacttgattccaatgtgtgacaaagtgtgaagatgaaagtgcactttcacgctgtcataacgcggatttgttttccttgctcatggaatgtgcatttgtgtgtttgcgtctactgtgcggctacaggcaaggaaacaggatctgtcacggaaggcgattcccatttctcagtgatgtcgatgtcctgtactcctgtatatttggattcaacaatatgccattagtatgctgtcaagcgtcctatttgcaagagataaatggcttacgcccgaggggcttattcttccttatcatgtgcattggtgccacaacactggatgagtataggaagcatatagagaaagatcctgccttggaaagaaggtttcaaccagttaaggttccagagcctactatggatgaaacaatacagatcttaagaggacttcgtgagagatatgaacttcatcacaaactgagatacacagatgatgctttaattgctgctgcacagctgtcttatcagtatatcagcgatcgttttctgcctgacaaagccattgacttgattgatgaagctggatctcgtgttaggctgaggcatgcgcagctccctgatgaagccaaagagctggacaaagagctgcggcagataagcaagcagaaaaatgaggctgtacgtggccaagattttgagaaggtatactgttgtttggcacagcggtgacaaagccgatccgctcccacctctctagcaacgtcgatatggttaataccaagcattatgttgtttccttttgagataaatattttgttactgattttaccttttgtctcctcttcttgttttttgttctagaatctgtagcaaatggctaacgatgaggatatccattactttgtttatgacaataaaactgatatgttcaagattccgtagcaacgcacgggcatctaact

SEQ ID NO: 32448 - DNA, 2727 bp, Zea Mays
cgcatacgcccgcagccgccatcaacgcccgcggacccctcagcctcctccttaccgccgcgatccgccagaccaccgccccccccccgcacccgccgcagatctcgccatggcggcgcgcacgccccccaggtcgcagccccgtcaccttcctcccccaccccgaactccgtccccgccgtagatctcgccatcggtaacacacctctcgttcgcatctgacgcgagcggttgggttctcccgcgcgagcggccggcgggtgcgacagaggggtcttgtgaaggccatcggcaacacacctctcattcgcatcaacagcctctccgacgttacaggatgcgaggttcgcgcgtggactcggcgtcatctccgcgtggtcctcgccccccccccccgagacacccgctcgcaatgttcgggagtccgcgcccgccgtcgagaggagtgctgcatctgccttgcgtagtacggggagaaggaggaggttcggcagctgccgtgcacacacgtgtttcatctcaagtgcatatacaggtggctcaggatcatctcctcttgccctctctgcaagcaagagctcaagtgaactttatattcattacacacatgacattctcgcttattctttggatcaaggtgttagtatcctagacacaacagatattttccagctaacaagggaaatcaaggaagaattgatctttatattagcaggcggatgcaatcactaatcaaaaccacgatgcaaggtaacctaaatggattttaaattttattttggattgttaaatctttatttctgactactattgttttatgtcgtggatgccctcgtgaggttctacgccgacgccttcaggagggattcacagaggccatggtgaggatggccagcttgagtcggctcaccgggagcagcgcgagatccgctacaactaaatgataggaggtattttctagaaattacaaccccacctctgtcaggccttctgttgagtgaatttggtttgcacaccctcaccctgcacgctcttaccggactaccgctcctagcacccactcacacgagattgcaccccgctcgccatgccaccatagatccagctagggcgacatcattgtgggcaatcctgtgcgagagaatgtgaaattgttgtaggattgataatgaccaggggtttctccgcccacatgcaccaggtttcgctgccatttgcagcgactgtgttccagttcgaccgtttggggaaaaggcaaggaaacaggatctgtcacggaagtcacaaagagggcctaagaagctgatggaatcctcattcaccgccgctaaggagtttgagcgggatcggagaggagacgtcagttcttcctcctctgctcaatgcggccattcgccctgtcccccaaccctgaactccacactgccactccgtgctcattttttctgaaggggaaatattcatctccttgttgttttgtaccatggatactttagcatcattctcatactactaggagtgtaggcgattcccatttctcagtgatgtcgatgtcctgtactcctgtatatttggattcaacaatatgccattagtatgctgtcaagcgtcctatttgcaagagataaatggcttacgcccgaggggcttattcttccttatcatgcgttttcaggtcggtcgtgactttggttatccactgaaaagatatgcttggtggtgctttcttgtgttgaagaacaagtatcccacggaaccacaaccgtttgtattatctggtgatttcctacattattagctggcctaactaaaccatgcgctcagaccctaaaccagctgtaagtctgtaacttaaaagcacagtgcactagcggaatggggttccttgctttttggagcgtttccccagtcagatcggcggcagggcaggtcacgtggacggggctccttgttgctggaactaaataccgtggagagtttgaagtgagactaaagaaacttatggaggaaattaagcaaaatgaagacattattctctttattgattaagtgcacacactgattggagcaggtgcagcagaagtgcattggtgccacaacactggatgagtataggaagcatatagagaaagatcctgccttggaaagaaggtttcaaccagttaaggttccagagcctactatggatgaaacaatacagatcttaagaggacttcgtgagagatatgaacttcatcacaaactgagatacacagatgatgctttaattgctgctgcacagctgtcttatcagtatatcagcgatcgttttctgcctgacaaagccattgacttgattgatgaagctggatctcgtgttaggctgaggcatgcgcagctccctgatgaagccaaagagctggacaaagagctgcggcagataagcaagcagaaaaatgaggctgtacgtggccaagattttgagaaggtatactgttgtttggcacagcggtgacaaagccgatccgctcccacctctctagcaacgtcgatatggttaataccaagcattatgttgtttccttttgagataaatattttgttactgattttaccttttgtctcctcttcttgttttttgttctagaatctgtagcaaatggctaacgatgaggatatccattactttgtttatgacaataaaactgatatgttcaagattccgtagcaacgcacgggcatctaact

SEQ ID NO: 32449 - DNA, 2153 bp, Zea Mays
cgcatacgcccgcagccgccatcaacgcccgcggacccctcagcctcctccttaccgccgcgatccgccagaccaccgccccccccccgcacccgccgcagatctcgccatggcggcgcgcacgccccccaggtcgcagccccgtcaccttcctcccccaccccgaactccgtccccgccgtagatctcgccatcggtaacacacctctcgttcgcatctgacgcgagcggttgggttctcccgcgcgagcggccggcgggtgcgacagaggggtcttgtgaaggccatcggcaacacacctctcattcgcatcaacagcctctccgacgttacaggatgcgaggttcgcgcgtggactcggcgtcatctccgcgtggtcctcgccccccccccccgagacacccgctcgcaatgttcgggagtccgcgcccgccgtcgagaggagtgctgcatctgccttgcgtagtacggggagaaggaggaggttcggcagctgccgtgcacacacgtgtttcatctcaagtgcatatacaggtggctcaggatcatctcctcttgccctctctgcaagcaagagctcaagtgaactttatattcattacacacatgacattctcgcttattctttggatcaaggtgttagtatcctagacacaacagatattttccagctaacaagggaaatcaaggaagaattgatctttatattagcaggcggatgcaatcactaatcaaaaccacgatgcaaggtaacctaaatggattttaaattttattttggattgttaaatctttatttctgactactattgttttatgtcgtggatgccctcgtgaggttctacgccgacgccttcaggagggattcacagaggccatggtgaggatggccagcttgagtcggctcaccgggagcagcgcgagatccgctacaactaaatgataggaggtttcgctgccatttgcagcgactgtgttccagttcgaccgtttggggaaaaggcaaggaaacaggatctgtcacggaaggcgattcccatttctcagtgatgtcgatgtcctgtactcctgtatatttggattcaacaatatgccattaggtcggtcgtgactttggttatccactgaaaagatatgcttggtggtgctttcttgtgttgaagaacaagtatcccacggaaccacaaccgtttgtattatctggtgatttcctacattattagctggcctaactaaaccatgcgctcagaccctaaaccagctgtaagtctgtaacttaaaagcacagtgcactagcggaatggggttccttgctttttggagcgtttccccagtcagatcggcggcagggcaggtcacgtggacggggctccttgttgctggaactaaataccgtggagagtttgaagtgagactaaagaaacttatggaggaaattaagcaaaatgaagacattattctctttattgattaagtgcacacactgattggagcaggtgcagcagaagtgcattggtgccacaacactggatgagtataggaagcatatagagaaagatcctgccttggaaagaaggtttcaaccagttaaggttccagagcctactatggatgaaacaatacagatcttaagaggacttcgtgagagatatgaacttcatcacaaactgagatacacagatgatgctttaattgctgctgcacagctgtcttatcagtatatcagcgatcgttttctgcctgacaaagccattgacttgattgatgaagctggatctcgtgttaggctgaggcatgcgcagctccctgatgaagccaaagagctggacaaagagctgcggcagataagcaagcagaaaaatgaggctgtacgtggccaagattttgagaaggtatactgttgtttggcacagcggtgacaaagccgatccgctcccacctctctagcaacgtcgatatggttaataccaagcattatgttgtttccttttgagataaatattttgttactgattttaccttttgtctcctcttcttgttttttgttctagaatctgtagcaaatggctaacgatgaggatatccattactttgtttatgacaataaaactgatatgttcaagattccgtagcaacgcacgggcatctaact

SEQ ID NO: 32450 - DNA, 2156 bp, Zea Mays
cgcatacgcccgcagccgccatcaacgcccgcggacccctcagcctcctccttaccgccgcgatccgccagaccaccgccccccccccgcacccgccgcagatctcgccatggcggcgcgcacgccccccaggtcgcagccccgtcaccttcctcccccaccccgaactccgtccccgccgtagatctcgccatcggtaacacacctctcgttcgcatctgacgcgagcggttgggttctcccgcgcgagcggccggcgggtgcgacagaggggtcttgtgaaggccatcggcaacacacctctcattcgcatcaacagcctctccgacgttacaggatgcgaggttcgcgcgtggactcggcgtcatctccgcgtggtcctcgccccccccccccgagacacccgctcgcaatgttcgggagtccgcgcccgccgtcgagaggagtgctgcatctgccttgcgtagtacggggagaaggaggaggttcggcagctgccgtgcacacacgtgtttcatctcaagtgcatatacaggtggctcaggatcatctcctcttgccctctctgcaagcaagagctcaagtgaactttatattcattacacacatgacattctcgcttattctttggatcaaggtgttagtatcctagacacaacagatattttccagctaacaagggaaatcaaggaagaattgatctttatattagcaggcggatgcaatcactaatcaaaaccacgatgcaaggtaacctaaatggattttaaattttattttggattgttaaatctttatttctgactactattgttttatgtcgtggatgccctcgtgaggttctacgccgacgccttcaggagggattcacagaggccatggtgaggatggccagcttgagtcggctcaccgggagcagcgcgagatccgctacaactaaatgataggagtgtgttgttctgaaacagtcacaaagagggcctaagaagctgatggaatcctcattcaccgccgctaaggagtttgagcgggatcggagaggagacgcgattcccatttctcagtgatgtcgatgtcctgtactcctgtatatttggattcaacaatatgccattagtatgctgtcaagcgtcctatttgcaagagataaatggcttacgcccgaggggcttattcttccttatcatgcgttttcaggtcggtcgtgactttggttatccactgaaaagatatgcttggtggtgctttcttgtgttgaagaacaaaccctaaaccagctgtaagtctgtaacttaaaagcacagtgcactagcggaatggggttccttgctttttggagcgtttccccagtcagatcggcggcagggcaggtcacgtggacggggctccttgttgctggaactaaataccgtggagagtttgaagtgagactaaagaaacttatggaggaaattaagcaaaatgaagacattattctctttattgattaagtgcacacactgattggagcagtgcattggtgccacaacactggatgagtataggaagcatatagagaaagatcctgccttggaaagaaggtttcaaccagttaaggttccagagcctactatggatgaaacaatacagatcttaagaggacttcgtgagagatatgaacttcatcacaaactgagatacacagatgatgctttaattgctgctgcacagctgtcttatcagtatatcagcgatcgttttctgcctgacaaagccattgacttgattgatgaagctggatctcgtgttaggctgaggcatgcgcagctccctgatgaagccaaagagctggacaaagagctgcggcagataagcaagcagaaaaatgaggctgtacgtggccaagattttgagaaggtatactgttgtttggcacagcggtgacaaagccgatccgctcccacctctctagcaacgtcgatatggttaataccaagcattatgttgtttccttttgagataaatattttgttactgattttaccttttgtctcctcttcttgttttttgttctagaatctgtagcaaatggctaacgatgaggatatccattactttgtttatgacaataaaactgatatgttcaagattccgtagcaacgcacgggcatctaact

SEQ ID NO: 32451 - DNA, 2070 bp, Zea Mays
cgcatacgcccgcagccgccatcaacgcccgcggacccctcagcctcctccttaccgccgcgatccgccagaccaccgccccccccccgcacccgccgcagatctcgccatggcggcgcgcacgccccccaggtcgcagccccgtcaccttcctcccccaccccgaactccgtccccgccgtagatctcgccatcggtaacacacctctcgttcgcatctgacgcgagcggttgggttctcccgcgcgagcggccggcgggtgcgacagaggggtcttgtgaaggccatcggcaacacacctctcattcgcatcaacagcctctccgacgttacaggatgcgaggttcgcgcgtggactcggcgtcatctccgcgtggtcctcgccccccccccccgagacacccgctcgcaatgttcgggagtccgcgcccgccgtcgagaggagtgctgcatctgccttgcgtagtacggggagaaggaggaggttcggcagctgccgtgcacacacgtgtttcatctcaagtgcatatacaggtggctcaggatcatctcctcttgccctctctgcaagcaagagctcaagtgaactttatattcattacacacatgacattctcgcttattctttggatcaaggtgttagtatcctagacacaacagatattttccagctaacaagggaaatcaaggaagaattgatctttatattagcaggcggatgcaatcactaatcaaaaccacgatgcaaggttctacgccgacgccttcaggagggattcacagaggccatggtgaggatggccagcttgagtcggctcaccgggagcagcgcgagatccgctacaactaaatgataggaggcaaggaaacaggatctgtcacggaaggcgattcccatttctcagtgatgtcgatgtcctgtactcctgtatatttggattcaacaatatgccattagtatgctgtcaagcgtcctatttgcaagagataaatggcttacgcccgaggggcttattcttccttatcatggtcggtcgtgactttggttatccactgaaaagatatgcttggtggtgctttcttgtgttgaagaacaagtatcccacggaaccacaaccgtttgtattatctggtgatttcctacattattagctggcctaactaaaccatgcgctcagaccctaaaccagctgtaagtctgtaacttaaaagcacagtgcactagcggaatggggttccttgctttttggagcgtttccccagtcagatcggcggcagggcaggtcacgtggacggggctccttgttgctggaactaaataccgtggagagtttgaagtgagactaaagaaacttatggaggaaattaagcaaaatgaagacattattctctttattgattaagtgcacacactgattggagcagtgcattggtgccacaacactggatgagtataggaagcatatagagaaagatcctgccttggaaagaaggtttcaaccagttaaggttccagagcctactatggatgaaacaatacagatcttaagaggacttcgtgagagatatgaacttcatcacaaactgagatacacagatgatgctttaattgctgctgcacagctgtcttatcagtatatcagcgatcgttttctgcctgacaaagccattgacttgattgatgaagctggatctcgtgttaggctgaggcatgcgcagctccctgatgaagccaaagagctggacaaagagctgcggcagataagcaagcagaaaaatgaggctgtacgtggccaagattttgagaaggtatactgttgtttggcacagcggtgacaaagccgatccgctcccacctctctagcaacgtcgatatggttaataccaagcattatgttgtttccttttgagataaatattttgttactgattttaccttttgtctcctcttcttgttttttgttctagaatctgtagcaaatggctaacgatgaggatatccattactttgtttatgacaataaaactgatatgttcaagattccgtagcaacgcacgggcatctaact

SEQ ID NO: 32452 - DNA, 2155 bp, Zea Mays
cgcatacgcccgcagccgccatcaacgcccgcggacccctcagcctcctccttaccgccgcgatccgccagaccaccgccccccccccgcacccgccgcagatctcgccatggcggcgcgcacgccccccaggtcgcagccccgtcaccttcctcccccaccccgaactccgtccccgccgtagatctcgccatcggtaacacacctctcgttcgcatctgacgcgagcggttgggttctcccgcgcgagcggccggcgggtgcgacagaggggtcttgtgaaggccatcggcaacacacctctcattcgcatcaacagcctctccgacgttacaggatgcgaggttcgcgcgtggactcggcgtcatctccgcgtggtcctcgccccccccccccgagacacccgctcgcaatgttcgggagtccgcgcccgccgtcgagaggagtgctgcatctgccttgcgtagtacggggagaaggaggaggttcggcagctgccgtgcacacacgtgtttcatctcaagtgcatatacaggtgttagtatcctagacacaacagatattttccagctaacaagggaaatcaaggaagaattgatctttatattagcaggcggatgcaatcactaatcaaaaccacgatgcaaggtaacctaaatggattttaaattttattttggattgttaaatctttatttctgactactattgttttatgtcgtggatgccctcgtgaggttctacgccgacgccttcaggagggattcacagaggccatggtgaggatggccagcttgagtcggctcaccgggagcagcgcgagatccgctacaactaaatgataggaggtattttctagaaattacaaccccacctctgtcaggccttctgttgagtgaatttggtttgcacaccctcaccctgcacgctcttaccggactaccgctcctagcacccactcacacgagattgcaccccgctcgccatgccaccatagatccagctagggcgacatcattgtgggcaatcctgtgcgagagaatgtgaaattgttgtaggattgataatgaccaggggtttctccgcccacatgcaccaggtttcgctgccatttgcagcgactgtgttccagttcgaccgtttggggaaaaggcaaggaaacaggatctgtcacggaagtgtgttgttctgaaacagtcacaaagagggcctaagaagctgatggaatcctcattcaccgccgctaaggagtttgagcgggatcggagaggagacgtcagttcttcctcctctgctcaatgcggccattcgccctgtcccccaaccctgaactccacactgccactccgtgctcattttttctgaaggggaaatattcatctccttgttgttttgtaccatggatactttagcatcattctcatactactaggagtgtaggcgattcccatttctcagtgatgtcgatgtcctgtactcctgtatatttggattcaacaatatgccattagtgcattggtgccacaacactggatgagtataggaagcatatagagaaagatcctgccttggaaagaaggtttcaaccagttaaggttccagagcctactatggatgaaacaatacagatcttaagaggacttcgtgagagatatgaacttcatcacaaactgagatacacagatgatgctttaattgctgctgcacagctgtcttatcagtatatcagcgatcgttttctgcctgacaaagccattgacttgattgatgaagctggatctcgtgttaggctgaggcatgcgcagctccctgatgaagccaaagagctggacaaagagctgcggcagataagcaagcagaaaaatgaggctgtacgtggccaagattttgagaaggtatactgttgtttggcacagcggtgacaaagccgatccgctcccacctctctagcaacgtcgatatggttaataccaagcattatgttgtttccttttgagataaatattttgttactgattttaccttttgtctcctcttcttgttttttgttctagaatctgtagcaaatggctaacgatgaggatatccattactttgtttatgacaataaaactgatatgttcaagattccgtagcaacgcacgggcatctaact

SEQ ID NO: 32453 - DNA, 2145 bp, Zea Mays
cccccccccgcacccgccgcagatctcgccatggcggcgcgcacgccccccaggtcgcagccccgtcaccttcctcccccaccccgaactccgtccccgccgtagatctcgccatcggtaacacacctctcgttcgcatctgacgcgagcggttgggttctcccgcgcgagcggccggcgggtgcgacagaggggtcttgtgaaggccatcggcaacacacctctcattcgcatcaacagcctctccgacgttacaggatgcgaggttcgcgcgtggactcggcgtcatctccgcgtggtcctcgccccccccccccgagacacccgctcgcaatgttcgggagtccgcgcccgccgtcgagaggagtgctgcatctgccttgcgtagtacggggagaaggaggaggttcggcagctgccgtgcacacacgtgtttcatctcaagtgcatatacaggtggctcaggatcatctcctcttgccctctctgcaagcaagagctcaagtgaactttatattcattacacacatgacattctcgcttattctttggatcaaggtgttagtatcctagacacaacagatattttccagctaacaagggaaatcaaggaagaattgatctttatattagcaggcggatgcaatcactaatcaaaaccacgatgcaaggtaacctaaatggattttaaattttattttggattgttaaatctttatttctgactactattgttttatgtcgtggatgccctcgtgaggttctacgccgacgccttcaggagggattcacagaggccatggtgaggatggccagcttgagtcggctcaccgggagcagcgcgagatccgctacaactaaatgataggaggtttcgctgccatttgcagcgactgtgttccagttcgaccgtttggggaaaaggtgagtcctcccatttcatgtagatgcatgggttgataaacatttgggagaaatgtcccctctttaattcgaaaaatagttgtgtatttgttcgacttatctgcggcgatgtacctttgtacgcgtacaaacatctatagacaaaaacaaaatgacacttcatggatgtagcaagagcgggctacgagaaactagcagatcatgcctaaaattcaattagcattagggtcagacaaaatactacattttctggattacaataatgtataggtgcatgaaaaaaacttgattccaatgtgtgacaaagtgtgaagatgaaagtgcactttcacgctgtcataacgcggatttgttttccttgctcatggaatgtgcatttgtgtgtttgcgtctactgtgcggctacaggcaaggaaacaggatctgtcacggaaggcgattcccatttctcagtgatgtcgatgtcctgtactcctgtatatttggattcaacaatatgccattagtatgctgtcaagcgtcctatttgcaagagataaatggcttacgcccgaggggcttattcttccttatcatgtgcattggtgccacaacactggatgagtataggaagcatatagagaaagatcctgccttggaaagaaggtttcaaccagttaaggttccagagcctactatggatgaaacaatacagatcttaagaggacttcgtgagagatatgaacttcatcacaaactgagatacacagatgatgctttaattgctgctgcacagctgtcttatcagtatatcagcgatcgttttctgcctgacaaagccattgacttgattgatgaagctggatctcgtgttaggctgaggcatgcgcagctccctgatgaagccaaagagctggacaaagagctgcggcagataagcaagcagaaaaatgaggctgtacgtggccaagattttgagaaggtatactgttgtttggcacagcggtgacaaagccgatccgctcccacctctctagcaacgtcgatatggttaataccaagcattatgttgtttccttttgagataaatattttgttactgattttaccttttgtctcctcttcttgttttttgttctagaatctgtagcaaatggctaacgatgaggatatccattactttgtttatgacaataaaactgatatgttcaagattccgtagcaacgcacgggcatctaact

SEQ ID NO: 32454 - DNA, 2229 bp, Zea Mays
cccccccccgcacccgccgcagatctcgccatggcggcgcgcacgccccccaggtcgcagccccgtcaccttcctcccccaccccgaactccgtccccgccgtagatctcgccatcggtaacacacctctcgttcgcatctgacgcgagcggttgggttctcccgcgcgagcggccggcgggtgcgacagaggggtcttgtgaaggccatcggcaacacacctctcattcgcatcaacagcctctccgacgttacaggatgcgaggttcgcgcgtggactcggcgtcatctccgcgtggtcctcgccccccccccccgagacacccgctcgcaatgttcgggagtccgcgcccgccgtcgagaggagtgctgcatctgccttgcgtagtacggggagaaggaggaggttcggcagctgccgtgcacacacgtgtttcatctcaagtgcatatacagctaacaagggaaatcaaggaagaattgatctttatattagcaggcggatgcaatcactaatcaaaaccacgatgcaaggtaacctaaatggattttaaattttattttggattgttaaatctttatttctgactactattgttttatgtcgtggatgccctcgtgaggttctacgccgacgccttcaggagggattcacagaggccatggtgaggatggccagcttgagtcggctcaccgggagcagcgcgagatccgctacaactaaatgataggaggtattttctagaaattacaaccccacctctgtcaggccttctgttgagtgaatttggtttgcacaccctcaccctgcacgctcttaccggactaccgctcctagcacccactcacacgagattgcaccccgctcgccatgccaccatagatccagctagggcgacatcattgtgggcaatcctgtgcgagagaatgtgaaattgttgtaggattgataatgaccaggggtttctccgcccacatgcaccaggtttcgctgccatttgcagcgactgtgttccagttcgaccgtttggggaaaaggcgattcccatttctcagtgatgtcgatgtcctgtactcctgtatatttggattcaacaatatgccattagtatgctgtcaagcgtcctatttgcaagagataaatggcttacgcccgaggggcttattcttccttatcatgcgttttcaggtcggtcgtgactttggttatccactgaaaagatatgcttggtggtgctttcttgtgttgaagaacaagtatcccacggaaccacaaccgtttgtattatctggtgatttcctacattattagctggcctaactaaaccatgcgctcagaccctaaaccagctgtaagtctgtaacttaaaagcacagtgcactagcggaatggggttccttgctttttggagcgtttccccagtcagatcggcggcagggcaggtcacgtggacggggctccttgttgctggaactaaataccgtggagagtttgaagtgagactaaagaaacttatggaggaaattaagcaaaatgaagacattattctctttattgattaagtgcacacactgattggagcagtgcattggtgccacaacactggatgagtataggaagcatatagagaaagatcctgccttggaaagaaggtttcaaccagttaaggttccagagcctactatggatgaaacaatacagatcttaagaggacttcgtgagagatatgaacttcatcacaaactgagatacacagatgatgctttaattgctgctgcacagctgtcttatcagtatatcagcgatcgttttctgcctgacaaagccattgacttgattgatgaagctggatctcgtgttaggctgaggcatgcgcagctccctgatgaagccaaagagctggacaaagagctgcggcagataagcaagcagaaaaatgaggctgtacgtggccaagattttgagaaggtatactgttgtttggcacagcggtgacaaagccgatccgctcccacctctctagcaacgtcgatatggttaataccaagcattatgttgtttccttttgagataaatattttgttactgattttaccttttgtctcctcttcttgttttttgttctagaatctgtagcaaatggctaacgatgaggatatccattactttgtttatgacaataaaactgatatgttcaagattccgtagcaacgcacgggcatctaact

SEQ ID NO: 32455 - DNA, 3125 bp, Zea Mays
gtcgtatctgatgaacaaggcgcgagcgttcctggagctcttcttcgcgatgtggttcgtgatgggcaacgtgtgggtgttcgacgcccggctggggtcgttccagcgtgcgccgaggctgtacgcgctctgcgtcagcctgctggcctggaacaccgtcgtctactcgctcacgttcctgagtgctgcatctgccttgcgtagtacggggagaaggaggaggttcggcagctgccgtgcacacacgtgtttcatctcaagtgcatatacaggtggctcaggatcatctcctcttgccctctctgcaagcaagagctcaagtgaactttatattcattacacacatgacattctcgcttattctttggatcaaggtgttagtatcctagacacaacagatattttccagctaacaagggaaatcaaggaagaattgatctttatattagcaggcggatgcaatcactaatcaaaaccacgatgcaaggtaacctaaatggattttaaattttattttggattgttaaatctttatttctgactactattgttttatgtcgtggatgccctcgtgaggttctacgccgacgccttcaggagggattcacagaggccatggtgaggatggccagcttgagtcggctcaccgggagcagcgcgagatccgctacaactaaatgataggaggtttcgctgccatttgcagcgactgtgttccagttcgaccgtttggggaaaaggcaaggaaacaggatctgtcacggaaggtatgtacacattacagtaaacgttgttcgtagaacatgcactttgtggagtggtctttgaatgagatgcgtttagaattaccttttcatgcagatctcttgttcagaacctggttgcttagtccattcttgttttgggttgctactacaaaaaagcggcaatgctttatatgaatcgcctcttactaatatccagggtcaaatggtggtccttcagtgaccagactaatatttgagcattaatcttatttgtttcacagtcatttcttgtttatcaatatgaatgctatttttttgcgagtggacttgttaactaataagctcatagatatttgaacaaaaaatagtgttttgttctaaaactgtcataaagagtgcatacatcatagctatggtttcaactgtgatttgatgtcctataatattgagtgtcctatagtgtgttgttctgaaacagtcacaaagagggcctaagaagctgatggaatcctcattcaccgccgctaaggagtttgagcgggatcggagaggagacgtcagttcttcctcctctgctcaatgcggccattcgccctgtcccccaaccctgaactccacactgccactccgtgctcattttttctgaaggggaaatattcatctccttgttgttttgtaccatggatactttagcatcattctcatactactaggagtgtaggtaaggagtccacacacgagtttgcaaacaccattaagcctattttgcttgattagtgccctgcaacacttcatatgttcaagacaaaatccatacccatgtctattgttgtatgatattatttgcattgaccgttgctgctcttcttgattgcagtcactaacattgcattaatctatgtgatacatttattcaggcgattcccatttctcagtgatgtcgatgtcctgtactcctgtatatttggattcaacaatatgccattagtatgctgtcaagcgtcctatttgcaagagataaatggcttacgcccgaggggcttattcttccttatcatggtatgatataattatcatacaaaaatgttacactgcttttacagggtgtacctcatctatttgcttgtacaattcatcttactactgctttgacaaacattggtctgctctgctttggtctgtgctttaggattctgtttcattgggagaaacaaatgcccttgcttactttcattataactgtgctatttttttgatccaatgttgttctaagatcaagaagtggaatacttgttctaagggtcccaagttgggtggtggtggtgggaagcgttttcaggtcggtcgtgactttggttatccactgaaaagatatgcttggtggtgctttcttgtgttgaagaacaagtatcccacggaaccacaaccgtttgtattatctggtgatttcctacattattagctggcctaactaaaccatgcgctcagaccctaaaccagctgtaagtctgtaacttaaaagcacagtgcactagcggaatggggttccttgctttttggagcgtttccccagtcagatcggcggcagggcaggtcacgtggacggggctccttgttgctggaactaaataccgtggagagtttgaagtgagactaaagaaacttatggaggaaattaagcaaaatgaagacattattctctttattgattaagtgcacacactgattggagcagtgcattggtgccacaacactggatgagtataggaagcatatagagaaagatcctgccttggaaagaaggtttcaaccagttaaggttccagagcctactatggatgaaacaatacagatcttaagaggacttcgtgagagatatgaacttcatcacaaactgagatacacagatgatgctttaattgctgctgcacagctgtcttatcagtatatcagcgatcgttttctgcctgacaaagccattgacttgattgatgaagctggatctcgtgttaggctgaggcatgcgcagctccctgatgaagccaaagagctggacaaagagctgcggcagataagcaagcagaaaaatgaggctgtacgtggccaagattttgagaaggtatactgttgtttggcacagcggtgacaaagccgatccgctcccacctctctagcaacgtcgatatggttaataccaagcattatgttgtttccttttgagataaatattttgttactgattttaccttttgtctcctcttcttgttttttgttctagaatctgtagcaaatggctaacgatgaggatatccattactttgtttatgacaataaaactgatatgttcaagattccgtagcaacgcacgggcatctaact

SEQ ID NO: 32456 - DNA, 1409 bp, Zea Mays
ggcaacgtgtgggtgttcgacgcccggctggggtcgttccagcgtgcgccgaggctgtacgcgctctgcgtcagcctgctggcctggaacaccgtcgtctactcgctcacgttcctgagtgctgcatctgccttgcgtagtacggggagaaggaggaggttcggcagctgccgtgcacacacgtgtttcatctcaagtgcatatacaggtggctcaggatcatctcctcttgccctctctgcaagcaagagctcaagtgaactttatattcattacacacatgacattctcgcttattctttggatcaaggtgttagtatcctagacacaacagatattttccagctaacaagggaaatcaaggaagaattgatctttatattagcaggcggatgcaatcactaatcaaaaccacgatgcaaggtaacctaaatggattttaaattttattttggattgttaaatctttatttctgactactattgttttatgtcgtggatgccctcgtgaggttctacgccgacgccttcaggagggattcacagaggccatggtgaggatggccagcttgagtcggctcaccgggagcagcgcgagatccgctacaactaaatgataggaggcgattcccatttctcagtgatgtcgatgtcctgtactcctgtatatttggattcaacaatatgccattagtatgctgtcaagcgtcctatttgcaagagataaatggcttacgcccgaggggcttattcttccttatcatgtgcattggtgccacaacactggatgagtataggaagcatatagagaaagatcctgccttggaaagaaggtttcaaccagttaaggttccagagcctactatggatgaaacaatacagatcttaagaggacttcgtgagagatatgaacttcatcacaaactgagatacacagatgatgctttaattgctgctgcacagctgtcttatcagtatatcagcgatcgttttctgcctgacaaagccattgacttgattgatgaagctggatctcgtgttaggctgaggcatgcgcagctccctgatgaagccaaagagctggacaaagagctgcggcagataagcaagcagaaaaatgaggctgtacgtggccaagattttgagaaggtatactgttgtttggcacagcggtgacaaagccgatccgctcccacctctctagcaacgtcgatatggttaataccaagcattatgttgtttccttttgagataaatattttgttactgattttaccttttgtctcctcttcttgttttttgttctagaatctgtagcaaatggctaacgatgaggatatccattactttgtttatgacaataaaactgatatgttcaagattccgtagcaacgcacgggcatctaact

SEQ ID NO: 32457 - DNA, 3265 bp, Zea Mays
caacgtgtgggtgttcgacgcccggctggggtcgttccagcgtgcgccgaggctgtacgcgctctgcgtcagcctgctggcctggaacaccgtcgtctactcgctcacgttcctgagtgctgcatctgccttgcgtagtacggggagaaggaggaggttcggcagctgccgtgcacacacgtgtttcatctcaagtgcatatacaggtggctcaggatcatctcctcttgccctctctgcaagcaagagctcaagtgaactttatattcattacacacatgacattctcgcttattctttggatcaaggtgttagtatcctagacacaacagatattttccagctaacaagggaaatcaaggaagaattgatctttatattagcaggcggatgcaatcactaatcaaaaccacgatgcaaggtaacctaaatggattttaaattttattttggattgttaaatctttatttctgactactattgttttatgtcgtggatgccctcgtgaggttctacgccgacgccttcaggagggattcacagaggccatggtgaggatggccagcttgagtcggctcaccgggagcagcgcgagatccgctacaactaaatgataggaggtttcgctgccatttgcagcgactgtgttccagttcgaccgtttggggaaaaggtgagtcctcccatttcatgtagatgcatgggttgataaacatttgggagaaatgtcccctctttaattcgaaaaatagttgtgtatttgttcgacttatctgcggcgatgtacctttgtacgcgtacaaacatctatagacaaaaacaaaatgacacttcatggatgtagcaagagcgggctacgagaaactagcagatcatgcctaaaattcaattagcattagggtcagacaaaatactacattttctggattacaataatgtataggtgcatgaaaaaaacttgattccaatgtgtgacaaagtgtgaagatgaaagtgcactttcacgctgtcataacgcggatttgttttccttgctcatggaatgtgcatttgtgtgtttgcgtctactgtgcggctacaggcaaggaaacaggatctgtcacggaaggtatgtacacattacagtaaacgttgttcgtagaacatgcactttgtggagtggtctttgaatgagatgcgtttagaattaccttttcatgcagatctcttgttcagaacctggttgcttagtccattcttgttttgggttgctactacaaaaaagcggcaatgctttatatgaatcgcctcttactaatatccagggtcaaatggtggtccttcagtgaccagactaatatttgagcattaatcttatttgtttcacagtcatttcttgtttatcaatatgaatgctatttttttgcgagtggacttgttaactaataagctcatagatatttgaacaaaaaatagtgttttgttctaaaactgtcataaagagtgcatacatcatagctatggtttcaactgtgatttgatgtcctataatattgagtgtcctatagtgtgttgttctgaaacagtcacaaagagggcctaagaagctgatggaatcctcattcaccgccgctaaggagtttgagcgggatcggagaggagacgtcagttcttcctcctctgctcaatgcggccattcgccctgtcccccaaccctgaactccacactgccactccgtgctcattttttctgaaggggaaatattcatctccttgttgttttgtaccatggatactttagcatcattctcatactactaggagtgtaggtaaggagtccacacacgagtttgcaaacaccattaagcctattttgcttgattagtgccctgcaacacttcatatgttcaagacaaaatccatacccatgtctattgttgtatgatattatttgcattgaccgttgctgctcttcttgattgcagtcactaacattgcattaatctatgtgatacatttattcaggcgattcccatttctcagtgatgtcgatgtcctgtactcctgtatatttggattcaacaatatgccattagtatgctgtcaagcgtcctatttgcaagagataaatggcttacgcccgaggggcttattcttccttatcatgatcaagaagtggaatacttgttctaagggtcccaagttgggtggtggtggtgggaagcgttttcaggtcggtcgtgactttggttatccactgaaaagatatgcttggtggtgctttcttgtgttgaagaacaagtatcccacggaaccacaaccgtttgtattatctggtgatttcctacattattagctggcctaactaaaccatgcgctcagaccctaaaccagctgtaagtctgtaacttaaaagcacagtgcactagcggaatggggttccttgctttttggagcgtttccccagtcagatcggcggcagggcaggtcacgtggacggggctccttgttgctggaactaaataccgtggagagtttgaagtgagactaaagaaacttatggaggaaattaagcaaaatgaagacattattctctttattgattaagtgcacacactgattggagcaggtgcagcagaagtgcattggtgccacaacactggatgagtataggaagcatatagagaaagatcctgccttggaaagaaggtttcaaccagttaaggttccagagcctactatggatgaaacaatacagatcttaagaggacttcgtgagagatatgaacttcatcacaaactgagatacacagatgatgctttaattgctgctgcacagctgtcttatcagtatatcagcgatcgttttctgcctgacaaagccattgacttgattgatgaagctggatctcgtgttaggctgaggcatgcgcagctccctgatgaagccaaagagctggacaaagagctgcggcagataagcaagcagaaaaatgaggctgtacgtggccaagattttgagaaggtatactgttgtttggcacagcggtgacaaagccgatccgctcccacctctctagcaacgtcgatatggttaataccaagcattatgttgtttccttttgagataaatattttgttactgattttaccttttgtctcctcttcttgttttttgttctagaatctgtagcaaatggctaacgatgaggatatccattactttgtttatgacaataaaactgatatgttcaagattccgtagcaacgcacgggcatctaact

SEQ ID NO: 32458 - DNA, 1744 bp, Zea Mays
caacgtgtgggtgttcgacgcccggctggggtcgttccagcgtgcgccgaggctgtacgcgctctgcgtcagcctgctggcctggaacaccgtcgtctactcgctcacgttcctgagtgctgcatctgccttgcgtagtacggggagaaggaggaggttcggcagctgccgtgcacacacgtgtttcatctcaagtgcatatacaggtggctcaggatcatctcctcttgccctctctgcaagcaagagctcaagtgaactttatattcattacacacatgacattctcgcttattctttggatcaaggtgttagtatcctagacacaacagatattttccagctaacaagggaaatcaaggaagaattgatctttatattagcaggcggatgcaatcactaatcaaaaccacgatgcaaggtaacctaaatggattttaaattttattttggattgttaaatctttatttctgactactattgttttatgtcgtggatgccctcgtgaggttctacgccgacgccttcaggagggattcacagaggccatggtgaggatggccagcttgagtcggctcaccgggagcagcgcgagatccgctacaactaaatgataggaggcgattcccatttctcagtgatgtcgatgtcctgtactcctgtatatttggattcaacaatatgccattaggtcggtcgtgactttggttatccactgaaaagatatgcttggtggtgctttcttgtgttgaagaacaagtatcccacggaaccacaaccgtttgtattatctggtgatttcctacattattagctggcctaactaaaccatgcgctcagaccctaaaccagctgtaagtctgtaacttaaaagcacagtgcactagcggaatggggttccttgctttttggagcgtttccccagtcagatcggcggcagggcaggtcacgtggacggggctccttgttgctggaactaaataccgtggagagtttgaagtgagactaaagaaacttatggaggaaattaagcaaaatgaagacattattctctttattgattaagtgcacacactgattggagcaggtgcagcagaagtgcattggtgccacaacactggatgagtataggaagcatatagagaaagatcctgccttggaaagaaggtttcaaccagttaaggttccagagcctactatggatgaaacaatacagatcttaagaggacttcgtgagagatatgaacttcatcacaaactgagatacacagatgatgctttaattgctgctgcacagctgtcttatcagtatatcagcgatcgttttctgcctgacaaagccattgacttgattgatgaagctggatctcgtgttaggctgaggcatgcgcagctccctgatgaagccaaagagctggacaaagagctgcggcagataagcaagcagaaaaatgaggctgtacgtggccaagattttgagaaggtatactgttgtttggcacagcggtgacaaagccgatccgctcccacctctctagcaacgtcgatatggttaataccaagcattatgttgtttccttttgagataaatattttgttactgattttaccttttgtctcctcttcttgttttttgttctagaatctgtagcaaatggctaacgatgaggatatccattactttgtttatgacaataaaactgatatgttcaagattccgtagcaacgcacgggcatctaact

SEQ ID NO: 32459 - DNA, 1990 bp, Zea Mays
aacgtgtgggtgttcgacgcccggctggggtcgttccagcgtgcgccgaggctgtacgcgctctgcgtcagcctgctggcctggaacaccgtcgtctactcgctcacgttcctgagtgctgcatctgccttgcgtagtacggggagaaggaggaggttcggcagctgccgtgcacacacgtgtttcatctcaagtgcatatacagttccagctaacaagggaaatcaaggaagaattgatctttatattagcaggcggatgcaatcactaatcaaaaccacgatgcaaggtaacctaaatggattttaaattttattttggattgttaaatctttatttctgactactattgttttatgtcgtggatgccctcgtgaggttctacgccgacgccttcaggagggattcacagaggccatggtgaggatggccagcttgagtcggctcaccgggagcagcgcgagatccgctacaactaaatgataggaggcaaggaaacaggatctgtcacggaaggcgattcccatttctcagtgatgtcgatgtcctgtactcctgtatatttggattcaacaatatgccattagtatgctgtcaagcgtcctatttgcaagagataaatggcttacgcccgaggggcttattcttccttatcatggtatgatataattatcatacaaaaatgttacactgcttttacagggtgtacctcatctatttgcttgtacaattcatcttactactgctttgacaaacattggtctgctctgctttggtctgtgctttaggattctgtttcattgggagaaacaaatgcccttgcttactttcattataactgtgctatttttttgatccaatgttgttctaagatcaagaagtggaatacttgttctaagggtcccaagttgggtggtggtggtgggaagcgttttcaggtcggtcgtgactttggttatccactgaaaagatatgcttggtggtgctttcttgtgttgaagaacaagtatcccacggaaccacaaccgtttgtattatctggtgatttcctacattattagctggcctaactaaaccatgcgctcagaccctaaaccagctgtaagtctgtaacttaaaagcacagtgcactagcggaatggggttccttgctttttggagcgtttccccagtcagatcggcggcagggcaggtcacgtggacggggctccttgttgctggaactaaataccgtggagagtttgaagtgagactaaagaaacttatggaggaaattaagcaaaatgaagacattattctctttattgattaagtgcacacactgattggagcaggtgcagcagaagtgcattggtgccacaacactggatgagtataggaagcatatagagaaagatcctgccttggaaagaaggtttcaaccagttaaggttccagagcctactatggatgaaacaatacagatcttaagaggacttcgtgagagatatgaacttcatcacaaactgagatacacagatgatgctttaattgctgctgcacagctgtcttatcagtatatcagcgatcgttttctgcctgacaaagccattgacttgattgatgaagctggatctcgtgttaggctgaggcatgcgcagctccctgatgaagccaaagagctggacaaagagctgcggcagataagcaagcagaaaaatgaggctgtacgtggccaagattttgagaaggtatactgttgtttggcacagcggtgacaaagccgatccgctcccacctctctagcaacgtcgatatggttaataccaagcattatgttgtttccttttgagataaatattttgttactgattttaccttttgtctcctcttcttgttttttgttctagaatctgtagcaaatggctaacgatgaggatatccattactttgtttatgacaataaaactgatatgttcaagattccgtagcaacgcacgggcatctaact

SEQ ID NO: 32460 - DNA, 2424 bp, Zea Mays
gtgggtgttcgacgcccggctggggtcgttccagcgtgcgccgaggctgtacgcgctctgcgtcagcctgctggcctggaacaccgtcgtctactcgctcacgttcctgagtgctgcatctgccttgcgtagtacggggagaaggaggaggttcggcagctgccgtgcacacacgtgtttcatctcaagtgcatatacaggtggctcaggatcatctcctcttgccctctctgcaagcaagagctcaagtgaactttatattcattacacacatgacattctcgcttattctttggatcaaggtgttagtatcctagacacaacagatattttccagctaacaagggaaatcaaggaagaattgatctttatattagcaggcggatgcaatcactaatcaaaaccacgatgcaaggtaacctaaatggattttaaattttattttggattgttaaatctttatttctgactactattgttttatgtcgtggatgccctcgtgaggttctacgccgacgccttcaggagggattcacagaggccatggtgaggatggccagcttgagtcggctcaccgggagcagcgcgagatccgctacaactaaatgataggaggtttcgctgccatttgcagcgactgtgttccagttcgaccgtttggggaaaaggtgagtcctcccatttcatgtagatgcatgggttgataaacatttgggagaaatgtcccctctttaattcgaaaaatagttgtgtatttgttcgacttatctgcggcgatgtacctttgtacgcgtacaaacatctatagacaaaaacaaaatgacacttcatggatgtagcaagagcgggctacgagaaactagcagatcatgcctaaaattcaattagcattagggtcagacaaaatactacattttctggattacaataatgtataggtgcatgaaaaaaacttgattccaatgtgtgacaaagtgtgaagatgaaagtgcactttcacgctgtcataacgcggatttgttttccttgctcatggaatgtgcatttgtgtgtttgcgtctactgtgcggctacaggcaaggaaacaggatctgtcacggaaggtatgtacacattacagtaaacgttgttcgtagaacatgcactttgtggagtggtctttgaatgagatgcgtttagaattaccttttcatgcagatctcttgttcagaacctggttgcttagtccattcttgttttgggttgctactacaaaaaagcggcaatgctttatatgaatcgcctcttactaatatccagggtcaaatggtggtccttcagtgaccagactaatatttgagcattaatcttatttgtttcacagtcatttcttgtttatcaatatgaatgctatttttttgcgagtggacttgttaactaataagctcatagatatttgaacaaaaaatagtgttttgttctaaaactgtcataaagagtgcatacatcatagctatggtttcaactgtgatttgatgtcctataatattgagtgtcctatagtgtgttgttctgaaacagtcacaaagagggcctaagaagctgatggaatcctcattcaccgccgctaaggagtttgagcgggatcggagaggagacgcgattcccatttctcagtgatgtcgatgtcctgtactcctgtatatttggattcaacaatatgccattagtatgctgtcaagcgtcctatttgcaagagataaatggcttacgcccgaggggcttattcttccttatcatgtgcattggtgccacaacactggatgagtataggaagcatatagagaaagatcctgccttggaaagaaggtttcaaccagttaaggttccagagcctactatggatgaaacaatacagatcttaagaggacttcgtgagagatatgaacttcatcacaaactgagatacacagatgatgctttaattgctgctgcacagctgtcttatcagtatatcagcgatcgttttctgcctgacaaagccattgacttgattgatgaagctggatctcgtgttaggctgaggcatgcgcagctccctgatgaagccaaagagctggacaaagagctgcggcagataagcaagcagaaaaatgaggctgtacgtggccaagattttgagaaggtatactgttgtttggcacagcggtgacaaagccgatccgctcccacctctctagcaacgtcgatatggttaataccaagcattatgttgtttccttttgagataaatattttgttactgattttaccttttgtctcctcttcttgttttttgttctagaatctgtagcaaatggctaacgatgaggatatccattactttgtttatgacaataaaactgatatgttcaagattccgtagcaacgcacgggcatctaact

SEQ ID NO: 32461 - DNA, 2252 bp, Zea Mays
gggtgttcgacgcccggctggggtcgttccagcgtgcgccgaggctgtacgcgctctgcgtcagcctgctggcctggaacaccgtcgtctactcgctcacgttcctgagtgctgcatctgccttgcgtagtacggggagaaggaggaggttcggcagctgccgtgcacacacgtgtttcatctcaagtgcatatacaggtggctcaggatcatctcctcttgccctctctgcaagcaagagctcaagtgaactttatattcattacacacatgacattctcgcttattctttggatcaaggtgttagtatcctagacacaacagatattttccagctaacaagggaaatcaaggaagaattgatctttatattagcaggcggatgcaatcactaatcaaaaccacgatgcaaggtaacctaaatggattttaaattttattttggattgttaaatctttatttctgactactattgttttatgtcgtggatgccctcgtgaggttctacgccgacgccttcaggagggattcacagaggccatggtgaggatggccagcttgagtcggctcaccgggagcagcgcgagatccgctacaactaaatgataggagtgtgttgttctgaaacagtcacaaagagggcctaagaagctgatggaatcctcattcaccgccgctaaggagtttgagcgggatcggagaggagacgtcagttcttcctcctctgctcaatgcggccattcgccctgtcccccaaccctgaactccacactgccactccgtgctcattttttctgaaggggaaatattcatctccttgttgttttgtaccatggatactttagcatcattctcatactactaggagtgtaggtaaggagtccacacacgagtttgcaaacaccattaagcctattttgcttgattagtgccctgcaacacttcatatgttcaagacaaaatccatacccatgtctattgttgtatgatattatttgcattgaccgttgctgctcttcttgattgcagtcactaacattgcattaatctatgtgatacatttattcaggcgattcccatttctcagtgatgtcgatgtcctgtactcctgtatatttggattcaacaatatgccattagtatgctgtcaagcgtcctatttgcaagagataaatggcttacgcccgaggggcttattcttccttatcatggtcggtcgtgactttggttatccactgaaaagatatgcttggtggtgctttcttgtgttgaagaacaagtatcccacggaaccacaaccgtttgtattatctggtgatttcctacattattagctggcctaactaaaccatgcgctcagaccctaaaccagctgtaagtctgtaacttaaaagcacagtgcactagcggaatggggttccttgctttttggagcgtttccccagtcagatcggcggcagggcaggtcacgtggacggggctccttgttgctggaactaaataccgtggagagtttgaagtgagactaaagaaacttatggaggaaattaagcaaaatgaagacattattctctttattgattaagtgcacacactgattggagcagtgcattggtgccacaacactggatgagtataggaagcatatagagaaagatcctgccttggaaagaaggtttcaaccagttaaggttccagagcctactatggatgaaacaatacagatcttaagaggacttcgtgagagatatgaacttcatcacaaactgagatacacagatgatgctttaattgctgctgcacagctgtcttatcagtatatcagcgatcgttttctgcctgacaaagccattgacttgattgatgaagctggatctcgtgttaggctgaggcatgcgcagctccctgatgaagccaaagagctggacaaagagctgcggcagataagcaagcagaaaaatgaggctgtacgtggccaagattttgagaaggtatactgttgtttggcacagcggtgacaaagccgatccgctcccacctctctagcaacgtcgatatggttaataccaagcattatgttgtttccttttgagataaatattttgttactgattttaccttttgtctcctcttcttgttttttgttctagaatctgtagcaaatggctaacgatgaggatatccattactttgtttatgacaataaaactgatatgttcaagattccgtagcaacgcacgggcatctaact

SEQ ID NO: 32462 - DNA, 2134 bp, Zea Mays
gttcgacgcccggctggggtcgttccagcgtgcgccgaggctgtacgcgctctgcgtcagcctgctggcctggaacaccgtcgtctactcgctcacgttcctgagtgctgcatctgccttgcgtagtacggggagaaggaggaggttcggcagctgccgtgcacacacgtgtttcatctcaagtgcatatacaggtggctcaggatcatctcctcttgccctctctgcaagcaagagctcaagtgaactttatattcattacacacatgacattctcgcttattctttggatcaaggtgttagtatcctagacacaacagatattttccagctaacaagggaaatcaaggaagaattgatctttatattagcaggcggatgcaatcactaatcaaaaccacgatgcaaggtaacctaaatggattttaaattttattttggattgttaaatctttatttctgactactattgttttatgtcgtggatgccctcgtgaggttctacgccgacgccttcaggagggattcacagaggccatggtgaggatggccagcttgagtcggctcaccgggagcagcgcgagatccgctacaactaaatgataggaggtattttctagaaattacaaccccacctctgtcaggccttctgttgagtgaatttggtttgcacaccctcaccctgcacgctcttaccggactaccgctcctagcacccactcacacgagattgcaccccgctcgccatgccaccatagatccagctagggcgacatcattgtgggcaatcctgtgcgagagaatgtgaaattgttgtaggattgataatgaccaggggtttctccgcccacatgcaccaggtttcgctgccatttgcagcgactgtgttccagttcgaccgtttggggaaaaggcaaggaaacaggatctgtcacggaaggcgattcccatttctcagtgatgtcgatgtcctgtactcctgtatatttggattcaacaatatgccattagtatgctgtcaagcgtcctatttgcaagagataaatggcttacgcccgaggggcttattcttccttatcatggtcggtcgtgactttggttatccactgaaaagatatgcttggtggtgctttcttgtgttgaagaacaagtatcccacggaaccacaaccgtttgtattatctggtgatttcctacattattagctggcctaactaaaccatgcgctcagaccctaaaccagctgtaagtctgtaacttaaaagcacagtgcactagcggaatggggttccttgctttttggagcgtttccccagtcagatcggcggcagggcaggtcacgtggacggggctccttgttgctggaactaaataccgtggagagtttgaagtgagactaaagaaacttatggaggaaattaagcaaaatgaagacattattctctttattgattaagtgcacacactgattggagcaggtgcagcagaagtgcattggtgccacaacactggatgagtataggaagcatatagagaaagatcctgccttggaaagaaggtttcaaccagttaaggttccagagcctactatggatgaaacaatacagatcttaagaggacttcgtgagagatatgaacttcatcacaaactgagatacacagatgatgctttaattgctgctgcacagctgtcttatcagtatatcagcgatcgttttctgcctgacaaagccattgacttgattgatgaagctggatctcgtgttaggctgaggcatgcgcagctccctgatgaagccaaagagctggacaaagagctgcggcagataagcaagcagaaaaatgaggctgtacgtggccaagattttgagaaggtatactgttgtttggcacagcggtgacaaagccgatccgctcccacctctctagcaacgtcgatatggttaataccaagcattatgttgtttccttttgagataaatattttgttactgattttaccttttgtctcctcttcttgttttttgttctagaatctgtagcaaatggctaacgatgaggatatccattactttgtttatgacaataaaactgatatgttcaagattccgtagcaacgcacgggcatctaact

SEQ ID NO: 32463 - DNA, 2777 bp, Zea Mays
tcgacgcccggctggggtcgttccagcgtgcgccgaggctgtacgcgctctgcgtcagcctgctggcctggaacaccgtcgtctactcgctcacgttcctgagtgctgcatctgccttgcgtagtacggggagaaggaggaggttcggcagctgccgtgcacacacgtgtttcatctcaagtgcatatacaggtggctcaggatcatctcctcttgccctctctgcaagcaagagctcaagtgaactttatattcattacacacatgacattctcgcttattctttggatcaaggtgttagtatcctagacacaacagatattttccagctaacaagggaaatcaaggaagaattgatctttatattagcaggcggatgcaatcactaatcaaaaccacgatgcaaggtaacctaaatggattttaaattttattttggattgttaaatctttatttctgactactattgttttatgtcgtggatgccctcgtgaggttctacgccgacgccttcaggagggattcacagaggccatggtgaggatggccagcttgagtcggctcaccgggagcagcgcgagatccgctacaactaaatgataggaggtttcgctgccatttgcagcgactgtgttccagttcgaccgtttggggaaaaggtgagtcctcccatttcatgtagatgcatgggttgataaacatttgggagaaatgtcccctctttaattcgaaaaatagttgtgtatttgttcgacttatctgcggcgatgtacctttgtacgcgtacaaacatctatagacaaaaacaaaatgacacttcatggatgtagcaagagcgggctacgagaaactagcagatcatgcctaaaattcaattagcattagggtcagacaaaatactacattttctggattacaataatgtataggtgcatgaaaaaaacttgattccaatgtgtgacaaagtgtgaagatgaaagtgcactttcacgctgtcataacgcggatttgttttccttgctcatggaatgtgcatttgtgtgtttgcgtctactgtgcggctacaggcaaggaaacaggatctgtcacggaaggtatgtacacattacagtaaacgttgttcgtagaacatgcactttgtggagtggtctttgaatgagatgcgtttagaattaccttttcatgcagatctcttgttcagaacctggttgcttagtccattcttgttttgggttgctactacaaaaaagcggcaatgctttatatgaatcgcctcttactaatatccagggtcaaatggtggtccttcagtgaccagactaatatttgagcattaatcttatttgtttcacagtcatttcttgtttatcaatatgaatgctatttttttgcgagtggacttgttaactaataagctcatagatatttgaacaaaaaatagtgttttgttctaaaactgtcataaagagtgcatacatcatagctatggtttcaactgtgatttgatgtcctataatattgagtgtcctatagtgtgttgttctgaaacagtcacaaagagggcctaagaagctgatggaatcctcattcaccgccgctaaggagtttgagcgggatcggagaggagacgtcagttcttcctcctctgctcaatgcggccattcgccctgtcccccaaccctgaactccacactgccactccgtgctcattttttctgaaggggaaatattcatctccttgttgttttgtaccatggatactttagcatcattctcatactactaggagtgtaggtaaggagtccacacacgagtttgcaaacaccattaagcctattttgcttgattagtgccctgcaacacttcatatgttcaagacaaaatccatacccatgtctattgttgtatgatattatttgcattgaccgttgctgctcttcttgattgcagtcactaacattgcattaatctatgtgatacatttattcaggcgattcccatttctcagtgatgtcgatgtcctgtactcctgtatatttggattcaacaatatgccattagtatgctgtcaagcgtcctatttgcaagagataaatggcttacgcccgaggggcttattcttccttatcatgtgcattggtgccacaacactggatgagtataggaagcatatagagaaagatcctgccttggaaagaaggtttcaaccagttaaggttccagagcctactatggatgaaacaatacagatcttaagaggacttcgtgagagatatgaacttcatcacaaactgagatacacagatgatgctttaattgctgctgcacagctgtcttatcagtatatcagcgatcgttttctgcctgacaaagccattgacttgattgatgaagctggatctcgtgttaggctgaggcatgcgcagctccctgatgaagccaaagagctggacaaagagctgcggcagataagcaagcagaaaaatgaggctgtacgtggccaagattttgagaaggtatactgttgtttggcacagcggtgacaaagccgatccgctcccacctctctagcaacgtcgatatggttaataccaagcattatgttgtttccttttgagataaatattttgttactgattttaccttttgtctcctcttcttgttttttgttctagaatctgtagcaaatggctaacgatgaggatatccattactttgtttatgacaataaaactgatatgttcaagattccgtagcaacgcacgggcatctaact

SEQ ID NO: 32464 - DNA, 2823 bp, Zea Mays
cgacgcccggctggggtcgttccagcgtgcgccgaggctgtacgcgctctgcgtcagcctgctggcctggaacaccgtcgtctactcgctcacgttcctgagtgctgcatctgccttgcgtagtacggggagaaggaggaggttcggcagctgccgtgcacacacgtgtttcatctcaagtgcatatacaggtggctcaggatcatctcctcttgccctctctgcaagcaagagctcaagtgaactttatattcattacacacatgacattctcgcttattctttggatcaaggtgttagtatcctagacacaacagatattttccagctaacaagggaaatcaaggaagaattgatctttatattagcaggcggatgcaatcactaatcaaaaccacgatgcaaggtaacctaaatggattttaaattttattttggattgttaaatctttatttctgactactattgttttatgtcgtggatgccctcgtgaggttctacgccgacgccttcaggagggattcacagaggccatggtgaggatggccagcttgagtcggctcaccgggagcagcgcgagatccgctacaactaaatgataggaggtttcgctgccatttgcagcgactgtgttccagttcgaccgtttggggaaaaggtgagtcctcccatttcatgtagatgcatgggttgataaacatttgggagaaatgtcccctctttaattcgaaaaatagttgtgtatttgttcgacttatctgcggcgatgtacctttgtacgcgtacaaacatctatagacaaaaacaaaatgacacttcatggatgtagcaagagcgggctacgagaaactagcagatcatgcctaaaattcaattagcattagggtcagacaaaatactacattttctggattacaataatgtataggtgcatgaaaaaaacttgattccaatgtgtgacaaagtgtgaagatgaaagtgcactttcacgctgtcataacgcggatttgttttccttgctcatggaatgtgcatttgtgtgtttgcgtctactgtgcggctacaggcaaggaaacaggatctgtcacggaaggtatgtacacattacagtaaacgttgttcgtagaacatgcactttgtggagtggtctttgaatgagatgcgtttagaattaccttttcatgcagatctcttgttcagaacctggttgcttagtccattcttgttttgggttgctactacaaaaaagcggcaatgctttatatgaatcgcctcttactaatatccagggtcaaatggtggtccttcagtgaccagactaatatttgagcattaatcttatttgtttcacagtcatttcttgtttatcaatatgaatgctatttttttgcgagtggacttgttaactaataagctcatagatatttgaacaaaaaatagtgttttgttctaaaactgtcataaagagtgcatacatcatagctatggtttcaactgtgatttgatgtcctataatattgagtgtcctatagtgtgttgttctgaaacagtcacaaagagggcctaagaagctgatggaatcctcattcaccgccgctaaggagtttgagcgggatcggagaggagacgcgattcccatttctcagtgatgtcgatgtcctgtactcctgtatatttggattcaacaatatgccattagtatgctgtcaagcgtcctatttgcaagagataaatggcttacgcccgaggggcttattcttccttatcatggtcggtcgtgactttggttatccactgaaaagatatgcttggtggtgctttcttgtgttgaagaacaagtatcccacggaaccacaaccgtttgtattatctggtgatttcctacattattagctggcctaactaaaccatgcgctcagaccctaaaccagctgtaagtctgtaacttaaaagcacagtgcactagcggaatggggttccttgctttttggagcgtttccccagtcagatcggcggcagggcaggtcacgtggacggggctccttgttgctggaactaaataccgtggagagtttgaagtgagactaaagaaacttatggaggaaattaagcaaaatgaagacattattctctttattgattaagtgcacacactgattggagcaggtgcagcagaagtgcattggtgccacaacactggatgagtataggaagcatatagagaaagatcctgccttggaaagaaggtttcaaccagttaaggttccagagcctactatggatgaaacaatacagatcttaagaggacttcgtgagagatatgaacttcatcacaaactgagatacacagatgatgctttaattgctgctgcacagctgtcttatcagtatatcagcgatcgttttctgcctgacaaagccattgacttgattgatgaagctggatctcgtgttaggctgaggcatgcgcagctccctgatgaagccaaagagctggacaaagagctgcggcagataagcaagcagaaaaatgaggctgtacgtggccaagattttgagaaggtatactgttgtttggcacagcggtgacaaagccgatccgctcccacctctctagcaacgtcgatatggttaataccaagcattatgttgtttccttttgagataaatattttgttactgattttaccttttgtctcctcttcttgttttttgttctagaatctgtagcaaatggctaacgatgaggatatccattactttgtttatgacaataaaactgatatgttcaagattccgtagcaacgcacgggcatctaact

SEQ ID NO: 32465 - DNA, 2634 bp, Zea Mays
cgaggctgtacgcgctctgcgtcagcctgctggcctggaacaccgtcgtctactcgctcacgttcctgagtgctgcatctgccttgcgtagtacggggagaaggaggaggttcggcagctgccgtgcacacacgtgtttcatctcaagtgcatatacaggtggctcaggatcatctcctcttgccctctctgcaagcaagagctcaagtgaactttatattcattacacacatgacattctcgcttattctttggatcaaggtgttagtatcctagacacaacagatattttccagctaacaagggaaatcaaggaagaattgatctttatattagcaggcggatgcaatcactaatcaaaaccacgatgcaaggtaacctaaatggattttaaattttattttggattgttaaatctttatttctgactactattgttttatgtcgtggatgccctcgtgaggttctacgccgacgccttcaggagggattcacagaggccatggtgaggatggccagcttgagtcggctcaccgggagcagcgcgagatccgctacaactaaatgataggaggtattttctagaaattacaaccccacctctgtcaggccttctgttgagtgaatttggtttgcacaccctcaccctgcacgctcttaccggactaccgctcctagcacccactcacacgagattgcaccccgctcgccatgccaccatagatccagctagggcgacatcattgtgggcaatcctgtgcgagagaatgtgaaattgttgtaggattgataatgaccaggggtttctccgcccacatgcaccaggtttcgctgccatttgcagcgactgtgttccagttcgaccgtttggggaaaaggtgagtcctcccatttcatgtagatgcatgggttgataaacatttgggagaaatgtcccctctttaattcgaaaaatagttgtgtatttgttcgacttatctgcggcgatgtacctttgtacgcgtacaaacatctatagacaaaaacaaaatgacacttcatggatgtagcaagagcgggctacgagaaactagcagatcatgcctaaaattcaattagcattagggtcagacaaaatactacattttctggattacaataatgtataggtgcatgaaaaaaacttgattccaatgtgtgacaaagtgtgaagatgaaagtgcactttcacgctgtcataacgcggatttgttttccttgctcatggaatgtgcatttgtgtgtttgcgtctactgtgcggctacaggcaaggaaacaggatctgtcacggaaggtatgtacacattacagtaaacgttgttcgtagaacatgcactttgtggagtggtctttgaatgagatgcgtttagaattaccttttcatgcagatctcttgttcagaacctggttgcttagtccattcttgttttgggttgctactacaaaaaagcggcaatgctttatatgaatcgcctcttactaatatccagggtcaaatggtggtccttcagtgaccagactaatatttgagcattaatcttatttgtttcacagtcatttcttgtttatcaatatgaatgctatttttttgcgagtggacttgttaactaataagctcatagatatttgaacaaaaaatagtgttttgttctaaaactgtcataaagagtgcatacatcatagctatggtttcaactgtgatttgatgtcctataatattgagtgtcctatagtgtgttgttctgaaacagtcacaaagagggcctaagaagctgatggaatcctcattcaccgccgctaaggagtttgagcgggatcggagaggagacgcgattcccatttctcagtgatgtcgatgtcctgtactcctgtatatttggattcaacaatatgccattagtatgctgtcaagcgtcctatttgcaagagataaatggcttacgcccgaggggcttattcttccttatcatgtgcattggtgccacaacactggatgagtataggaagcatatagagaaagatcctgccttggaaagaaggtttcaaccagttaaggttccagagcctactatggatgaaacaatacagatcttaagaggacttcgtgagagatatgaacttcatcacaaactgagatacacagatgatgctttaattgctgctgcacagctgtcttatcagtatatcagcgatcgttttctgcctgacaaagccattgacttgattgatgaagctggatctcgtgttaggctgaggcatgcgcagctccctgatgaagccaaagagctggacaaagagctgcggcagataagcaagcagaaaaatgaggctgtacgtggccaagattttgagaaggtatactgttgtttggcacagcggtgacaaagccgatccgctcccacctctctagcaacgtcgatatggttaataccaagcattatgttgtttccttttgagataaatattttgttactgattttaccttttgtctcctcttcttgttttttgttctagaatctgtagcaaatggctaacgatgaggatatccattactttgtttatgacaataaaactgatatgttcaagattccgtagcaacgcacgggcatctaact

SEQ ID NO: 32466 - DNA, 1714 bp, Zea Mays
acgcgctctgcgtcagcctgctggcctggaacaccgtcgtctactcgctcacgttcctgagtgctgcatctgccttgcgtagtacggggagaaggaggaggttcggcagctgccgtgcacacacgtgtttcatctcaagtgcatatacagttccagctaacaagggaaatcaaggaagaattgatctttatattagcaggcggatgcaatcactaatcaaaaccacgatgcaaggtaacctaaatggattttaaattttattttggattgttaaatctttatttctgactactattgttttatgtcgtggatgccctcgtgaggttctacgccgacgccttcaggagggattcacagaggccatggtgaggatggccagcttgagtcggctcaccgggagcagcgcgagatccgctacaactaaatgataggaggcgattcccatttctcagtgatgtcgatgtcctgtactcctgtatatttggattcaacaatatgccattagtatgctgtcaagcgtcctatttgcaagagataaatggcttacgcccgaggggcttattcttccttatcatggtcggtcgtgactttggttatccactgaaaagatatgcttggtggtgctttcttgtgttgaagaacaagtatcccacggaaccacaaccgtttgtattatctggtgatttcctacattattagctggcctaactaaaccatgcgctcagaccctaaaccagctgtaagtctgtaacttaaaagcacagtgcactagcggaatggggttccttgctttttggagcgtttccccagtcagatcggcggcagggcaggtcacgtggacggggctccttgttgctggaactaaataccgtggagagtttgaagtgagactaaagaaacttatggaggaaattaagcaaaatgaagacattattctctttattgattaagtgcacacactgattggagcaggtgcagcagaaggtgtaattgatgctgctaatattttgaagccagcattttgtaattttcccaaaataaccacattgctggtgattttatctgtgtagtgcattggtgccacaacactggatgagtataggaagcatatagagaaagatcctgccttggaaagaaggtttcaaccagttaaggttccagagcctactatggatgaaacaatacagatcttaagaggacttcgtgagagatatgaacttcatcacaaactgagatacacagatgatgctttaattgctgctgcacagctgtcttatcagtatatcagcgatcgttttctgcctgacaaagccattgacttgattgatgaagctggatctcgtgttaggctgaggcatgcgcagctccctgatgaagccaaagagctggacaaagagctgcggcagataagcaagcagaaaaatgaggctgtacgtggccaagattttgagaaggtatactgttgtttggcacagcggtgacaaagccgatccgctcccacctctctagcaacgtcgatatggttaataccaagcattatgttgtttccttttgagataaatattttgttactgattttaccttttgtctcctcttcttgttttttgttctagaatctgtagcaaatggctaacgatgaggatatccattactttgtttatgacaataaaactgatatgttcaagattccgtagcaacgcacgggcatctaact

SEQ ID NO: 32467 - DNA, 3168 bp, Zea Mays
ctctgcgtcagcctgctggcctggaacaccgtcgtctactcgctcacgttcctgagtgctgcatctgccttgcgtagtacggggagaaggaggaggttcggcagctgccgtgcacacacgtgtttcatctcaagtgcatatacaggtggctcaggatcatctcctcttgccctctctgcaagcaagagctcaagtgaactttatattcattacacacatgacattctcgcttattctttggatcaaggtgttagtatcctagacacaacagatattttccagctaacaagggaaatcaaggaagaattgatctttatattagcaggcggatgcaatcactaatcaaaaccacgatgcaaggtaacctaaatggattttaaattttattttggattgttaaatctttatttctgactactattgttttatgtcgtggatgccctcgtgaggttctacgccgacgccttcaggagggattcacagaggccatggtgaggatggccagcttgagtcggctcaccgggagcagcgcgagatccgctacaactaaatgataggaggtttcgctgccatttgcagcgactgtgttccagttcgaccgtttggggaaaaggtgagtcctcccatttcatgtagatgcatgggttgataaacatttgggagaaatgtcccctctttaattcgaaaaatagttgtgtatttgttcgacttatctgcggcgatgtacctttgtacgcgtacaaacatctatagacaaaaacaaaatgacacttcatggatgtagcaagagcgggctacgagaaactagcagatcatgcctaaaattcaattagcattagggtcagacaaaatactacattttctggattacaataatgtataggtgcatgaaaaaaacttgattccaatgtgtgacaaagtgtgaagatgaaagtgcactttcacgctgtcataacgcggatttgttttccttgctcatggaatgtgcatttgtgtgtttgcgtctactgtgcggctacaggcaaggaaacaggatctgtcacggaaggtatgtacacattacagtaaacgttgttcgtagaacatgcactttgtggagtggtctttgaatgagatgcgtttagaattaccttttcatgcagatctcttgttcagaacctggttgcttagtccattcttgttttgggttgctactacaaaaaagcggcaatgctttatatgaatcgcctcttactaatatccagggtcaaatggtggtccttcagtgaccagactaatatttgagcattaatcttatttgtttcacagtcatttcttgtttatcaatatgaatgctatttttttgcgagtggacttgttaactaataagctcatagatatttgaacaaaaaatagtgttttgttctaaaactgtcataaagagtgcatacatcatagctatggtttcaactgtgatttgatgtcctataatattgagtgtcctatagtgtgttgttctgaaacagtcacaaagagggcctaagaagctgatggaatcctcattcaccgccgctaaggagtttgagcgggatcggagaggagacgtcagttcttcctcctctgctcaatgcggccattcgccctgtcccccaaccctgaactccacactgccactccgtgctcattttttctgaaggggaaatattcatctccttgttgttttgtaccatggatactttagcatcattctcatactactaggagtgtaggtaaggagtccacacacgagtttgcaaacaccattaagcctattttgcttgattagtgccctgcaacacttcatatgttcaagacaaaatccatacccatgtctattgttgtatgatattatttgcattgaccgttgctgctcttcttgattgcagtcactaacattgcattaatctatgtgatacatttattcaggcgattcccatttctcagtgatgtcgatgtcctgtactcctgtatatttggattcaacaatatgccattagtatgctgtcaagcgtcctatttgcaagagataaatggcttacgcccgaggggcttattcttccttatcatgttgggtggtggtggtgggaagcgttttcaggtcggtcgtgactttggttatccactgaaaagatatgcttggtggtgctttcttgtgttgaagaacaagtatcccacggaaccacaaccgtttgtattatctggtgatttcctacattattagctggcctaactaaaccatgcgctcagaccctaaaccagctgtaagtctgtaacttaaaagcacagtgcactagcggaatggggttccttgctttttggagcgtttccccagtcagatcggcggcagggcaggtcacgtggacggggctccttgttgctggaactaaataccgtggagagtttgaagtgagactaaagaaacttatggaggaaattaagcaaaatgaagacattattctctttattgattaagtgcacacactgattggagcaggtgcagcagaagtgcattggtgccacaacactggatgagtataggaagcatatagagaaagatcctgccttggaaagaaggtttcaaccagttaaggttccagagcctactatggatgaaacaatacagatcttaagaggacttcgtgagagatatgaacttcatcacaaactgagatacacagatgatgctttaattgctgctgcacagctgtcttatcagtatatcagcgatcgttttctgcctgacaaagccattgacttgattgatgaagctggatctcgtgttaggctgaggcatgcgcagctccctgatgaagccaaagagctggacaaagagctgcggcagataagcaagcagaaaaatgaggctgtacgtggccaagattttgagaaggtatactgttgtttggcacagcggtgacaaagccgatccgctcccacctctctagcaacgtcgatatggttaataccaagcattatgttgtttccttttgagataaatattttgttactgattttaccttttgtctcctcttcttgttttttgttctagaatctgtagcaaatggctaacgatgaggatatccattactttgtttatgacaataaaactgatatgttcaagattccgtagcaacgcacgggcatctaact

SEQ ID NO: 32468 - DNA, 1215 bp, Zea Mays
ctctgcgtcagcctgctggcctggaacaccgtcgtctactcgctcacgttcctgagtgctgcatctgccttgcgtagtacggggagaaggaggaggttcggcagctgccgtgcacacacgtgtttcatctcaagtgcatatacagttccagctaacaagggaaatcaaggaagaattgatctttatattagcaggcggatgcaatcactaatcaaaaccacgatgcaaggtaacctaaatggattttaaattttattttggattgttaaatctttatttctgactactattgttttatgtcgtggatgccctcgtgaggttctacgccgacgccttcaggagggattcacagaggccatggtgaggatggccagcttgagtcggctcaccgggagcagcgcgagatccgctacaactaaatgataggaggcgattcccatttctcagtgatgtcgatgtcctgtactcctgtatatttggattcaacaatatgccattagtatgctgtcaagcgtcctatttgcaagagataaatggcttacgcccgaggggcttattcttccttatcatgtgcattggtgccacaacactggatgagtataggaagcatatagagaaagatcctgccttggaaagaaggtttcaaccagttaaggttccagagcctactatggatgaaacaatacagatcttaagaggacttcgtgagagatatgaacttcatcacaaactgagatacacagatgatgctttaattgctgctgcacagctgtcttatcagtatatcagcgatcgttttctgcctgacaaagccattgacttgattgatgaagctggatctcgtgttaggctgaggcatgcgcagctccctgatgaagccaaagagctggacaaagagctgcggcagataagcaagcagaaaaatgaggctgtacgtggccaagattttgagaaggtatactgttgtttggcacagcggtgacaaagccgatccgctcccacctctctagcaacgtcgatatggttaataccaagcattatgttgtttccttttgagataaatattttgttactgattttaccttttgtctcctcttcttgttttttgttctagaatctgtagcaaatggctaacgatgaggatatccattactttgtttatgacaataaaactgatatgttcaagattccgtagcaacgcacgggcatctaact

SEQ ID NO: 32469 - DNA, 3138 bp, Zea Mays
ctctgcgtcagcctgctggcctggaacaccgtcgtctactcgctcacgttcctgagtgctgcatctgccttgcgtagtacggggagaaggaggaggttcggcagctgccgtgcacacacgtgtttcatctcaagtgcatatacaggtggctcaggatcatctcctcttgccctctctgcaagcaagagctcaagtgaactttatattcattacacacatgacattctcgcttattctttggatcaaggtgttagtatcctagacacaacagatattttccagctaacaagggaaatcaaggaagaattgatctttatattagcaggcggatgcaatcactaatcaaaaccacgatgcaaggtaacctaaatggattttaaattttattttggattgttaaatctttatttctgactactattgttttatgtcgtggatgccctcgtgaggttctacgccgacgccttcaggagggattcacagaggccatggtgaggatggccagcttgagtcggctcaccgggagcagcgcgagatccgctacaactaaatgataggaggtttcgctgccatttgcagcgactgtgttccagttcgaccgtttggggaaaaggtgagtcctcccatttcatgtagatgcatgggttgataaacatttgggagaaatgtcccctctttaattcgaaaaatagttgtgtatttgttcgacttatctgcggcgatgtacctttgtacgcgtacaaacatctatagacaaaaacaaaatgacacttcatggatgtagcaagagcgggctacgagaaactagcagatcatgcctaaaattcaattagcattagggtcagacaaaatactacattttctggattacaataatgtataggtgcatgaaaaaaacttgattccaatgtgtgacaaagtgtgaagatgaaagtgcactttcacgctgtcataacgcggatttgttttccttgctcatggaatgtgcatttgtgtgtttgcgtctactgtgcggctacaggcaaggaaacaggatctgtcacggaaggtatgtacacattacagtaaacgttgttcgtagaacatgcactttgtggagtggtctttgaatgagatgcgtttagaattaccttttcatgcagatctcttgttcagaacctggttgcttagtccattcttgttttgggttgctactacaaaaaagcggcaatgctttatatgaatcgcctcttactaatatccagggtcaaatggtggtccttcagtgaccagactaatatttgagcattaatcttatttgtttcacagtcatttcttgtttatcaatatgaatgctatttttttgcgagtggacttgttaactaataagctcatagatatttgaacaaaaaatagtgttttgttctaaaactgtcataaagagtgcatacatcatagctatggtttcaactgtgatttgatgtcctataatattgagtgtcctatagtgtgttgttctgaaacagtcacaaagagggcctaagaagctgatggaatcctcattcaccgccgctaaggagtttgagcgggatcggagaggagacgtcagttcttcctcctctgctcaatgcggccattcgccctgtcccccaaccctgaactccacactgccactccgtgctcattttttctgaaggggaaatattcatctccttgttgttttgtaccatggatactttagcatcattctcatactactaggagtgtaggtaaggagtccacacacgagtttgcaaacaccattaagcctattttgcttgattagtgccctgcaacacttcatatgttcaagacaaaatccatacccatgtctattgttgtatgatattatttgcattgaccgttgctgctcttcttgattgcagtcactaacattgcattaatctatgtgatacatttattcaggcgattcccatttctcagtgatgtcgatgtcctgtactcctgtatatttggattcaacaatatgccattagtatgctgtcaagcgtcctatttgcaagagataaatggcttacgcccgaggggcttattcttccttatcatggtcggtcgtgactttggttatccactgaaaagatatgcttggtggtgctttcttgtgttgaagaacaagtatcccacggaaccacaaccgtttgtattatctggtgatttcctacattattagctggcctaactaaaccatgcgctcagaccctaaaccagctgtaagtctgtaacttaaaagcacagtgcactagcggaatggggttccttgctttttggagcgtttccccagtcagatcggcggcagggcaggtcacgtggacggggctccttgttgctggaactaaataccgtggagagtttgaagtgagactaaagaaacttatggaggaaattaagcaaaatgaagacattattctctttattgattaagtgcacacactgattggagcaggtgcagcagaagtgcattggtgccacaacactggatgagtataggaagcatatagagaaagatcctgccttggaaagaaggtttcaaccagttaaggttccagagcctactatggatgaaacaatacagatcttaagaggacttcgtgagagatatgaacttcatcacaaactgagatacacagatgatgctttaattgctgctgcacagctgtcttatcagtatatcagcgatcgttttctgcctgacaaagccattgacttgattgatgaagctggatctcgtgttaggctgaggcatgcgcagctccctgatgaagccaaagagctggacaaagagctgcggcagataagcaagcagaaaaatgaggctgtacgtggccaagattttgagaaggtatactgttgtttggcacagcggtgacaaagccgatccgctcccacctctctagcaacgtcgatatggttaataccaagcattatgttgtttccttttgagataaatattttgttactgattttaccttttgtctcctcttcttgttttttgttctagaatctgtagcaaatggctaacgatgaggatatccattactttgtttatgacaataaaactgatatgttcaagattccgtagcaacgcacgggcatctaact

SEQ ID NO: 32470 - DNA, 2870 bp, Zea Mays
gcgtcagcctgctggcctggaacaccgtcgtctactcgctcacgttcctgagtgctgcatctgccttgcgtagtacggggagaaggaggaggttcggcagctgccgtgcacacacgtgtttcatctcaagtgcatatacaggtggctcaggatcatctcctcttgccctctctgcaagcaagagctcaattccagctaacaagggaaatcaaggaagaattgatctttatattagcaggcggatgcaatcactaatcaaaaccacgatgcaaggtaacctaaatggattttaaattttattttggattgttaaatctttatttctgactactattgttttatgtcgtggatgccctcgtgaggttctacgccgacgccttcaggagggattcacagaggccatggtgaggatggccagcttgagtcggctcaccgggagcagcgcgagatccgctacaactaaatgataggaggcaaggaaacaggatctgtcacggaaggtatgtacacattacagtaaacgttgttcgtagaacatgcactttgtggagtggtctttgaatgagatgcgtttagaattaccttttcatgcagatctcttgttcagaacctggttgcttagtccattcttgttttgggttgctactacaaaaaagcggcaatgctttatatgaatcgcctcttactaatatccagggtcaaatggtggtccttcagtgaccagactaatatttgagcattaatcttatttgtttcacagtcatttcttgtttatcaatatgaatgctatttttttgcgagtggacttgttaactaataagctcatagatatttgaacaaaaaatagtgttttgttctaaaactgtcataaagagtgcatacatcatagctatggtttcaactgtgatttgatgtcctataatattgagtgtcctatagtgtgttgttctgaaacagtcacaaagagggcctaagaagctgatggaatcctcattcaccgccgctaaggagtttgagcgggatcggagaggagacgtcagttcttcctcctctgctcaatgcggccattcgccctgtcccccaaccctgaactccacactgccactccgtgctcattttttctgaaggggaaatattcatctccttgttgttttgtaccatggatactttagcatcattctcatactactaggagtgtaggtaaggagtccacacacgagtttgcaaacaccattaagcctattttgcttgattagtgccctgcaacacttcatatgttcaagacaaaatccatacccatgtctattgttgtatgatattatttgcattgaccgttgctgctcttcttgattgcagtcactaacattgcattaatctatgtgatacatttattcaggcgattcccatttctcagtgatgtcgatgtcctgtactcctgtatatttggattcaacaatatgccattagtatgctgtcaagcgtcctatttgcaagagataaatggcttacgcccgaggggcttattcttccttatcatggtatgatataattatcatacaaaaatgttacactgcttttacagggtgtacctcatctatttgcttgtacaattcatcttactactgctttgacaaacattggtctgctctgctttggtctgtgctttaggattctgtttcattgggagaaacaaatgcccttgcttactttcattataactgtgctatttttttgatccaatgttgttctaagatcaagaagtggaatacttgttctaagggtcccaagttgggtggtggtggtgggaagcgttttcaggtcggtcgtgactttggttatccactgaaaagatatgcttggtggtgctttcttgtgttgaagaacaagtatcccacggaaccacaaccgtttgtattatctggtgatttcctacattattagctggcctaactaaaccatgcgctcagaccctaaaccagctgtaagtctgtaacttaaaagcacagtgcactagcggaatggggttccttgctttttggagcgtttccccagtcagatcggcggcagggcaggtcacgtggacggggctccttgttgctggaactaaataccgtggagagtttgaagtgagactaaagaaacttatggaggaaattaagcaaaatgaagacattattctctttattgattaagtgcacacactgattggagcaggtgcagcagaagtgcattggtgccacaacactggatgagtataggaagcatatagagaaagatcctgccttggaaagaaggtttcaaccagttaaggttccagagcctactatggatgaaacaatacagatcttaagaggacttcgtgagagatatgaacttcatcacaaactgagatacacagatgatgctttaattgctgctgcacagctgtcttatcagtatatcagcgatcgttttctgcctgacaaagccattgacttgattgatgaagctggatctcgtgttaggctgaggcatgcgcagctccctgatgaagccaaagagctggacaaagagctgcggcagataagcaagcagaaaaatgaggctgtacgtggccaagattttgagaaggtatactgttgtttggcacagcggtgacaaagccgatccgctcccacctctctagcaacgtcgatatggttaataccaagcattatgttgtttccttttgagataaatattttgttactgattttaccttttgtctcctcttcttgttttttgttctagaatctgtagcaaatggctaacgatgaggatatccattactttgtttatgacaataaaactgatatgttcaagattccgtagcaacgcacgggcatctaact

SEQ ID NO: 32471 - DNA, 1744 bp, Zea Mays
gcctgctggcctggaacaccgtcgtctactcgctcacgttcctgagtgctgcatctgccttgcgtagtacggggagaaggaggaggttcggcagctgccgtgcacacacgtgtttcatctcaagtgcatatacaggtggctcaggatcatctcctcttgccctctctgcaagcaagagctcaagtgaactttatattcattacacacatgacattctcgcttattctttggatcaaggtgttagtatcctagacacaacagatattttccagctaacaagggaaatcaaggaagaattgatctttatattagcaggcggatgcaatcactaatcaaaaccacgatgcaaggtaacctaaatggattttaaattttattttggattgttaaatctttatttctgactactattgttttatgtcgtggatgccctcgtgaggttctacgccgacgccttcaggagggattcacagaggccatggtgaggatggccagcttgagtcggctcaccgggagcagcgcgagatccgctacaactaaatgataggaggcgattcccatttctcagtgatgtcgatgtcctgtactcctgtatatttggattcaacaatatgccattagtatgctgtcaagcgtcctatttgcaagagataaatggcttacgcccgaggggcttattcttccttatcatggtcggtcgtgactttggttatccactgaaaagatatgcttggtggtgctttcttgtgttgaagaacaagtatcccacggaaccacaaccgtttgtattatctggtgatttcctacattattagctggcctaactaaaccatgcgctcagaccctaaaccagctgtaagtctgtaacttaaaagcacagtgcactagcggaatggggttccttgctttttggagcgtttccccagtcagatcggcggcagggcaggtcacgtggacggggctccttgttgctggaactaaataccgtggagagtttgaagtgagactaaagaaacttatggaggaaattaagcaaaatgaagacattattctctttattgattaagtgcacacactgattggagcaggtgcagcagaagtgcattggtgccacaacactggatgagtataggaagcatatagagaaagatcctgccttggaaagaaggtttcaaccagttaaggttccagagcctactatggatgaaacaatacagatcttaagaggacttcgtgagagatatgaacttcatcacaaactgagatacacagatgatgctttaattgctgctgcacagctgtcttatcagtatatcagcgatcgttttctgcctgacaaagccattgacttgattgatgaagctggatctcgtgttaggctgaggcatgcgcagctccctgatgaagccaaagagctggacaaagagctgcggcagataagcaagcagaaaaatgaggctgtacgtggccaagattttgagaaggtatactgttgtttggcacagcggtgacaaagccgatccgctcccacctctctagcaacgtcgatatggttaataccaagcattatgttgtttccttttgagataaatattttgttactgattttaccttttgtctcctcttcttgttttttgttctagaatctgtagcaaatggctaacgatgaggatatccattactttgtttatgacaataaaactgatatgttcaagattccgtagcaacgcacgggcatctaact

SEQ ID NO: 32472 - DNA, 2476 bp, Zea Mays
ctggcctggaacaccgtcgtctactcgctcacgttcctgagtgctgcatctgccttgcgtagtacggggagaaggaggaggttcggcagctgccgtgcacacacgtgtttcatctcaagtgcatatacaggtggctcaggatcatctcctcttgccctctctgcaagcaagagctcaagtgaactttatattcattacacacatgacattctcgcttattctttggatcaaggtttccagctaacaagggaaatcaaggaagaattgatctttatattagcaggcggatgcaatcactaatcaaaaccacgatgcaaggtaacctaaatggattttaaattttattttggattgttaaatctttatttctgactactattgttttatgtcgtggatgccctcgtgaggttctacgccgacgccttcaggagggattcacagaggccatggtgaggatggccagcttgagtcggctcaccgggagcagcgcgagatccgctacaactaaatgataggaggcaaggaaacaggatctgtcacggaagtgtgttgttctgaaacagtcacaaagagggcctaagaagctgatggaatcctcattcaccgccgctaaggagtttgagcgggatcggagaggagacgtcagttcttcctcctctgctcaatgcggccattcgccctgtcccccaaccctgaactccacactgccactccgtgctcattttttctgaaggggaaatattcatctccttgttgttttgtaccatggatactttagcatcattctcatactactaggagtgtaggtaaggagtccacacacgagtttgcaaacaccattaagcctattttgcttgattagtgccctgcaacacttcatatgttcaagacaaaatccatacccatgtctattgttgtatgatattatttgcattgaccgttgctgctcttcttgattgcagtcactaacattgcattaatctatgtgatacatttattcaggcgattcccatttctcagtgatgtcgatgtcctgtactcctgtatatttggattcaacaatatgccattagtatgctgtcaagcgtcctatttgcaagagataaatggcttacgcccgaggggcttattcttccttatcatggtatgatataattatcatacaaaaatgttacactgcttttacagggtgtacctcatctatttgcttgtacaattcatcttactactgctttgacaaacattggtctgctctgctttggtctgtgctttaggattctgtttcattgggagaaacaaatgcccttgcttactttcattataactgtgctatttttttgatccaatgttgttctaagatcaagaagtggaatacttgttctaagggtcccaagttgggtggtggtggtgggaagcgttttcaggtcggtcgtgactttggttatccactgaaaagatatgcttggtggtgctttcttgtgttgaagaacaagtatcccacggaaccacaaccgtttgtattatctggtgatttcctacattattagctggcctaactaaaccatgcgctcagaccctaaaccagctgtaagtctgtaacttaaaagcacagtgcactagcggaatggggttccttgctttttggagcgtttccccagtcagatcggcggcagggcaggtcacgtggacggggctccttgttgctggaactaaataccgtggagagtttgaagtgagactaaagaaacttatggaggaaattaagcaaaatgaagacattattctctttattgattaagtgcacacactgattggagcaggtgcagcagaagtgcattggtgccacaacactggatgagtataggaagcatatagagaaagatcctgccttggaaagaaggtttcaaccagttaaggttccagagcctactatggatgaaacaatacagatcttaagaggacttcgtgagagatatgaacttcatcacaaactgagatacacagatgatgctttaattgctgctgcacagctgtcttatcagtatatcagcgatcgttttctgcctgacaaagccattgacttgattgatgaagctggatctcgtgttaggctgaggcatgcgcagctccctgatgaagccaaagagctggacaaagagctgcggcagataagcaagcagaaaaatgaggctgtacgtggccaagattttgagaaggtatactgttgtttggcacagcggtgacaaagccgatccgctcccacctctctagcaacgtcgatatggttaataccaagcattatgttgtttccttttgagataaatattttgttactgattttaccttttgtctcctcttcttgttttttgttctagaatctgtagcaaatggctaacgatgaggatatccattactttgtttatgacaataaaactgatatgttcaagattccgtagcaacgcacgggcatctaact

SEQ ID NO: 32473 - DNA, 1743 bp, Zea Mays
caccgtcgtctactcgctcacgttcctgagtgctgcatctgccttgcgtagtacggggagaaggaggaggttcggcagctgccgtgcacacacgtgtttcatctcaagtgcatatacaggtggctcaggatcatctcctcttgccctctctgcaagcaagagctcaagtgaactttatattcattacacacatgacattctcgcttattctttggatcaaggtgttagtatcctagacacaacagatattttccagctaacaagggaaatcaaggaagaattgatctttatattagcaggcggatgcaatcactaatcaaaaccacgatgcaaggtaacctaaatggattttaaattttattttggattgttaaatctttatttctgactactattgttttatgtcgtggatgccctcgtgaggttctacgccgacgccttcaggagggattcacagaggccatggtgaggatggccagcttgagtcggctcaccgggagcagcgcgagatccgctacaactaaatgataggaggcaaggaaacaggatctgtcacggaaggcgattcccatttctcagtgatgtcgatgtcctgtactcctgtatatttggattcaacaatatgccattagtatgctgtcaagcgtcctatttgcaagagataaatggcttacgcccgaggggcttattcttccttatcatggtcggtcgtgactttggttatccactgaaaagatatgcttggtggtgctttcttgtgttgaagaacaagtatcccacggaaccacaaccgtttgtattatctggtgatttcctacattattagctggcctaactaaaccatgcgctcagaccctaaaccagctgtaagtctgtaacttaaaagcacagtgcactagcggaatggggttccttgctttttggagcgtttccccagtcagatcggcggcagggcaggtcacgtggacggggctccttgttgctggaactaaataccgtggagagtttgaagtgagactaaagaaacttatggaggaaattaagcaaaatgaagacattattctctttattgattaagtgcacacactgattggagcagtgcattggtgccacaacactggatgagtataggaagcatatagagaaagatcctgccttggaaagaaggtttcaaccagttaaggttccagagcctactatggatgaaacaatacagatcttaagaggacttcgtgagagatatgaacttcatcacaaactgagatacacagatgatgctttaattgctgctgcacagctgtcttatcagtatatcagcgatcgttttctgcctgacaaagccattgacttgattgatgaagctggatctcgtgttaggctgaggcatgcgcagctccctgatgaagccaaagagctggacaaagagctgcggcagataagcaagcagaaaaatgaggctgtacgtggccaagattttgagaaggtatactgttgtttggcacagcggtgacaaagccgatccgctcccacctctctagcaacgtcgatatggttaataccaagcattatgttgtttccttttgagataaatattttgttactgattttaccttttgtctcctcttcttgttttttgttctagaatctgtagcaaatggctaacgatgaggatatccattactttgtttatgacaataaaactgatatgttcaagattccgtagcaacgcacgggcatctaact

SEQ ID NO: 32474 - DNA, 1876 bp, Zea Mays
ctcacgttcctgagtgctgcatctgccttgcgtagtacggggagaaggaggaggttcggcagctgccgtgcacacacgtgtttcatctcaagtgcatatacagttccagctaacaagggaaatcaaggaagaattgatctttatattagcaggcggatgcaatcactaatcaaaaccacgatgcaaggtaacctaaatggattttaaattttattttggattgttaaatctttatttctgactactattgttttatgtcgtggatgccctcgtgaggttctacgccgacgccttcaggagggattcacagaggccatggtgaggatggccagcttgagtcggctcaccgggagcagcgcgagatccgctacaactaaatgataggaggcaaggaaacaggatctgtcacggaaggcgattcccatttctcagtgatgtcgatgtcctgtactcctgtatatttggattcaacaatatgccattagtatgctgtcaagcgtcctatttgcaagagataaatggcttacgcccgaggggcttattcttccttatcatggtatgatataattatcatacaaaaatgttacactgcttttacagggtgtacctcatctatttgcttgtacaattcatcttactactgctttgacaaacattggtctgctctgctttggtctgtgctttaggattctgtttcattgggagaaacaaatgcccttgcttactttcattataactgtgctatttttttgatccaatgttgttctaagatcaagaagtggaatacttgttctaagggtcccaagttgggtggtggtggtgggaagcgttttcaggtcggtcgtgactttggttatccactgaaaagatatgcttggtggtgctttcttgtgttgaagaacaagtatcccacggaaccacaaccgtttgtattatctggtgatttcctacattattagctggcctaactaaaccatgcgctcagaccctaaaccagctgtaagtctgtaacttaaaagcacagtgcactagcggaatggggttccttgctttttggagcgtttccccagtcagatcggcggcagggcaggtcacgtggacggggctccttgttgctggaactaaataccgtggagagtttgaagtgagactaaagaaacttatggaggaaattaagcaaaatgaagacattattctctttattgattaagtgcacacactgattggagcagtgcattggtgccacaacactggatgagtataggaagcatatagagaaagatcctgccttggaaagaaggtttcaaccagttaaggttccagagcctactatggatgaaacaatacagatcttaagaggacttcgtgagagatatgaacttcatcacaaactgagatacacagatgatgctttaattgctgctgcacagctgtcttatcagtatatcagcgatcgttttctgcctgacaaagccattgacttgattgatgaagctggatctcgtgttaggctgaggcatgcgcagctccctgatgaagccaaagagctggacaaagagctgcggcagataagcaagcagaaaaatgaggctgtacgtggccaagattttgagaaggtatactgttgtttggcacagcggtgacaaagccgatccgctcccacctctctagcaacgtcgatatggttaataccaagcattatgttgtttccttttgagataaatattttgttactgattttaccttttgtctcctcttcttgttttttgttctagaatctgtagcaaatggctaacgatgaggatatccattactttgtttatgacaataaaactgatatgttcaagattccgtagcaacgcacgggcatctaact

SEQ ID NO: 32475 - DNA, 2557 bp, Zea Mays
ctcacgttcctgagtgctgcatctgccttgcgtagtacggggagaaggaggaggttcggcagctgccgtgcacacacgtgtttcatctcaagtgcatatacagttccagctaacaagggaaatcaaggaagaattgatctttatattagcaggcggatgcaatcactaatcaaaaccacgatgcaaggtaacctaaatggattttaaattttattttggattgttaaatctttatttctgactactattgttttatgtcgtggatgccctcgtgaggttctacgccgacgccttcaggagggattcacagaggccatggtgaggatggccagcttgagtcggctcaccgggagcagcgcgagatccgctacaactaaatgataggaggtttcgctgccatttgcagcgactgtgttccagttcgaccgtttggggaaaaggtgagtcctcccatttcatgtagatgcatgggttgataaacatttgggagaaatgtcccctctttaattcgaaaaatagttgtgtatttgttcgacttatctgcggcgatgtacctttgtacgcgtacaaacatctatagacaaaaacaaaatgacacttcatggatgtagcaagagcgggctacgagaaactagcagatcatgcctaaaattcaattagcattagggtcagacaaaatactacattttctggattacaataatgtataggtgcatgaaaaaaacttgattccaatgtgtgacaaagtgtgaagatgaaagtgcactttcacgctgtcataacgcggatttgttttccttgctcatggaatgtgcatttgtgtgtttgcgtctactgtgcggctacaggcaaggaaacaggatctgtcacggaaggtatgtacacattacagtaaacgttgttcgtagaacatgcactttgtggagtggtctttgaatgagatgcgtttagaattaccttttcatgcagatctcttgttcagaacctggttgcttagtccattcttgttttgggttgctactacaaaaaagcggcaatgctttatatgaatcgcctcttactaatatccagggtcaaatggtggtccttcagtgaccagactaatatttgagcattaatcttatttgtttcacagtcatttcttgtttatcaatatgaatgctatttttttgcgagtggacttgttaactaataagctcatagatatttgaacaaaaaatagtgttttgttctaaaactgtcataaagagtgcatacatcatagctatggtttcaactgtgatttgatgtcctataatattgagtgtcctatagtgtgttgttctgaaacagtcacaaagagggcctaagaagctgatggaatcctcattcaccgccgctaaggagtttgagcgggatcggagaggagacgtcagttcttcctcctctgctcaatgcggccattcgccctgtcccccaaccctgaactccacactgccactccgtgctcattttttctgaaggggaaatattcatctccttgttgttttgtaccatggatactttagcatcattctcatactactaggagtgtaggtaaggagtccacacacgagtttgcaaacaccattaagcctattttgcttgattagtgccctgcaacacttcatatgttcaagacaaaatccatacccatgtctattgttgtatgatattatttgcattgaccgttgctgctcttcttgattgcagtcactaacattgcattaatctatgtgatacatttattcaggcgattcccatttctcagtgatgtcgatgtcctgtactcctgtatatttggattcaacaatatgccattagtatgctgtcaagcgtcctatttgcaagagataaatggcttacgcccgaggggcttattcttccttatcatgtgcattggtgccacaacactggatgagtataggaagcatatagagaaagatcctgccttggaaagaaggtttcaaccagttaaggttccagagcctactatggatgaaacaatacagatcttaagaggacttcgtgagagatatgaacttcatcacaaactgagatacacagatgatgctttaattgctgctgcacagctgtcttatcagtatatcagcgatcgttttctgcctgacaaagccattgacttgattgatgaagctggatctcgtgttaggctgaggcatgcgcagctccctgatgaagccaaagagctggacaaagagctgcggcagataagcaagcagaaaaatgaggctgtacgtggccaagattttgagaaggtatactgttgtttggcacagcggtgacaaagccgatccgctcccacctctctagcaacgtcgatatggttaataccaagcattatgttgtttccttttgagataaatattttgttactgattttaccttttgtctcctcttcttgttttttgttctagaatctgtagcaaatggctaacgatgaggatatccattactttgtttatgacaataaaactgatatgttcaagattccgtagcaacgcacgggcatctaact

SEQ ID NO: 32476 - DNA, 1545 bp, Zea Mays
gtaaaaacctgagtgctgcatctgccttgcgtagtacggggagaaggaggaggttcggcagctgccgtgcacacacgtgtttcatctcaagtgcatatacagttccagctaacaagggaaatcaaggaagaattgatctttatattagcaggcggatgcaatcactaatcaaaaccacgatgcaaggtaacctaaatggattttaaattttattttggattgttaaatctttatttctgactactattgttttatgtcgtggatgccctcgtgaggttctacgccgacgccttcaggagggattcacagaggccatggtgaggatggccagcttgagtcggctcaccgggagcagcgcgagatccgctacaactaaatgataggaggcaaggaaacaggatctgtcacggaaggcgattcccatttctcagtgatgtcgatgtcctgtactcctgtatatttggattcaacaatatgccattagcgttttcaggtcggtcgtgactttggttatccactgaaaagatatgcttggtggtgctttcttgtgttgaagaacaagtatcccacggaaccacaaccgtttgtattatctggtgatttcctacattattagctggcctaactaaaccatgcgctcagaccctaaaccagctgtaagtctgtaacttaaaagcacagtgcactagcggaatggggttccttgctttttggagcgtttccccagtcagatcggcggcagggcaggtcacgtggacggggctccttgttgctggaactaaataccgtggagagtttgaagtgagactaaagaaacttatggaggaaattaagcaaaatgaagacattattctctttattgattaagtgcacacactgattggagcaggtgcagcagaagtgcattggtgccacaacactggatgagtataggaagcatatagagaaagatcctgccttggaaagaaggtttcaaccagttaaggttccagagcctactatggatgaaacaatacagatcttaagaggacttcgtgagagatatgaacttcatcacaaactgagatacacagatgatgctttaattgctgctgcacagctgtcttatcagtatatcagcgatcgttttctgcctgacaaagccattgacttgattgatgaagctggatctcgtgttaggctgaggcatgcgcagctccctgatgaagccaaagagctggacaaagagctgcggcagataagcaagcagaaaaatgaggctgtacgtggccaagattttgagaaggtatactgttgtttggcacagcggtgacaaagccgatccgctcccacctctctagcaacgtcgatatggttaataccaagcattatgttgtttccttttgagataaatattttgttactgattttaccttttgtctcctcttcttgttttttgttctagaatctgtagcaaatggctaacgatgaggatatccattactttgtttatgacaataaaactgatatgttcaagattccgtagcaacgcacgggcatctaact

SEQ ID NO: 32477 - DNA, 1711 bp, Zea Mays
gtaaaaacctgagtgctgcatctgccttgcgtagtacggggagaaggaggaggttcggcagctgccgtgcacacacgtgtttcatctcaagtgcatatacaggtggctcaggatcatctcctcttgccctctctgcaagcaagagctcaagtgaactttatattcattacacacatgacattctcgcttattctttggatcaaggtgttagtatcctagacacaacagatattttccagctaacaagggaaatcaaggaagaattgatctttatattagcaggcggatgcaatcactaatcaaaaccacgatgcaaggtaacctaaatggattttaaattttattttggattgttaaatctttatttctgactactattgttttatgtcgtggatgccctcgtgaggttctacgccgacgccttcaggagggattcacagaggccatggtgaggatggccagcttgagtcggctcaccgggagcagcgcgagatccgctacaactaaatgataggaggcgattcccatttctcagtgatgtcgatgtcctgtactcctgtatatttggattcaacaatatgccattagtatgctgtcaagcgtcctatttgcaagagataaatggcttacgcccgaggggcttattcttccttatcatggtcggtcgtgactttggttatccactgaaaagatatgcttggtggtgctttcttgtgttgaagaacaagtatcccacggaaccacaaccgtttgtattatctggtgatttcctacattattagctggcctaactaaaccatgcgctcagaccctaaaccagctgtaagtctgtaacttaaaagcacagtgcactagcggaatggggttccttgctttttggagcgtttccccagtcagatcggcggcagggcaggtcacgtggacggggctccttgttgctggaactaaataccgtggagagtttgaagtgagactaaagaaacttatggaggaaattaagcaaaatgaagacattattctctttattgattaagtgcacacactgattggagcaggtgcagcagaagtgcattggtgccacaacactggatgagtataggaagcatatagagaaagatcctgccttggaaagaaggtttcaaccagttaaggttccagagcctactatggatgaaacaatacagatcttaagaggacttcgtgagagatatgaacttcatcacaaactgagatacacagatgatgctttaattgctgctgcacagctgtcttatcagtatatcagcgatcgttttctgcctgacaaagccattgacttgattgatgaagctggatctcgtgttaggctgaggcatgcgcagctccctgatgaagccaaagagctggacaaagagctgcggcagataagcaagcagaaaaatgaggctgtacgtggccaagattttgagaaggtatactgttgtttggcacagcggtgacaaagccgatccgctcccacctctctagcaacgtcgatatggttaataccaagcattatgttgtttccttttgagataaatattttgttactgattttaccttttgtctcctcttcttgttttttgttctagaatctgtagcaaatggctaacgatgaggatatccattactttgtttatgacaataaaactgatatgttcaagattccgtagcaacgcacgggcatctaact

SEQ ID NO: 32478 - DNA, 2207 bp, Zea Mays
taaaaacctgagtgctgcatctgccttgcgtagtacggggagaaggaggaggttcggcagctgccgtgcacacacgtgtttcatctcaagtgcatatacaggtggctcaggatcatctcctcttgccctctctgcaagcaagagctcaagtgaactttatattcattacacacatgacattctcgcttattctttggatcaaggtgttagtatcctagacacaacagatattttccagctaacaagggaaatcaaggaagaattgatctttatattagcaggcggatgcaatcactaatcaaaaccacgatgcaaggtaacctaaatggattttaaattttattttggattgttaaatctttatttctgactactattgttttatgtcgtggatgccctcgtgaggttctacgccgacgccttcaggagggattcacagaggccatggtgaggatggccagcttgagtcggctcaccgggagcagcgcgagatccgctacaactaaatgataggaggtttcgctgccatttgcagcgactgtgttccagttcgaccgtttggggaaaaggcaaggaaacaggatctgtcacggaaggtatgtacacattacagtaaacgttgttcgtagaacatgcactttgtggagtggtctttgaatgagatgcgtttagaattaccttttcatgcagatctcttgttcagaacctggttgcttagtccattcttgttttgggttgctactacaaaaaagcggcaatgctttatatgaatcgcctcttactaatatccagggtcaaatggtggtccttcagtgaccagactaatatttgagcattaatcttatttgtttcacagtcatttcttgtttatcaatatgaatgctatttttttgcgagtggacttgttaactaataagctcatagatatttgaacaaaaaatagtgttttgttctaaaactgtcataaagagtgcatacatcatagctatggtttcaactgtgatttgatgtcctataatattgagtgtcctatagtgtgttgttctgaaacagtcacaaagagggcctaagaagctgatggaatcctcattcaccgccgctaaggagtttgagcgggatcggagaggagacgtcagttcttcctcctctgctcaatgcggccattcgccctgtcccccaaccctgaactccacactgccactccgtgctcattttttctgaaggggaaatattcatctccttgttgttttgtaccatggatactttagcatcattctcatactactaggagtgtaggtaaggagtccacacacgagtttgcaaacaccattaagcctattttgcttgattagtgccctgcaacacttcatatgttcaagacaaaatccatacccatgtctattgttgtatgatattatttgcattgaccgttgctgctcttcttgattgcagtcactaacattgcattaatctatgtgatacatttattcaggcgattcccatttctcagtgatgtcgatgtcctgtactcctgtatatttggattcaacaatatgccattagtgcattggtgccacaacactggatgagtataggaagcatatagagaaagatcctgccttggaaagaaggtttcaaccagttaaggttccagagcctactatggatgaaacaatacagatcttaagaggacttcgtgagagatatgaacttcatcacaaactgagatacacagatgatgctttaattgctgctgcacagctgtcttatcagtatatcagcgatcgttttctgcctgacaaagccattgacttgattgatgaagctggatctcgtgttaggctgaggcatgcgcagctccctgatgaagccaaagagctggacaaagagctgcggcagataagcaagcagaaaaatgaggctgtacgtggccaagattttgagaaggtatactgttgtttggcacagcggtgacaaagccgatccgctcccacctctctagcaacgtcgatatggttaataccaagcattatgttgtttccttttgagataaatattttgttactgattttaccttttgtctcctcttcttgttttttgttctagaatctgtagcaaatggctaacgatgaggatatccattactttgtttatgacaataaaactgatatgttcaagattccgtagcaacgcacgggcatctaact

SEQ ID NO: 32479 - DNA, 1700 bp, Zea Mays
ctgtgctctgggagtgctgcatctgccttgcgtagtacggggagaaggaggaggttcggcagctgccgtgcacacacgtgtttcatctcaagtgcatatacaggtggctcaggatcatctcctcttgccctctctgcaagcaagagctcaagtgaactttatattcattacacacatgacattctcgcttattctttggatcaaggtgttagtatcctagacacaacagatattttccagctaacaagggaaatcaaggaagaattgatctttatattagcaggcggatgcaatcactaatcaaaaccacgatgcaaggtaacctaaatggattttaaattttattttggattgttaaatctttatttctgactactattgttttatgtcgtggatgccctcgtgaggttctacgccgacgccttcaggagggattcacagaggccatggtgaggatggccagcttgagtcggctcaccgggagcagcgcgagatccgctacaactaaatgataggaggcgattcccatttctcagtgatgtcgatgtcctgtactcctgtatatttggattcaacaatatgccattagtatgctgtcaagcgtcctatttgcaagagataaatggcttacgcccgaggggcttattcttccttatcatggtcggtcgtgactttggttatccactgaaaagatatgcttggtggtgctttcttgtgttgaagaacaagtatcccacggaaccacaaccgtttgtattatctggtgatttcctacattattagctggcctaactaaaccatgcgctcagaccctaaaccagctgtaagtctgtaacttaaaagcacagtgcactagcggaatggggttccttgctttttggagcgtttccccagtcagatcggcggcagggcaggtcacgtggacggggctccttgttgctggaactaaataccgtggagagtttgaagtgagactaaagaaacttatggaggaaattaagcaaaatgaagacattattctctttattgattaagtgcacacactgattggagcagtgcattggtgccacaacactggatgagtataggaagcatatagagaaagatcctgccttggaaagaaggtttcaaccagttaaggttccagagcctactatggatgaaacaatacagatcttaagaggacttcgtgagagatatgaacttcatcacaaactgagatacacagatgatgctttaattgctgctgcacagctgtcttatcagtatatcagcgatcgttttctgcctgacaaagccattgacttgattgatgaagctggatctcgtgttaggctgaggcatgcgcagctccctgatgaagccaaagagctggacaaagagctgcggcagataagcaagcagaaaaatgaggctgtacgtggccaagattttgagaaggtatactgttgtttggcacagcggtgacaaagccgatccgctcccacctctctagcaacgtcgatatggttaataccaagcattatgttgtttccttttgagataaatattttgttactgattttaccttttgtctcctcttcttgttttttgttctagaatctgtagcaaatggctaacgatgaggatatccattactttgtttatgacaataaaactgatatgttcaagattccgtagcaacgcacgggcatctaact

SEQ ID NO: 32480 - DNA, 3374 bp, Zea Mays
gtgctctgggagtgctgcatctgccttgcgtagtacggggagaaggaggaggttcggcagctgccgtgcacacacgtgtttcatctcaagtgcatatacaggtggctcaggatcatctcctcttgccctctctgcaagcaagagctcaagtgaactttatattcattacacacatgacattctcgcttattctttggatcaaggtgttagtatcctagacacaacagatattttccagctaacaagggaaatcaaggaagaattgatctttatattagcaggcggatgcaatcactaatcaaaaccacgatgcaaggtaacctaaatggattttaaattttattttggattgttaaatctttatttctgactactattgttttatgtcgtggatgccctcgtgaggttctacgccgacgccttcaggagggattcacagaggccatggtgaggatggccagcttgagtcggctcaccgggagcagcgcgagatccgctacaactaaatgataggaggtttcgctgccatttgcagcgactgtgttccagttcgaccgtttggggaaaaggtgagtcctcccatttcatgtagatgcatgggttgataaacatttgggagaaatgtcccctctttaattcgaaaaatagttgtgtatttgttcgacttatctgcggcgatgtacctttgtacgcgtacaaacatctatagacaaaaacaaaatgacacttcatggatgtagcaagagcgggctacgagaaactagcagatcatgcctaaaattcaattagcattagggtcagacaaaatactacattttctggattacaataatgtataggtgcatgaaaaaaacttgattccaatgtgtgacaaagtgtgaagatgaaagtgcactttcacgctgtcataacgcggatttgttttccttgctcatggaatgtgcatttgtgtgtttgcgtctactgtgcggctacaggcaaggaaacaggatctgtcacggaaggtatgtacacattacagtaaacgttgttcgtagaacatgcactttgtggagtggtctttgaatgagatgcgtttagaattaccttttcatgcagatctcttgttcagaacctggttgcttagtccattcttgttttgggttgctactacaaaaaagcggcaatgctttatatgaatcgcctcttactaatatccagggtcaaatggtggtccttcagtgaccagactaatatttgagcattaatcttatttgtttcacagtcatttcttgtttatcaatatgaatgctatttttttgcgagtggacttgttaactaataagctcatagatatttgaacaaaaaatagtgttttgttctaaaactgtcataaagagtgcatacatcatagctatggtttcaactgtgatttgatgtcctataatattgagtgtcctatagtgtgttgttctgaaacagtcacaaagagggcctaagaagctgatggaatcctcattcaccgccgctaaggagtttgagcgggatcggagaggagacgtcagttcttcctcctctgctcaatgcggccattcgccctgtcccccaaccctgaactccacactgccactccgtgctcattttttctgaaggggaaatattcatctccttgttgttttgtaccatggatactttagcatcattctcatactactaggagtgtaggtaaggagtccacacacgagtttgcaaacaccattaagcctattttgcttgattagtgccctgcaacacttcatatgttcaagacaaaatccatacccatgtctattgttgtatgatattatttgcattgaccgttgctgctcttcttgattgcagtcactaacattgcattaatctatgtgatacatttattcaggcgattcccatttctcagtgatgtcgatgtcctgtactcctgtatatttggattcaacaatatgccattagtatgctgtcaagcgtcctatttgcaagagataaatggcttacgcccgaggggcttattcttccttatcatggtatgatataattatcatacaaaaatgttacactgcttttacagggtgtacctcatctatttgcttgtacaattcatcttactactgctttgacaaacattggtctgctctgctttggtctgtgctttaggattctgtttcattgggagaaacaaatgcccttgcttactttcattataactgtgctatttttttgatccaatgttgttctaagatcaagaagtggaatacttgttctaagggtcccaagttgggtggtggtggtgggaagcgttttcaggtcggtcgtgactttggttatccactgaaaagatatgcttggtggtgctttcttgtgttgaagaacaagtatcccacggaaccacaaccgtttgtattatctggtgatttcctacattattagctggcctaactaaaccatgcgctcagaccctaaaccagctgtaagtctgtaacttaaaagcacagtgcactagcggaatggggttccttgctttttggagcgtttccccagtcagatcggcggcagggcaggtcacgtggacggggctccttgttgctggaactaaataccgtggagagtttgaagtgagactaaagaaacttatggaggaaattaagcaaaatgaagacattattctctttattgattaagtgcacacactgattggagcaggtgcagcagaagtgcattggtgccacaacactggatgagtataggaagcatatagagaaagatcctgccttggaaagaaggtttcaaccagttaaggttccagagcctactatggatgaaacaatacagatcttaagaggacttcgtgagagatatgaacttcatcacaaactgagatacacagatgatgctttaattgctgctgcacagctgtcttatcagtatatcagcgatcgttttctgcctgacaaagccattgacttgattgatgaagctggatctcgtgttaggctgaggcatgcgcagctccctgatgaagccaaagagctggacaaagagctgcggcagataagcaagcagaaaaatgaggctgtacgtggccaagattttgagaaggtatactgttgtttggcacagcggtgacaaagccgatccgctcccacctctctagcaacgtcgatatggttaataccaagcattatgttgtttccttttgagataaatattttgttactgattttaccttttgtctcctcttcttgttttttgttctagaatctgtagcaaatggctaacgatgaggatatccattactttgtttatgacaataaaactgatatgttcaagattccgtagcaacgcacgggcatctaact

SEQ ID NO: 32481 - DNA, 1777 bp, Zea Mays
gctctgggagtgctgcatctgccttgcgtagtacggggagaaggaggaggttcggcagctgccgtgcacacacgtgtttcatctcaagtgcatatacaggtgttagtatcctagacacaacagatattttccagctaacaagggaaatcaaggaagaattgatctttatattagcaggcggatgcaatcactaatcaaaaccacgatgcaaggttctacgccgacgccttcaggagggattcacagaggccatggtgaggatggccagcttgagtcggctcaccgggagcagcgcgagatccgctacaactaaatgataggaggtattttctagaaattacaaccccacctctgtcaggccttctgttgagtgaatttggtttgcacaccctcaccctgcacgctcttaccggactaccgctcctagcacccactcacacgagattgcaccccgctcgccatgccaccatagatccagctagggcgacatcattgtgggcaatcctgtgcgagagaatgtgaaattgttgtaggattgataatgaccaggggtttctccgcccacatgcaccaggtttcgctgccatttgcagcgactgtgttccagttcgaccgtttggggaaaaggtgagtcctcccatttcatgtagatgcatgggttgataaacatttgggagaaatgtcccctctttaattcgaaaaatagttgtgtatttgttcgacttatctgcggcgatgtacctttgtacgcgtacaaacatctatagacaaaaacaaaatgacacttcatggatgtagcaagagcgggctacgagaaactagcagatcatgcctaaaattcaattagcattagggtcagacaaaatactacattttctggattacaataatgtataggtgcatgaaaaaaacttgattccaatgtgtgacaaagtgtgaagatgaaagtgcactttcacgctgtcataacgcggatttgttttccttgctcatggaatgtgcatttgtgtgtttgcgtctactgtgcggctacaggcaaggaaacaggatctgtcacggaaggcgattcccatttctcagtgatgtcgatgtcctgtactcctgtatatttggattcaacaatatgccattagtgcattggtgccacaacactggatgagtataggaagcatatagagaaagatcctgccttggaaagaaggtttcaaccagttaaggttccagagcctactatggatgaaacaatacagatcttaagaggacttcgtgagagatatgaacttcatcacaaactgagatacacagatgatgctttaattgctgctgcacagctgtcttatcagtatatcagcgatcgttttctgcctgacaaagccattgacttgattgatgaagctggatctcgtgttaggctgaggcatgcgcagctccctgatgaagccaaagagctggacaaagagctgcggcagataagcaagcagaaaaatgaggctgtacgtggccaagattttgagaaggtatactgttgtttggcacagcggtgacaaagccgatccgctcccacctctctagcaacgtcgatatggttaataccaagcattatgttgtttccttttgagataaatattttgttactgattttaccttttgtctcctcttcttgttttttgttctagaatctgtagcaaatggctaacgatgaggatatccattactttgtttatgacaataaaactgatatgttcaagattccgtagcaacgcacgggcatctaact

SEQ ID NO: 32482 - DNA, 1173 bp, Zea Mays
tcctctcaccccatacgatgtgggcatgatttaggaggcagtatgctgtcaagcgtcctatttgcaagagataaatggcttacgcccgaggggcttattcttccttatcatgcgttttcaggtcggtcgtgactttggttatccactgaaaagatatgcttggtggtgctttcttgtgttgaagaacaagtatcccacggaaccacaaccgtttgtattatctggtgatttcctacattattagctggcctaactaaaccatgcgctcagaccctaaaccagctgtaagtctgtaacttaaaagcacagtgcactagcggaatggggttccttgctttttggagcgtttccccagtcagatcggcggcagggcaggtcacgtggacggggctccttgttgctggaactaaataccgtggagagtttgaagtgagactaaagaaacttatggaggaaattaagcaaaatgaagacattattctctttattgattaagtgcacacactgattggagcaggtgcagcagaagtgcattggtgccacaacactggatgagtataggaagcatatagagaaagatcctgccttggaaagaaggtttcaaccagttaaggttccagagcctactatggatgaaacaatacagatcttaagaggacttcgtgagagatatgaacttcatcacaaactgagatacacagatgatgctttaattgctgctgcacagctgtcttatcagtatatcagcgatcgttttctgcctgacaaagccattgacttgattgatgaagctggatctcgtgttaggctgaggcatgcgcagctccctgatgaagccaaagagctggacaaagagctgcggcagataagcaagcagaaaaatgaggctgtacgtggccaagattttgagaaggtatactgttgtttggcacagcggtgacaaagccgatccgctcccacctctctagcaacgtcgatatggttaataccaagcattatgttgtttccttttgagataaatattttgttactgattttaccttttgtctcctcttcttgttttttgttctagaatctgtagcaaatggctaacgatgaggatatccattactttgtttatgacaataaaactgatatgttcaagattccgtagcaacgcacgggcatctaact

SEQ ID NO: 32483 - DNA, 1207 bp, Zea Mays
catacgatgtgggcatgatttaggaggcagtatgctgtcaagcgtcctatttgcaagagataaatggcttacgcccgaggggcttattcttccttatcatgatcaagaagtggaatacttgttctaagggtcccaagttgggtggtggtggtgggaagcgttttcaggtcggtcgtgactttggttatccactgaaaagatatgcttggtggtgctttcttgtgttgaagaacaagtatcccacggaaccacaaccgtttgtattatctggtgatttcctacattattagctggcctaactaaaccatgcgctcagaccctaaaccagctgtaagtctgtaacttaaaagcacagtgcactagcggaatggggttccttgctttttggagcgtttccccagtcagatcggcggcagggcaggtcacgtggacggggctccttgttgctggaactaaataccgtggagagtttgaagtgagactaaagaaacttatggaggaaattaagcaaaatgaagacattattctctttattgattaagtgcacacactgattggagcagtgcattggtgccacaacactggatgagtataggaagcatatagagaaagatcctgccttggaaagaaggtttcaaccagttaaggttccagagcctactatggatgaaacaatacagatcttaagaggacttcgtgagagatatgaacttcatcacaaactgagatacacagatgatgctttaattgctgctgcacagctgtcttatcagtatatcagcgatcgttttctgcctgacaaagccattgacttgattgatgaagctggatctcgtgttaggctgaggcatgcgcagctccctgatgaagccaaagagctggacaaagagctgcggcagataagcaagcagaaaaatgaggctgtacgtggccaagattttgagaaggtatactgttgtttggcacagcggtgacaaagccgatccgctcccacctctctagcaacgtcgatatggttaataccaagcattatgttgtttccttttgagataaatattttgttactgattttaccttttgtctcctcttcttgttttttgttctagaatctgtagcaaatggctaacgatgaggatatccattactttgtttatgacaataaaactgatatgttcaagattccgtagcaacgcacgggcatctaact

SEQ ID NO: 32484 - DNA, 1146 bp, Zea Mays
gttaaatcatgctacgtcttgtccggacttaaaagtatgctgtcaagcgtcctatttgcaagagataaatggcttacgcccgaggggcttattcttccttatcatggtcggtcgtgactttggttatccactgaaaagatatgcttggtggtgctttcttgtgttgaagaacaagtatcccacggaaccacaaccgtttgtattatctggtgatttcctacattattagctggcctaactaaaccatgcgctcagaccctaaaccagctgtaagtctgtaacttaaaagcacagtgcactagcggaatggggttccttgctttttggagcgtttccccagtcagatcggcggcagggcaggtcacgtggacggggctccttgttgctggaactaaataccgtggagagtttgaagtgagactaaagaaacttatggaggaaattaagcaaaatgaagacattattctctttattgattaagtgcacacactgattggagcagtgcattggtgccacaacactggatgagtataggaagcatatagagaaagatcctgccttggaaagaaggtttcaaccagttaaggttccagagcctactatggatgaaacaatacagatcttaagaggacttcgtgagagatatgaacttcatcacaaactgagatacacagatgatgctttaattgctgctgcacagctgtcttatcagtatatcagcgatcgttttctgcctgacaaagccattgacttgattgatgaagctggatctcgtgttaggctgaggcatgcgcagctccctgatgaagccaaagagctggacaaagagctgcggcagataagcaagcagaaaaatgaggctgtacgtggccaagattttgagaaggtatactgttgtttggcacagcggtgacaaagccgatccgctcccacctctctagcaacgtcgatatggttaataccaagcattatgttgtttccttttgagataaatattttgttactgattttaccttttgtctcctcttcttgttttttgttctagaatctgtagcaaatggctaacgatgaggatatccattactttgtttatgacaataaaactgatatgttcaagattccgtagcaacgcacgggcatctaact

SEQ ID NO: 32485 - DNA, 1134 bp, Zea Mays
cgctcattcctggaggaaaaatcccgccgctgaaaactggcttcttcccagccgtgcttctctccctccctctatttctccctctgcgcgtcgagcttcttcctgctcgcgtccagttgcccctcctctttctactctctgcgcgcttccctctctctcctccatggccgtcgctgctccctggtccaagttcctgtgcgcgccctggagctcccctgcgcgcgtcccagctcgtcggtgcttcttccctgcgcccagccgctcctccctcctcccctgcgcgtcctcccagctccgctctgctcctggccggcgttcggcctcaagctcgcccccggccacttgcttcccccatggccggagctttttccccatcccagatctcgcccagttcgccccagcttggagctcgcccagcccaaccgcgcgtctctcccatgacgcttgcccagtccggccgtcggtgacagggccactcgcggcatcttcctcatgtccagctcggcctccaactccaactcgctcctccctcgtctccatggctgtgcgcgcgagctcgccagccgtgcgctcgcctagctcggatttcgtcagccgccgttctctggtccatgtgccggtcggcgtcgtggagttttgtttggtcggctcatcgttgacctcgctggtgtcgtcaaaccgtcgaaccccttcctcagtcgcttcgggtctccatgtcggttgtcgtcgttcgtcgtcgtgtcgtgtgtgcagcaacgtcgctgattcctccatagtgaacttcgcttcatcgattctcaccttcggttcggctcacgtttgcacgtcgaacgcgttcgccgcttaaccccgtgtcgctagagcttgtgacctcgccgtcgccggagccctcactggattcgtgtcctcgccagagctcacgctaacctgctcgaccacacctcgtcagcttgctccagactcgatctcgtcgttgttccgtgcgtcatcaagaaatcccaagaatcgggtgaagacgaagctagcagcgtgatgttcaccagacgctcgacaaattgcctgaatcggagaaaattaccgatctcgtggattcgagtcagctatttaaacggtacgataattaatcgtgtgata

SEQ ID NO: 32486 - DNA, 2110 bp, Zea Mays
agtgagtggagactggagactggagagtcacactggccgcgcctgcgctccgaggcagcggagcacggacgagagacgccgccagctcagccgttgattgatgccgcacgagcctcgcgacctgcattcgatacaaacaaggccggcgcatcggcattcctccttccttaaacccaccccggcatcgggcacgccgcacgccacgcctcaccgagtcaccttcccagccagctacccttccccctaccaattccaaatctctcacccggcttgaggatggcggcgcaggtggtcgcagcggcgggcaccccggtggccaggccgctgggcggtggatctggggccgacgcgctccggcccgcggcgaggatgccaagggagagaaggaccggtgctgtggccgcgagaggacgccgcgagtctcaggtggtatccgtcataagccgcgccccacgccccgatgccggggtgctgccggtgtcgcccgacgacgacgcggccgtaaaggaagaagcaaacttccagcaccttaaggctatccagcaacttgcaactgcagcaaatggcgtgtggtctaaaccaaatgtaaggcgcaagacaaagattgtgtgtacaatcggtccttcaaccaacacaagggacatgatatggaaactcgctgagactggcatgaatgtggctcggcttaatatgtcacatggagaccatgcatcacaccagaaagttattgatctggtaaaggagtacaatgcatcacatgctgacaatgtgattgctatcatgcttgacacaaagggaccagaagttcgaagtggagatttgcctcaaccgatatttctggaaagcggacaagaatttacttttacaatcaaaaggggagttgggactgatacgtgtgttagcgttaactatgacgactttgttaatgatgttgaagtgggcgacatgctccttgtagatggaggaatgatgtcattcttggtcaaatcaaaaactgaagattctgtgaaatgtgaagttattgacggtggtgaattgaaatctaggcgccatctgaatgttcgtggaaagagtgcaaccttgccatcaataactgacaaggactgggacgacattaagtttggtgtggataatcaagttgattactatgctgtttcctttgtgaaagatgctcaagttgtccacgaactcaaggattatctaaaaagttgcaatgctgacatacatgttatcgtaaaaatagaaagtgcagactccatccccaacttacattcaatcatcacagcatctgatggggctatggttgccaggggtgaccttggagccgagctgcccattgaggaggtgccgctgttgcaggaagaaattattagaatgtgcaggagcatggggaaggctgttattgttgctacaaatatgctcgaaagtatgattgttcatccaactccaacccgagcagaagtttcagacattgctatagctgtccgagagggtgctgatgcagttatgctttcaggagaaactgcacatgggaaggagagggttaggcaacgattggctttgtaccaaggtgtatgtccggttcaaatggaattttctgatgatgctgagaagacatttggcaatgctttgtcttatttgctgaaacatggtatggttaaggacggtgaggaggttgcgctcgttcaaagtggtaaacatcccatctggagatcacaatcaacacacaacattcaggtgaggaagatctgatgcggaacgcacatagtattctgattgttggaggacatcgtttcttctagcaaaccgcaaggtcttgttacaatgataccacactggtagtaagtactggtattggtgagatagttggtgctgagctagtgttgtgattctttttcttacttgtgcactagtgctgttttccttccgtgtaaaaaggccaatccaattgccgcttggttttagctgtagctttgggaactgtaggcttgttgtaatacagttcgttctgtcaatgttaaggacttttgcctcgagagctaggcataactcgaagctcaccaaacagcaatctacctgcaaattgcaacgcattttgcgtctttacttc

SEQ ID NO: 32487 - DNA, 1040 bp, Zea Mays
atttgaaatctgctgtgcctagtgcttactataagctgaagaaattattagaatgtgcaggagcatggggaaggctgttattgttgctacaaatatgctcgaaagtatgattgttcatccaactccaacccgagcagaagtttcagacattgctatagctgtccgagagggtgctgatgcagttatgctttcaggagaaactgcacatgggaaatttcccttgaaagctgttaaggtcatgcacactgttgccctgagaaccgaggcaactattcctggtggggaaacacctgcagaccttggtcaggctttcaagaaccacatgagcgaaatgttcgcataccatgcaacaatgatgtcaaatacccttcgaacatcaatagtggttttcactaggacgggatttatggctatactgcttagtcactaccgtccatctggcactatttttgcctttacagatgaggagagggttaggcaacgattggctttgtaccaaggtgtatgtccggttcaaatggaattttctgatgatgctgagaagacatttggcaatgctttgtcttatttgctgaaacatggtatggttaaggacggtgaggaggttgcgctcgttcaaagtggtaaacatcccatctggagatcacaatcaacacacaacattcaggtgaggaagatctgatgcggaacgcacatagtattctgattgttggaggacatcgtttcttctagcaaaccgcaaggtcttgttacaatgataccacactggtagtaagtactggtattggtgagatagttggtgctgagctagtgttgtgattctttttcttacttgtgcactagtgctgttttccttccgtgtaaaaaggccaatccaattgccgcttggttttagctgtagctttgggaactgtaggcttgttgtaatacagttcgttctgtcaatgttaaggacttttgcctcgagagctaggcataactcgaagctcaccaaacagcaatctacctgcaaattgcaacgcattttgcgtctttacttc

SEQ ID NO: 32488 - DNA, 668 bp, Zea Mays
cccgtctccaaagtccaaactccaaagtccgaactccaaaccaaacgctccagccccgccgcacgcatacggcatacgcatccctcatctccctctcctcgccttcccgccgcggcgccgcctctcctttccgaattccgactcccgcctccccggggtgagtgtttccgcatccggctcgtccgccgatcctcgcgaggcctcctcgaccccgacccgacccggcgcggccaccggttcaagtcattcacaaaaaaacatgggtcatgatgaagctgtagttactcagaattcagtaaaagcaccatcaccacccaaggatcagccagctatttatccatgctttgattggtcgactgtgcaggcatattatggcccaggggtcttgccaccagctttctttaaccctggaatagcgcctggtcatgcccctccaccatatgtgtggggtccgcagactatgccaccggctgcctttggaaaatcatatgctgcaatatacccacatgctggtggtttcctgcatccactcatgcccctagtggtaaacccattgagtgcggagccagctaagtctgggaacagcaaggataatagtttaaacaagaaactaaaggaaattgatggatctgctgtgtcaagtggcaacagtgagaaaacaaggggga

SEQ ID NO: 32489 - DNA, 1610 bp, Zea Mays
cccgtctccaaagtccaaactccaaagtccgaactccaaaccaaacgctccagccccgccgcacgcatacggcatacgcatccctcatctccctctcctcgccttcccgccgcggcgccgcctctcctttccgaattccgactcccgcctccccggggtgagtgtttccgcatccggctcgtccgccgatcctcgcgaggcctcctcgaccccgacccgacccggcgcggccaccggttcaagtcattcacaaaaaaacatgggtcatgatgaagctgtagttactcagaattcagtaaaagcaccatcaccacccaaggatcagccagctatttatccatgctttgattggtcgactgtgcaggcatattatggcccaggggtcttgccaccagctttctttaaccctggaatagcgcctggtcatgcccctccaccatatgtgtggggtccgcagactatgccaccggctgcctttggaaaatcatatgctgcaatatacccacatgctggtggtttcctgcatccactcatgcccctagtggtaaacccattgagtgcggagccagctaagtctgggaacagcaaggataatagtttaaacaagaaactaaaggaaattgatggatctgctgtgtcaagtggcaacagtgagaaaacaaggtcagcggaactccaaagaagaggagcttagatgataggactacatcagaaacatgtggggaatcaggaagattgccagctttgtccagtgtgcgcattccagacacaatgatgaaaccatgtgtgagcaccggtagtgacttcaaagttagtggtgcgacatcaaccgaatggccagctaaggacgacaaggaatcgaagcgtgaaaggaggaagcagtcaaacagggaatctgcccggcgctcaaggctgaggaagcaggctgagactgaagaactggctagaagagtagagctactgaccgcggagaacacgtccctccgaagcgagatcagcaggctaacggaaagctcccagaagctaaggatggagaactcggctctgatggagaaactagcggacggtacatcagaccaagcacaagaagcttccgccggccaccagacgacaccaacggcgccatcgtcggctcgcgtcgtcaagaacttcctctggatgatggatggcgaaggcgcgtcaagaggcggcagcggcagcagcagccggcgcagggatcacggtgcgcccatgctccgccagctcctgagctcgggtcctctggcggctgacgccgtggccgctagctgatcagtgccgtgcttcccttgtgccgagcgcgtgtggactggcgatttttttaaaagagcgcacaagccgccacgcacggacgacctgtaaattacagtagctatgcctatgtatggggcatcgttccggccgctctgctgagagccgatatacggatcccatcactgagctttggtaactctctgtcgactgtcgttagagtggttgtgccaaactgaatcaactgacacgattcagcagtactaataataaccatcaggaggtttgcctctgaactccatttcttctcgtgcatggattgttactgcagccgtctacag

SEQ ID NO: 32490 - DNA, 1522 bp, Zea Mays
cccgtctccaaagtccaaactccaaagtccgaactccaaaccaaacgctccagccccgccgcacgcatacggcatacgcatccctcatctccctctcctcgccttcccgccgcggcgccgcctctcctttccgaattccgactcccgcctccccggggtgagtgtttccgcatccggctcgtccgccgatcctcgcgaggcctcctcgaccccgacccgacccggcgcggccaccggttcaagtcattcacaaaaaaacatgggtcatgatgaagctgtagttactcagaattcagtaaaagcaccatcaccacccaaggatcagccagctatttatccatgctttgattggtcgactgtgcaggcatattatggcccaggggtcttgccaccagctttctttaaccctggaatagcgcctggtcatgcccctccaccatatgtgtggggtccgcagactatgccaccggctgcctttggaaaatcatatgctgcaatatacccacatgctggtggtttcctgcatccactcatgcccctagtggtaaacccattgagtgcggagccagctaagtctgggaacagcaaggataatagtttaaacaagaaactaaaggaaattgatggatctgctgtgtcaagtggcaacagtgagaaaacaagtggggatcacagcctagaaggatccagcgatggaaacaacccaaaggtcagcggaactccaaagaagaggagcttagatgataggactacatcaggacgacaaggaatcgaagcgtgaaaggaggaagcagtcaaacagggaatctgcccggcgctcaaggctgaggaagcaggctgagactgaagaactggctagaagagtagagctactgaccgcggagaacacgtccctccgaagcgagatcagcaggctaacggaaagctcccagaagctaaggatggagaactcggctctgatggagaaactagcggacggtacatcagaccaagcacaagaagcttccgccggccaccagacgacaccaacggcgccatcgtcggctcgcgtcgtcaagaacttcctctggatgatggatggcgaaggcgcgtcaagaggcggcagcggcagcagcagccggcgcagggatcacggtgcgcccatgctccgccagctcctgagctcgggtcctctggcggctgacgccgtggccgctagctgatcagtgccgtgcttcccttgtgccgagcgcgtgtggactggcgatttttttaaaagagcgcacaagccgccacgcacggacgacctgtaaattacagtagctatgcctatgtatggggcatcgttccggccgctctgctgagagccgatatacggatcccatcactgagctttggtaactctctgtcgactgtcgttagagtggttgtgccaaactgaatcaactgacacgattcagcagtactaataataaccatcaggaggtttgcctctgaactccatttcttctcgtgcatggattgttactgcagccgtctacag

SEQ ID NO: 32491 - DNA, 1644 bp, Zea Mays
cccgtctccaaagtccaaactccaaagtccgaactccaaaccaaacgctccagccccgccgcacgcatacggcatacgcatccctcatctccctctcctcgccttcccgccgcggcgccgcctctcctttccgaattccgactcccgcctccccggggtgagtgtttccgcatccggctcgtccgccgatcctcgcgaggcctcctcgaccccgacccgacccggcgcggccaccggttcaagtcattcacaaaaaaacatgggtcatgatgaagctgtagttactcagaattcagtaaaagcaccatcaccacccaaggatcagccagctatttatccatgctttgattggtcgactgtgcaggcatattatggcccaggggtcttgccaccagctttctttaaccctggaatagcgcctggtcatgcccctccaccatatgtgtggggtccgcagactatgccaccggctgcctttggaaaatcatatgctgcaatatacccacatgctggtggtttcctgcatccactcatgcccctagtggtaaacccattgagtgcggagccagctaagtctgggaacagcaaggataatagtttaaacaagaaactaaaggaaattgatggatctgctgtgtcaagtggcaacagtgagaaaacaagcctagaaggatccagcgatggaaacaacccaaaggtcagcggaactccaaagaagaggagcttagatgataggactacatcagaaacatgtggggaatcaggaagattgccagctttgtccagtgtgcgcattccagacacaatgatgaaaccatgtgtgagcaccggtagtgacttcaaagttagtggtgcgacatcaaccgaatggccagctaaggacgacaaggaatcgaagcgtgaaaggaggaagcagtcaaacagggaatctgcccggcgctcaaggctgaggaagcaggctgagactgaagaactggctagaagagtagagctactgaccgcggagaacacgtccctccgaagcgagatcagcaggctaacggaaagctcccagaagctaaggatggagaactcggctctgatggagaaactagcggacggtacatcagaccaagcacaagaagcttccgccggccaccagacgacaccaacggcgccatcgtcggctcgcgtcgtcaagaacttcctctggatgatggatggcgaaggcgcgtcaagaggcggcagcggcagcagcagccggcgcagggatcacggtgcgcccatgctccgccagctcctgagctcgggtcctctggcggctgacgccgtggccgctagctgatcagtgccgtgcttcccttgtgccgagcgcgtgtggactggcgatttttttaaaagagcgcacaagccgccacgcacggacgacctgtaaattacagtagctatgcctatgtatggggcatcgttccggccgctctgctgagagccgatatacggatcccatcactgagctttggtaactctctgtcgactgtcgttagagtggttgtgccaaactgaatcaactgacacgattcagcagtactaataataaccatcaggaggtttgcctctgaactccatttcttctcgtgcatggattgttactgcagccgtctacag

SEQ ID NO: 32492 - DNA, 1532 bp, Zea Mays
cgtctccaaagtccaaactccaaagtccgaactccaaaccaaacgctccagccccgccgcacgcatacggcatacgcatccctcatctccctctcctcgccttcccgccgcggcgccgcctctcctttccgaattccgactcccgcctccccggggtgagtgtttccgcatccggctcgtccgccgatcctcgcgaggcctcctcgaccccgacccgacccggcgcggccaccggttcaaggatcagccagctatttatccatgctttgattggtcgactgtgcaggcatattatggcccaggggtcttgccaccagctttctttaaccctggaatagcgcctggtcatgcccctccaccatatgtgtggggtccgcagactatgccaccggctgcctttggaaaatcatatgctgcaatatacccacatgctggtggtttcctgcatccactcatgcccctagtggtaaacccattgagtgcggagccagctaagtctgggaacagcaaggataatagtttaaacaagaaactaaaggaaattgatggatctgctgtgtcaagtggcaacagtgagaaaacaaggtcagcggaactccaaagaagaggagcttagatgataggactacatcagaaacatgtggggaatcaggaagattgccagctttgtccagtgtgcgcattccagacacaatgatgaaaccatgtgtgagcaccggtagtgacttcaaagttagtggtgcgacatcaaccgaatggccagctaaggacgacaaggaatcgaagcgtgaaaggaggaagcagtcaaacagggaatctgcccggcgctcaaggctgaggaagcaggctgagactgaagaactggctagaagagtagagctactgaccgcggagaacacgtccctccgaagcgagatcagcaggctaacggaaagctcccagaagctaaggatggagaactcggctctgatggagaaactagcggacggtacatcagaccaagcacaagaagcttccgccggccaccagacgacaccaacggcgccatcgtcggctcgcgtcgtcaagaacttcctctggatgatggatggcgaaggcgcgtcaagaggcggcagcggcagcagcagccggcgcagggatcacggtgcgcccatgctccgccagctcctgagctcgggtcctctggcggctgacgccgtggccgctagctgatcagtgccgtgcttcccttgtgccgagcgcgtgtggactggcgatttttttaaaagagcgcacaagccgccacgcacggacgacctgtaaattacagtagctatgcctatgtatggggcatcgttccggccgctctgctgagagccgatatacggatcccatcactgagctttggtaactctctgtcgactgtcgttagagtggttgtgccaaactgaatcaactgacacgattcagcagtactaataataaccatcaggaggtttgcctctgaactccatttcttctcgtgcatggattgttactgcagccgtctacag

SEQ ID NO: 32493 - DNA, 1665 bp, Zea Mays
cgtctccaaagtccaaactccaaagtccgaactccaaaccaaacgctccagccccgccgcacgcatacggcatacgcatccctcatctccctctcctcgccttcccgccgcggcgccgcctctcctttccgaattccgactcccgcctccccggggtgagtgtttccgcatccggctcgtccgccgatcctcgcgaggcctcctcgaccccgacccgacccggcgcggccaccggttcaagtcattcacaaaaaaacatgggtcatgatgaagctgtagttactcagaattcagtaaaagcaccatcaccacccaaggatcagccagctatttatccatgctttgattggtcgactgtgcaggcatattatggcccaggggtcttgccaccagctttctttaaccctggaatagcgcctggtcatgcccctccaccatatgtgtggggtccgcagcgtctttgcagactatgccaccggctgcctttggaaaatcatatgctgcaatatacccacatgctggtggtttcctgcatccactcatgcccctagtggtaaacccattgagtgcggagccagctaagtctgggaacagcaaggataatagtttaaacaagaaactaaaggaaattgatggatctgctgtgtcaagtggcaacagtgagaaaacaagtggggatcacagcctagaaggatccagcgatggaaacaacccaaaggtcagcggaactccaaagaagaggagcttagatgataggactacatcagaaacatgtggggaatcaggaagattgccagctttgtccagtgtgcgcattccagacacaatgatgaaaccatgtgtgagcaccggtagtgacttcaaagttagtggtgcgacatcaaccgaatggccagctaaggacgacaaggaatcgaagcgtgaaaggaggaagcagtcaaacagggaatctgcccggcgctcaaggctgaggaagcaggctgagactgaagaactggctagaagagtagagctactgaccgcggagaacacgtccctccgaagcgagatcagcaggctaacggaaagctcccagaagctaaggatggagaactcggctctgatggagaaactagcggacggtacatcagaccaagcacaagaagcttccgccggccaccagacgacaccaacggcgccatcgtcggctcgcgtcgtcaagaacttcctctggatgatggatggcgaaggcgcgtcaagaggcggcagcggcagcagcagccggcgcagggatcacggtgcgcccatgctccgccagctcctgagctcgggtcctctggcggctgacgccgtggccgctagctgatcagtgccgtgcttcccttgtgccgagcgcgtgtggactggcgatttttttaaaagagcgcacaagccgccacgcacggacgacctgtaaattacagtagctatgcctatgtatggggcatcgttccggccgctctgctgagagccgatatacggatcccatcactgagctttggtaactctctgtcgactgtcgttagagtggttgtgccaaactgaatcaactgacacgattcagcagtactaataataaccatcaggaggtttgcctctgaactccatttcttctcgtgcatggattgttactgcagccgtctacag

SEQ ID NO: 32494 - DNA, 1478 bp, Zea Mays
atttcccccctcttctccagcgtggcacagagctagggtttctcccacccgccgcctccggcgactgcacccgccgtcgtccacggccgatcgctccagctcccgctgcgcgcgctcccgccgcaggccgctccagctcttgcacgcattcccggccgccgtcgcgcctgcacgccgctcctctgcggccgctccagcttgcccgcgcgtgctcccctcgactgctctagcttctgcacgcgtgcccggccgccgccgcgcctgcacgccgtcggtcaccaatcgtcacctactacgacccgtccttcaagcggcagcttcatccgcgacgtccgtgtcgccgtcttgcgccacgacctcactcgagcgctctgcctactcccgaagccctcctccgcggcgcccgccccagcagttcctcctccgcagcgcccgccccatcagttcctcctccgcggtgcccgtcgacccgccgagcaccagcagcagcgtcgccggtggtggagctccaccgcctttgccgcgctccatctcttcaggaagtgccctgctccaccgcccacctgagtgcaaatccgtcagcattggactgttttactcatctataggatctgattttgggtgggcgcagttgcggagatgcagaggctgggggatttcaggctccctcccttcttcaactacccgccttacttcaccctgtgcgtgagacgcgggaaaagcaagtgcagttatggaaggatctgatacttgattactgtagaagtcaaaagatacatacaatatctctagaagaagatttccccttgttctccaatgcaaagattgagagatctcttagctacgaagcaaaggaagtgttcctcgcagctctcgtcagtgaaggtcgtgcagaatggatggacaaaggtcacaagaagtgcctaattctttggctaaggatacaggattgggcaaatttcatattgaactttgtaaaggataacgggttggaagtaatgactatcgaagaaatacgctctggaattgatacacgtggaactgaactcgagggaattgatcgtggtgttctcatgcgggctctgcggcagttggagcaaaagggaaaggcagctatcttcaaaggcacctctgctgatgacgaaggcgtaaagttttcggtgtaattcttttgcgatccttaaactggcagactaataatctcgttcagccggtgcccttgaacatggcatgagacacccatagcctcgatcattcagtgccctttgaaaatggcatgacacatccttgtaaaaagcagtagggctgatcacattcttcccgagtagtatcctcttcagtgctgcggtaaaatttcccaactcatcttttgttgtagtgaaaaatcggccaagcctgattaaacattgtggagtggttggtaagaagaagttgaactggtcatgcctcttacgctgattgattttccgatatctaag

SEQ ID NO: 32495 - DNA, 1580 bp, Zea Mays
atttcccccctcttctccagcgtggcacagagctagggtttctcccacccgccgcctccggcgactgcacccgccgtcgtccacggccgatcgctccagctcccgctgcgcgcgctcccgccgcaggccgctccagctcttgcacgcattcccggccgccgtcgcgcctgcacgccgctcctctgcggccgctccagcttgcccgcgcgtgctcccctcgactgctctagcttctgcacgcgtgcccggccgccgccgcgcctgcacgccgtcggtcaccaatcgtcacctactacgacccgtccttcaagcggcagcttcatccgcgacgtccgtgtcgccgtcttgcgccacgacctcactcgagcgctctgcctactcccgaagccctcctccgcggcgcccgccccagcagttcctcctccgcagcgcccgccccatcagttcctcctccgcggtgcccgtcgacccgccgagcaccagcagcagcgtcgccggtggtggagctccaccgcctttgccgcgctccatctcttcaggaagtgccctgctccaccgcccacctaacagaaaacgtggggggtgggaatggtttctcgatggtaaccacagtttggccaatggtttggtacatttcaggttccagctgaagtaacattaaaatccggagtgcaaatccgtcagcattggactgttttactcatctataggatctgattttgggtgggcgcagttgcggagatgcagaggctgggggatttcaggctccctcccttcttcaactacccgccttacttcaccctgtgcgtgagacgcgggaaaagcaagtgcagttatggaaggatctgatacttgattactgtagaagtcaaaagatacatacaatatctctagaagaagatttccccttgttctccaatgcaaagattgagagatctcttagctacgaagcaaaggaagtgttcctcgcagctctcgtcagtgaaggtcgtgcagaatggatggacaaaggtcacaagaagtgcctaattctttggctaaggatacaggattgggcaaatttcatattgaactttgtaaaggataacgggttggaagtaatgactatcgaagaaatacgctctggaattgatacacgtggaactgaactcgagggaattgatcgtggtgttctcatgcgggctctgcggcagttggagcaaaagggaaaggcagctatcttcaaaggcacctctgctgatgacgaaggcgtaaagttttcggtgtaattcttttgcgatccttaaactggcagactaataatctcgttcagccggtgcccttgaacatggcatgagacacccatagcctcgatcattcagtgccctttgaaaatggcatgacacatccttgtaaaaagcagtagggctgatcacattcttcccgagtagtatcctcttcagtgctgcggtaaaatttcccaactcatcttttgttgtagtgaaaaatcggccaagcctgattaaacattgtggagtggttggtaagaagaagttgaactggtcatgcctcttacgctgattgattttccgatatctaag

SEQ ID NO: 32496 - DNA, 1452 bp, Zea Mays
atttcccccctcttctccagcgtggcacagagctagggtttctcccacccgccgcctccggcgactgcacccgccgtcgtccacggccgatcgctccagctcccgctgcgcgcgctcccgccgcaggccgctccagctcttgcacgcattcccggccgccgtcgcgcctgcacgccgctcctctgcggccgctccagcttgcccgcgcgtgctcccctcgactgctctagcttctgcacgcgtgcccggccgccgccgcgcctgcacgccgtcggtcaccaatcgtcacctactacgacccgtccttcaagcggcagcttcatccgcgacgtccgtgtcgccgtcttgcgccacgacctcactcgagcgctctgcctactcccgaagccctcctccgcggcgcccgccccagcagttcctcctccgcagcgcccgccccatcagttcctcctccgcggtgcccgtcgacccgccgagcaccagcagcagcgtcgccggtggtggagctccaccgcctttgccgcgctccatctcttcaggagtgcaaatccgtcagcattggactgttttactcatctataggatctgattttgggtgggcgcagttgcggagatgcagaggctgggggatttcaggctccctcccttcttcaactacccgccttacttcaccctgtgcgtgagacgcgggaaaagcaagtgcagttatggaaggatctgatacttgattactgtagaagtcaaaagatacatacaatatctctagaagaagatttccccttgttctccaatgcaaagattgagagatctcttagctacgaagcaaaggaagtgttcctcgcagctctcgtcagtgaaggtcgtgcagaatggatggacaaaggtcacaagaagtgcctaattctttggctaaggatacaggattgggcaaatttcatattgaactttgtaaaggataacgggttggaagtaatgactatcgaagaaatacgctctggaattgatacacgtggaactgaactcgagggaattgatcgtggtgttctcatgcgggctctgcggcagttggagcaaaagggaaaggcagctatcttcaaaggcacctctgctgatgacgaaggcgtaaagttttcggtgtaattcttttgcgatccttaaactggcagactaataatctcgttcagccggtgcccttgaacatggcatgagacacccatagcctcgatcattcagtgccctttgaaaatggcatgacacatccttgtaaaaagcagtagggctgatcacattcttcccgagtagtatcctcttcagtgctgcggtaaaatttcccaactcatcttttgttgtagtgaaaaatcggccaagcctgattaaacattgtggagtggttggtaagaagaagttgaactggtcatgcctcttacgctgattgattttccgatatctaag

SEQ ID NO: 32497 - DNA, 1442 bp, Zea Mays
atttcccccctcttctccagcgtggcacagagctagggtttctcccacccgccgcctccggcgactgcacccgccgtcgtccacggccgatcgctccagctcccgctgcgcgcgctcccgccgcaggccgctccagctcttgcacgcattcccggccgccgtcgcgcctgcacgccgctcctctgcggccgctccagcttgcccgcgcgtgctcccctcgactgctctagcttctgcacgcgtgcccggccgccgccgcgcctgcacgccgtcggtcaccaatcgtcacctactacgacccgtccttcaagcggcagcttcatccgcgacgtccgtgtcgccgtcttgcgccacgacctcactcgagcgctctgcctactcccgaagccctcctccgcggcgcccgccccagcagttcctcctccgcagcgcccgccccatcagttcctcctccgcggtgcccgtcgacccgccgagcaccagcagcagcgtcgccggtggtggagctccaccgcctttgccgcgctccatctcttcaggaagtgccctgctccaccgcccacctgatctgattttgggtgggcgcagttgcggagatgcagaggctgggggatttcaggctccctcccttcttcaactacccgccttacttcactttacagcctgtgcgtgagacgcgggaaaagcaagtgcagttatggaaggatctgatacttgattactgtagaagtcaaaagatacatacaatatctctagaagaagatttccccttgttctccaatgcaaagattgagagatctcttagctacgaagcaaaggaagtgttcctcgcagctctcgtcagtgaaggtcgtgcagaatggatggacaaaggtcacaagaagtgcctaattctttggctaaggatacaggattgggcaaatttcatattgaactttgtaaaggataacgggttggaagtaatgactatcgaagaaatacgctctggaattgatacacgtggaactgaactcgagggaattgatcgtggtgttctcatgcgggctctgcggcagttggagcaaaagggaaaggcagctatcttcaaaggcacctctgctgatgacgaaggcgtaaagttttcggtgtaattcttttgcgatccttaaactggcagactaataatctcgttcagccggtgcccttgaacatggcatgagacacccatagcctcgatcattcagtgccctttgaaaatggcatgacacatccttgtaaaaagcagtagggctgatcacattcttcccgagtagtatcctcttcagtgctgcggtaaaatttcccaactcatcttttgttgtagtgaaaaatcggccaagcctgattaaacattgtggagtggttggtaagaagaagttgaactggtcatgcctcttacgctgattgattttccgatatctaag

SEQ ID NO: 32498 - DNA, 1352 bp, Zea Mays
atttcccccctcttctccagcgtggcacagagctagggtttctcccacccgccgcctccggcgactgcacccgccgtcgtccacggccgatcgctccagctcccgctgcgcgcgctcccgccgcaggccgctccagctcttgcacgcattcccggccgccgtcgcgcctgcacgccgctcctctgcggccgctccagcttgcccgcgcgtgctcccctcgactgctctagcttctgcacgcgtgcccggccgccgccgcgcctgcacgccgtcggtcaccaatcgtcacctactacgacccgtccttcaagcggcagcttcatccgcgacgtccgtgtcgccgtcttgcgccacgacctcactcgagcgctctgcctactcccgaagccctcctccgcggcgcccgccccagcagttcctcctccgcagcgcccgccccatcagttcctcctccgcggtgcccgtcgacccgccgagcaccagcagcagcgtcgccggtggtggagctccaccgcctttgccgcgctccatctcttcaggaagtgccctgctccaccgcccaccttttacagcctgtgcgtgagacgcgggaaaagcaagtgcagttatggaaggatctgatacttgattactgtagaagtcaaaagatacatacaatatctctagaagaagatttccccttgttctccaatgcaaagattgagagatctcttagctacgaagcaaaggaagtgttcctcgcagctctcgtcagtgaaggtcgtgcagaatggatggacaaaggtcacaagaagtgcctaattctttggctaaggatacaggattgggcaaatttcatattgaactttgtaaaggataacgggttggaagtaatgactatcgaagaaatacgctctggaattgatacacgtggaactgaactcgagggaattgatcgtggtgttctcatgcgggctctgcggcagttggagcaaaagggaaaggcagctatcttcaaaggcacctctgctgatgacgaaggcgtaaagttttcggtgtaattcttttgcgatccttaaactggcagactaataatctcgttcagccggtgcccttgaacatggcatgagacacccatagcctcgatcattcagtgccctttgaaaatggcatgacacatccttgtaaaaagcagtagggctgatcacattcttcccgagtagtatcctcttcagtgctgcggtaaaatttcccaactcatcttttgttgtagtgaaaaatcggccaagcctgattaaacattgtggagtggttggtaagaagaagttgaactggtcatgcctcttacgctgattgattttccgatatctaag

SEQ ID NO: 32499 - DNA, 1578 bp, Zea Mays
atttcccccctcttctccagcgtggcacagagctagggtttctcccacccgccgcctccggcgactgcacccgccgtcgtccacggccgatcgctccagctcccgctgcgcgcgctcccgccgcaggccgctccagctcttgcacgcattcccggccgccgtcgcgcctgcacgccgctcctctgcggccgctccagcttgcccgcgcgtgctcccctcgactgctctagcttctgcacgcgtgcccggccgccgccgcgcctgcacgccgtcggtcaccaatcgtcacctactacgacccgtccttcaagcggcagcttcatccgcgacgtccgtgtcgccgtcttgcgccacgacctcactcgagcgctctgcctactcccgaagccctcctccgcggcgcccgccccagcagttcctcctccgcagcgcccgccccatcagttcctcctccgcggtgcccgtcgacccgccgagcaccagcagcagcgtcgccggtggtggagctccaccgcctttgccgcgctccatctcttcaggaagtgccctgctccaccgcccacctaacagaaaacgtggggggtgggaatggtttctcgatggtaaccacagtttggccaatggtttggtacatttcaggttccagctgaagtaacattaaaatccggagtgcaaatccgtcagcattggactgttttactcatctataggatctgattttgggtgggcgcagttgcggagatgcagaggctgggggatttcaggctccctcccttcttcaactacccgccttacttcactttacagcctgtgcgtgagacgcgggaaaagcaagtgcagttatggaaggatctgatacttgattactgtagaagtcaaaagatacatacaatatctctagaagaagatttccccttgttctccaatgcaaagattgagagatctcttagctacgaagcaaaggaagtgttcctcgcagctctcgtcagtgaagaatggatggacaaaggtcacaagaagtgcctaattctttggctaaggatacaggattgggcaaatttcatattgaactttgtaaaggataacgggttggaagtaatgactatcgaagaaatacgctctggaattgatacacgtggaactgaactcgagggaattgatcgtggtgttctcatgcgggctctgcggcagttggagcaaaagggaaaggcagctatcttcaaaggcacctctgctgatgacgaaggcgtaaagttttcggtgtaattcttttgcgatccttaaactggcagactaataatctcgttcagccggtgcccttgaacatggcatgagacacccatagcctcgatcattcagtgccctttgaaaatggcatgacacatccttgtaaaaagcagtagggctgatcacattcttcccgagtagtatcctcttcagtgctgcggtaaaatttcccaactcatcttttgttgtagtgaaaaatcggccaagcctgattaaacattgtggagtggttggtaagaagaagttgaactggtcatgcctcttacgctgattgattttccgatatctaag

SEQ ID NO: 32500 - DNA, 940 bp, Zea Mays
cttctgattcaagttttttgcgcgaagccatgtcttgcctagatgcttttgttgtacctaagggatctgattttgggtgggcgcagttgcggagatgcagaggctgggggatttcaggctccctcccttcttcaactacccgccttacttcactttacagcctgtgcgtgagacgcgggaaaagcaagtgcagttatggaaggatctgatacttgattactgtagaagtcaaaagatacatacaatatctctagaagaagatttccccttgttctccaatgcaaagattgagagatctcttagctacgaagcaaaggaagtgttcctcgcagctctcgtcagtgaaggtcgtgcagaatggatggacaaaggtcacaagaagtgcctaattctttggctaaggatacaggattgggcaaatttcatattgaactttgtaaaggataacgggttggaagtaatgactatcgaagaaatacgctctggaattgatacacgtggaactgaactcgagggaattgatcgtggtgttctcatgcgggctctgcggcagttggagcaaaagggaaaggcagctatcttcaaaggcacctctgctgatgacgaaggcgtaaagttttcggtgtaattcttttgcgatccttaaactggcagactaataatctcgttcagccggtgcccttgaacatggcatgagacacccatagcctcgatcattcagtgccctttgaaaatggcatgacacatccttgtaaaaagcagtagggctgatcacattcttcccgagtagtatcctcttcagtgctgcggtaaaatttcccaactcatcttttgttgtagtgaaaaatcggccaagcctgattaaacattgtggagtggttggtaagaagaagttgaactggtcatgcctcttacgctgattgattttccgatatctaag

SEQ ID NO: 32501 - DNA, 938 bp, Zea Mays
aatcaatcagcctgtcccaatcagaggaatctgtgggcgagcgcagagcggagcttctggctgagagaggaagacgagagctagaagcgaaggagaaaagcagttcttcagctaggcaggagggcacaggaaggaggagatggcgtcaaagaggattcagaaggagctcaaggatctgcagaaggaccctcccacctcgtgcagtgcaggtcctgttggtgaagacatgttccactggcaggcaacaataatgggtccatctgatagcccatattctggtggagttttcctagttacaatccattttcctcctgattatcctttcaaaccaccaaaggtggcatttcgcactaaggtgttccatccaaacatcaacagcaacgggagcatttgcctcgacatcttgaaggaccagtggagtccggcactaaccatctccaaggtgctgctgtccatctgttccctgctgactgatccgaaccccgacgaccctttggtccccgagatagctcacatgtacaagacggaccggcacaagtacgagaacaccgcgaggacctggacccagaggtatgccatgtagtattttctctacctggcctttggggtcgctgctgcgttgtgttgccgggacctggacgtgcctccatgtattcgttctatccttcctgtataatgatgaaccgaattgggtttgcagtacagtgccgcgtgtggtgctgaatgctgctgtattgtgtcacttggaagctgtaattctcagtgtcaaaaaaaactggtacttggaaccattttgcgtcggatggcgctgcaggccagtccatgcttgcgtccttcttcccttcaccagtcatcgtgttggaagaaacataacgttctgtctcttgagtaactggtacgaaacaataatgatcgttggggatttggttgcagcagat

SEQ ID NO: 32502 - DNA, 6088 bp, Zea Mays
cgcgctcgcaggggcgggacgcgggagcggtgtttcgattcggtggcgttctcgtaataaggtacgcgaaacggagggctttctaggcgtcggggtagatgctgcagtgcagtgcagtgcggtgcagaggctccaaaaaggacgagaccatggttgctggctcgctcgctcgctcgagggtcgagtgcgtttctaacgctgcccacaccacacaccacacaccagcctagtcgagaagaaagaaacctccggtctctgggtcaggttctcgccgagcacgcgatttcacccgtcctttcggttcaggagcaaagctaatcaggagttgcaacataatatgctgtcaattatgatcaatttggtctgacgaagattttctgcaaacaaatagtaaagctaaagcttgtggatacaagaacttcagcatgacgaagaaacacaaaattagaaagtccaagcatcttttagagagcaaaaaggatgttgatgaaaatgtggagaacattttaagaatgatagaggaggagaacgaacagactgagaatgaacaagatgattctggaaatcccgtcaggaaatcaaagctatcttcccttgtgaagggcttccatgaggactatcaataccttcacaagcactacaaacagctaattagcaaactagaaactgctggccacagttcctcaggttcagattcatctgattcagatgtggaaggagacagattagagaataatgtaactacaccaaaagcagtgttgaatgaagaaaacggcctgaaccataagcttgatgaggttcatagcatggaagcagaaatcgagatgctaaaacaaagtacagaagaacacaccaaggaaatatctgatctgaaacagctactagaaaaagcaatcaaggataaagaagctacaaggggagagttcactttagaggttgcaaatttatcatctgagaatgaaaatctgaaatcattagttgaaactgcaaagagggaggaaggagacttgcttaacatcataaaatctaaggagaatgaggtcaaaacattgtctagtgagaagcaaactattgaagaggagagagataacctgaagatgtcagttgtagacatgaagaaggagatggaagatctgagcaatcagctcaaagatacagtggataaatgcagcgtcatggcatcagaactagagaagtccctgaaggctgagaaagaagtgcagaccttgtttgaagaaaaccagaacctgaagaaccataacttgatgctgtcggtggagcatgataacctgaaagcacttcatcataacttagatattgagtgctgtcaactgaaggcaaccattgcagaaaccaaagctgaaaatgaatcattgaccacagaaaatcattcagctgaaagaaaactccagcaattgagggtagaaatagatggcttgatggctgagaccacagtgataatgaacaatctggacaaggaacgtagtactgcagcagaagaaaaagaaaggctaacatcagaaaattctgtatacatgagtgagttagaggaggcacaatctaatgttaaggatctagaaaaggaactggagtcaacaaaaagtgttctcaataatcgtattgcggagctatgtaaggagaagaattctaccacatcagagatagaacggctagaggcttctttgatgaatcatcagaacgatctgtcacaacaacttgataggatttcagatatgcagaagactactgaaaacctggagctggcaaattctaacctgcataatgagattgtaaaagtacaaggacaaaagaatgaagctgttgcttctatagttaatctcgagagcatgttagaacagcaagtacaagagattgcaaatcttcaggaggccaacaaagaactcaaagcagcaaagactgatctacataatgaggttatgttacttcaacaggagaaaattgtagcactgactcagttacaagaatatgaggctcaaatcaagaatcttcgaattgacttggaacagcagtgcaaccaaatttcagttatgcagcaagcaaatgaagaaacacaggataaaaattctagcttgcacaagcaactggaagaaactaggattcatctgcaagaggagatcattgcattacaaggagagaaggaagaggccatcagtagcttacagcagtcaaatgattcactcaagaccctagaagtccagttagagcagcaaagagaacaaatttctgttctgcagcttgctcatgaagacttgcaaaatagcaattccaacctagagatgcaattggaagaggcgaaggttagtcaccatgctgaaattctagcattacaagatgaaaagaacaagattatttcagagttgcagcagtcagatggttgtatcaagaaccttagatttgagttggagcaaggaaaagagcaaacctcaatcttgcttcatgctaatgaagatatgaagaataacatttctgtcttggacaagcaattggaagaggtcaggagcagtttgcatgctgaaattgcagaagtacgtgcagagaaggagacagctctatcagagttacatatgtctcagacttccatcaggaacttagagagtgtggtagaaaagcaaactgagaacattttaactctagaaaaagctaatgataagttaaacaataaaatatgtatcttgacagagcaagtagaacaagccaaggctgagctgcataaggaggtagcggcaatacaagaagagaaggatacagcactaacacaattaagacagtcagagttttcaatacaagatcttgagaatgaggtgacacgactgaaagacgaactttcaattcagctggaaaaaaattccaccttggacaagcaatttgaagaattcaagagcaagctgcatgctgaaattttagacctacgcgcagagaaggacacatctctattggagttacagacatctcaggattctgtaaggaatcttgagattctggttgaaaagcaaactgagaacatttcaactctgcaccaagctaatgatgagttacagaagaacatctacactttgactgagcaatcacaacaagccaaggaggagatgcaggatgagttgaaggcaatacaagaagagaaggatacagtgctaacacaactgaagcagtcagagacttcagtacaaaatctagaggatgaggtgacacgactgaaagaggaactttccgtccagctagaaaacaattccaccttggacaagcagtttgcagaagctaggagcaatctgcatgctgaaatttcagacctacgtgcagagaagggcacatctctactggagttacagatgtctcaggcttctgtcaggaatcttgagattttggtcggaaagcaaactgagaacatttcaactctacagcaagctaatgaagagttacaaaagaacatctacactttgactgagcaatcacaacaggtcaaggtggagatgcaaagtgatttgaaggcaatacaagaagagaagaatgcggtgctatcacaactgaagcagtcagaaacttcagtacaaaatcttgagaatgaggtgatacgactgaaagaggagctttctgtccagctagaaaacaattccaccttggacaagcagtttgaagaagccaggagcaatctgcatgctgaaatttcagagctacgtgcagataagaacacatctctattgaaattacagacgtctcaggattctgtcaggaatcttgagattgtggttgaaaagcaaactgagaacatttcaactctacagcaagctaatgatgagttacagaagaacatctacactttgacggagcaatcacaacgagacaaggcggagatgcaggatgagttgaaggcaatacaagaagataaggatgcagtgctaacacaactgaagcagtcagagacttcagtacaaaatctagaggatgagttgacacgactgaaagaggagctttccgtccagctagaaaacaattccaccttggacaagcagtttgcagaagccaggagcaatctgcatgctgaaatttcagacctacatacagagaaggacacatctctacgggaattacagacgtctcaggcttgtgtcaggaatcttgagattgtggttgaaaagcaaactgagaacatttcaactctacagcaagctaatgatgaattacagaagaatgtctatactttgactgagcaatcacagcaagccaaggtggagatgcaggatgagttgaagtcaatacaagaagagaaggatgcagcgctaacacaactgaagctgtcagagacttcagtacaaaatcttgagaatgaggtgacacgactgaaatgggagttctccgtccagctagaaaacaattccaccttggacaagcagttggaggaggcaatgttgaaagtgtctagcctacatgagaatcttgagaaggcccaagctgaagcagcttgtcaacttgatggcatgagtacaaaaaccaaagatctagaggagacaatcaatcaattgtcttctcaaaagactaagttggagaaggatgtgaaaattatgattgaagcatgcacagaaaacatgtcatgtttggcaggatttgaagatagagttacacaaaaaatttcagatcaggaggcaggactgaaggttctccaccagagccttggaggggctgttggtagctgtcagaggcttcagtatgcatatgatgaggtgtccacaagggcatcacatcttgagatacttaagaggagtcagatggagcagattgatcagctagagcagaaaaacacagaaactgtggagaaacatcggcttctggaagaggaaaagttatctgcaaataaggagaatattaagctacaaaagcatgtccaagaccttgaagttcagctccagctagcaaagcagaagcttaaagttactgaggcagaaagcaaatgcaaagaagagagatatgaagcgtcagtggaagcactgcgggcagagatctgtcatcttgaacaattagtacagcagttttcagggagagtcagcttgctggaaggaactctcatgcaggttaaaggacatgctgagtcagtggtctgtaaatgggctgacaaattggatgagctagaaacaatctgcagtcagaattttgtgctcttcattgaccgctcatctgcatgtagtgacgagcttaaaatcctgaggaagaaggtacatgatcatcttaatgaacagaaggaacttgccaatgcgaacaacgagctggctattaggttcaaagagaaagaaatggtggtgtcagaaatggtgaagagtgctgctgaggcacagacaaagatgctccagctccagaagacggtggacgagaaagaagacgagctagcagctagagtgcaggagaagagagaagccatcaagcaactgagcgacaccattgtttaccacaagaactatagcgatgacctggtgcgctacatccgcagtcagagtcgccctcgcctcccgttctgcctttaaatctgaaagtcaatgaaagatgtaaaggcttaatctagctgtgattttttttttttgcagtaaggagaccattgcaatttttcttatgtatcatatatagggctcgaatactttctggaggtagccatatattcagtggcttgtgtattctattcgctactaaggggactgctgtagtaattgatttattcgttttgccttatcttttttatcggatcggtgaatatactgcctgagactgcgaaggaaggctcaagaaatatccaggtttgcagttttctatccaaattcgcacaggtaagtaacggcttgtaaagaatctttgccaaacatttttgctgttcatggcagattgtaggattgtctttgttcttcttcagttctggttcagattagtcccctgcaaattcaccatgcatttaagtttatttatatttaaactctcctcatcttggagccttttgtaatttgattgctaaaaggcgaatgaaaactatcaccagatccgtcattggctgcactttatcagaagtcaagcctgtagggtgagtttctag

SEQ ID NO: 32503 - DNA, 5986 bp, Zea Mays
aataaggtacgcgaaacggagggctttctaggcgtcggggtagatgctgcagtgcagtgcagtgcggtgcagaggctccaaaaaggacgagaccatggttgctggctcgctcgctcgctcgagggtcgagtgcgtttctaacgctgcccacaccacacaccacacaccagcctagtcgagaagaaagaaacctccggtctctgggtcaggttctcgccgagcacgcgatttcacccgtcctttcggttcagatcttgtttcggattcgacaggcgagggtgggagttatagaggagagccggacatttcggcgcggagcaaagctaatcaggagttgcaacataatatgctgtcaattatgatcaatttggtctgacgaagattttctgcaaacaaatagtaaagctaaagcttgtggatacaagaacttcagcatgacgaagaaacacaaaattagaaagtccaagcatcttttagagagcaaaaaggatgttgatgaaaatgtggagaacattttaagaatgatagaggaggagaacgaacagactgagaatgaacaagatgattctggaaatcccgtcaggaaatcaaagctatcttcccttgtgaagggcttccatgaggactatcaataccttcacaagcactacaaacagctaattagcaaactagaaactgctggccacagttcctcaggttcagattcatctgattcagatgtggaaggagacagattagagaataatgtaactacaccaaaagcagtgttgaatgaagaaaacggcctgaaccataagcttgatgaggttcatagcatggaagcagaaatcgagatgctaaaacaaagtacagaagaacacaccaaggaaatatctgatctgaaacagctactagaaaaagcaatcaaggataaagaagctacaaggggagagttcactttagaggttgcaaatttatcatctgagaatgaaaatctgaaatcattagttgaaactgcaaagagggaggaaggagacttgcttaacatcataaaatctaaggagaatgaggtcaaaacattgtctagtgagaagcaaactattgaagaggagagagataacctgaagatgtcagttgtagacatgaagaaggagatggaagatctgagcaatcagctcaaagatacagtggataaatgcagcgtcatggcatcagaactagagaagtccctgaaggctgagaaagaagtgcagaccttgtttgaagaaaaccagaacctgaagaaccataacttgatgctgtcggtggagcatgataacctgaaagcacttcatcataacttagatattgagtgctgtcaactgaaggcaaccattgcagaaaccaaagctgaaaatgaatcattgaccacagaaaatcattcagctgaaagaaaactccagcaattgagggtagaaatagatggcttgatggctgagaccacagtgataatgaacaatctggacaaggaacgtagtactgcagcagaagaaaaagaaaggctaacatcagaaaattctgtatacatgagtgagttagaggaggcacaatctaatgttaaggatctagaaaaggaactggagtcaacaaaaagtgttctcaataatcgtattgcggagctatgtaaggagaagaattctaccacatcagagatagaacggctagaggcttctttgatgaatcatcagaacgatctgtcacaacaacttgataggatttcagatatgcagaagactactgaaaacctggagctggcaaattctaacctgcataatgagattgtaaaagtacaaggacaaaagaatgaagctgttgcttctatagttaatctcgagagcatgttagaacagcaagtacaagagattgcaaatcttcaggaggccaacaaagaactcaaagcagcaaagactgatctacataatgaggttatgttacttcaacaggagaaaattgtagcactgactcagttacaagaatatgaggctcaaatcaagaatcttcgaattgacttggaacagcagtgcaaccaaatttcagttatgcagcaagcaaatgaagaaacacaggataaaaattctagcttgcacaagcaactggaagaaactaggattcatctgcaagaggagatcattgcattacaaggagagaaggaagaggccatcagtagcttacagcagtcaaatgattcactcaagaccctagaagtccagttagagcagcaaagagaacaaatttctgttctgcagcttgctcatgaagacttgcaaaatagcaattccaacctagagatgcaattggaagaggcgaaggttagtcaccatgctgaaattctagcattacaagatgaaaagaacaagattatttcagagttgcagcagtcagatggttgtatcaagaaccttagatttgagttggagcaaggaaaagagcaaacctcaatcttgcttcatgctaatgaagatatgaagaataacatttctgtcttggacaagcaattggaagaggtcaggagcagtttgcatgctgaaattgcagaagtacgtgcagagaaggagacagctctatcagagttacatatgtctcagacttccatcaggaacttagagagtgtggtagaaaagcaaactgagaacattttaactctagaaaaagctaatgataagttaaacaataaaatatgtatcttgacagagcaagtagaacaagccaaggctgagctgcataaggaggtagcggcaatacaagaagagaaggatacagcactaacacaattaagacagtcagagttttcaatacaagatcttgagaatgaggtgacacgactgaaagacgaactttcaattcagctggaaaaaaattccaccttggacaagcaatttgaagaattcaagagcaagctgcatgctgaaattttagacctacgcgcagagaaggacacatctctattggagttacagacatctcaggattctgtaaggaatcttgagattctggttgaaaagcaaactgagaacatttcaactctgcaccaagctaatgatgagttacagaagaacatctacactttgactgagcaatcacaacaagccaaggaggagatgcaggatgagttgaaggcaatacaagaagagaaggatacagtgctaacacaactgaagcagtcagagacttcagtacaaaatctagaggatgaggtgacacgactgaaagaggaactttccgtccagctagaaaacaattccaccttggacaagcagtttgcagaagctaggagcaatctgcatgctgaaatttcagacctacgtgcagagaagggcacatctctactggagttacagatgtctcaggcttctgtcaggaatcttgagattttggtcggaaagcaaactgagaacatttcaactctacagcaagctaatgaagagttacaaaagaacatctacactttgactgagcaatcacaacaggtcaaggtggagatgcaaagtgatttgaaggcaatacaagaagagaagaatgcggtgctatcacaactgaagcagtcagaaacttcagtacaaaatcttgagaatgaggtgatacgactgaaagaggagctttctgtccagctagaaaacaattccaccttggacaagcagtttgaagaagccaggagcaatctgcatgctgaaatttcagagctacgtgcagataagaacacatctctattgaaattacagacgtctcaggattctgtcaggaatcttgagattgtggttgaaaagcaaactgagaacatttcaactctacagcaagctaatgatgagttacagaagaacatctacactttgacggagcaatcacaacgagacaaggcggagatgcaggatgagttgaaggcaatacaagaagataaggatgcagtgctaacacaactgaagcagtcagagacttcagtacaaaatctagaggatgagttgacacgactgaaagaggagctttccgtccagctagaaaacaattccaccttggacaagcagtttgcagaagccaggagcaatctgcatgctgaaatttcagacctacatacagagaaggacacatctctacgggaattacagacgtctcaggcttgtgtcaggaatcttgagattgtggttgaaaagcaaactgagaacatttcaactctacagcaagctaatgatgaattacagaagaatgtctatactttgactgagcaatcacagcaagccaaggtggagatgcaggatgagttgaagtcaatacaagaagagaaggatgcagcgctaacacaactgaagctgtcagagacttcagtacaaaatcttgagaatgaggtgacacgactgaaatgggagttctccgtccagctagaaaacaattccaccttggacaagcagttggaggaggcaatgttgaaagtgtctagcctacatgagaatcttgagaaggcccaagctgaagcagcttgtcaacttgatggcatgagtacaaaaaccaaagatctagaggagacaatcaatcaattgtcttctcaaaagactaagttggagaaggatgtgaaaattatgattgaagcatgcacagaaaacatgtcatgtttggcaggatttgaagatagagttacacaaaaaatttcagatcaggaggcaggactgaaggttctccaccagagccttggaggggctgttggtagctgtcagaggcttcagtatgcatatgatgaggtgtccacaagggcatcacatcttgagatacttaagaggagtcagatggagcagattgatcagctagagcagaaaaacacagaaactgtggagaaacatcggcttctggaagaggaaaagttatctgcaaataaggagaatattaagctacaaaagcatgtccaagaccttgaagttcagctccagctagcaaagcagaagcttaaagttactgaggcagaaagcaaatgcaaagaagagagatatgaagcgtcagtggaagcactgcgggcagagatctgtcatcttgaacaattagtacagcagttttcagggagagtcagcttgctggaaggaactctcatgcaggttaaaggacatgctgagtcagtggtctgtaaatgggctgacaaattggatgagctagaaacaatctgcagtcagaattttgtgctcttcattgaccgctcatctgcatgtagtgacgagcttaaaatcctgaggaagaaggtacatgatcatcttaatgaacagaaggaacttgccaatgcgaacaacgagctggctattaggttcaaagagaaagaaatggtggtgtcagaaatggtgaagagtgctgctgaggcacagacaaagatgctccagctccagaagacggtggacgagaaagaagacgagctagcagctagagtgcaggagaagagagaagccatcaagcaactgagcgacaccattgtttaccacaagaactatagcgatgacctgtaaggagaccattgcaatttttcttatgtatcatatatagggctcgaatactttctggaggtagccatatattcagtggcttgtgtattctattcgctactaaggggactgctgtagtaattgatttattcgttttgccttatcttttttatcggatcggtgaatatactgcctgagactgcgaaggaaggctcaagaaatatccaggtttgcagttttctatccaaattcgcacaggtaagtaacggcttgtaaagaatctttgccaaacatttttgctgttcatggcagattgtaggattgtctttgttcttcttcagttctggttcagattagtcccctgcaaattcaccatgcatttaagtttatttatatttaaactctcctcatcttggagccttttgtaatttgattgctaaaaggcgaatgaaaactatcaccagatccgtcattggctgcactttatcagaagtcaagcctgtagggtgagtttctag

SEQ ID NO: 32504 - DNA, 1160 bp, Zea Mays
gtcgagtgcgtttctaacgctgcccacaccacacaccacacaccagcctagtcgagaagaaagaaacctccggtctctgggtcaggttctcgccgagcacgcgatttcacccgtcctttcggttcagatcttgtttcggattcgacaggcgagggtgggagttatagaggagagccggacatttcggcgcggtatgtctcttggctctctcagtttttatctggtgtttcttgtttccgcgattacgtgggctgcgctagtcaagaacttctgtaggaatcttggatggatcggttgtggcctgcaggttctgaggtggcagctgacatggatcgctgcagaagattaagattacaccagaaccatatatttctccgttccaagtcttagccttcgttgcatcttccgtgttcttcttcttcttcctgtctagatgtgtgattagccgtcagcccgttagtcgttaacttttttgttcatgcattattattatttttgaatattccttggctacctgggacccgcatgtttcttatcactggctgatgatttcatataagacaaaatacttcgcgctggtcctggtcgtcgttccccaatcagctcgcatatgagtacgtaactggtttatgcaacgaacaatactgggctcacgctcaaaacggccccatatggcatttcaaatagggttttttaatttgatgcccttagttttggtggtgtgctcatctatacccttagtcgtgttttttgctcggatgtgccaatatgcatctgaacttgtcatttttttacaacaacttgcgcagttatgctgcccaagagcaagagggtgggcgacgacgagaatggtagatggaaatggatgaagtgtttataatgtactcatccagattgcaatttagctcagtcagactctggttttgagatggccttgcagttgtaggcatagaagatgaacacgtccatgcttctcagaggctgcaatatctgtatgcgtacattataaacgtctctatatatccatctgcttatttggtagtgctgtccatgctaacacaagacagcagatatatgccactatatgctagtgcaatgaactcccaaagtgtctttcaaaagtaaccagtttatcatctgggaaagagtaccttagcctt

SEQ ID NO: 32505 - DNA, 523 bp, Zea Mays
ctgcccacaccacacaccacacaccagcctagtcgagaagaaagaaacctccggtctctgggtcaggttctcgccgagcacgcgatttcacccgtcctttcggttcagatcttgtttcggattcgacaggcgagggtgggagttatagaggagagccggacatttcggcgcgttatgctgcccaagagcaagagggtgggcgacgacgagaatggtagatggaaatggatgaagtgtttataatgtactcatccagattgcaatttagctcagtcagactctggttttgagatggccttgcagttgtaggcatagaagatgaacacgtccatgcttctcagaggctgcaatatctgtatgcgtacattataaacgtctctatatatccatctgcttatttggtagtgctgtccatgctaacacaagacagcagatatatgccactatatgctagtgcaatgaactcccaaagtgtctttcaaaagtaaccagtttatcatctgggaaagagtaccttagcctt

SEQ ID NO: 32506 - DNA, 5777 bp, Zea Mays
cccacaccacacaccacacaccagcctagtcgagaagaaagaaacctccggtctctgggtcaggttctcgccgagcacgcgatttcacccgtcctttcggttcagatcttgtttcggattcgacaggcgagggtgggagttatagaggagagccggacatttcggcgcgatgttgatgaaaatgtggagaacattttaagaatgatagaggaggagaacgaacagactgagaatgaacaagatgattctggaaatcccgtcaggaaatcaaagctatcttcccttgtgaagggcttccatgaggactatcaataccttcacaagcactacaaacagctaattagcaaactagaaactgctggccacagttcctcaggttcagattcatctgattcagatgtggaaggagacagattagagaataatgtaactacaccaaaagcagtgttgaatgaagaaaacggcctgaaccataagcttgatgaggttcatagcatggaagcagaaatcgagatgctaaaacaaagtacagaagaacacaccaaggaaatatctgatctgaaacagctactagaaaaagcaatcaaggataaagaagctacaaggggagagttcactttagaggttgcaaatttatcatctgagaatgaaaatctgaaatcattagttgaaactgcaaagagggaggaaggagacttgcttaacatcataaaatctaaggagaatgaggtcaaaacattgtctagtgagaagcaaactattgaagaggagagagataacctgaagatgtcagttgtagacatgaagaaggagatggaagatctgagcaatcagctcaaagatacagtggataaatgcagcgtcatggcatcagaactagagaagtccctgaaggctgagaaagaagtgcagaccttgtttgaagaaaaccagaacctgaagaaccataacttgatgctgtcggtggagcatgataacctgaaagcacttcatcataacttagatattgagtgctgtcaactgaaggcaaccattgcagaaaccaaagctgaaaatgaatcattgaccacagaaaatcattcagctgaaagaaaactccagcaattgagggtagaaatagatggcttgatggctgagaccacagtgataatgaacaatctggacaaggaacgtagtactgcagcagaagaaaaagaaaggctaacatcagaaaattctgtatacatgagtgagttagaggaggcacaatctaatgttaaggatctagaaaaggaactggagtcaacaaaaagtgttctcaataatcgtattgcggagctatgtaaggagaagaattctaccacatcagagatagaacggctagaggcttctttgatgaatcatcagaacgatctgtcacaacaacttgataggatttcagatatgcagaagactactgaaaacctggagctggcaaattctaacctgcataatgagattgtaaaagtacaaggacaaaagaatgaagctgttgcttctatagttaatctcgagagcatgttagaacagcaagtacaagagattgcaaatcttcaggaggccaacaaagaactcaaagcagcaaagactgatctacataatgaggttatgttacttcaacaggagaaaattgtagcactgactcagttacaagaatatgaggctcaaatcaagaatcttcgaattgacttggaacagcagtgcaaccaaatttcagttatgcagcaagcaaatgaagaaacacaggataaaaattctagcttgcacaagcaactggaagaaactaggattcatctgcaagaggagatcattgcattacaaggagagaaggaagaggccatcagtagcttacagcagtcaaatgattcactcaagaccctagaagtccagttagagcagcaaagagaacaaatttctgttctgcagcttgctcatgaagacttgcaaaatagcaattccaacctagagatgcaattggaagaggcgaaggttagtcaccatgctgaaattctagcattacaagatgaaaagaacaagattatttcagagttgcagcagtcagatggttgtatcaagaaccttagatttgagttggagcaaggaaaagagcaaacctcaatcttgcttcatgctaatgaagatatgaagaataacatttctgtcttggacaagcaattggaagaggtcaggagcagtttgcatgctgaaattgcagaagtacgtgcagagaaggagacagctctatcagagttacatatgtctcagacttccatcaggaacttagagagtgtggtagaaaagcaaactgagaacattttaactctagaaaaagctaatgataagttaaacaataaaatatgtatcttgacagagcaagtagaacaagccaaggctgagctgcataaggaggtagcggcaatacaagaagagaaggatacagcactaacacaattaagacagtcagagttttcaatacaagatcttgagaatgaggtgacacgactgaaagacgaactttcaattcagctggaaaaaaattccaccttggacaagcaatttgaagaattcaagagcaagctgcatgctgaaattttagacctacgcgcagagaaggacacatctctattggagttacagacatctcaggattctgtaaggaatcttgagattctggttgaaaagcaaactgagaacatttcaactctgcaccaagctaatgatgagttacagaagaacatctacactttgactgagcaatcacaacaagccaaggaggagatgcaggatgagttgaaggcaatacaagaagagaaggatacagtgctaacacaactgaagcagtcagagacttcagtacaaaatctagaggatgaggtgacacgactgaaagaggaactttccgtccagctagaaaacaattccaccttggacaagcagtttgcagaagctaggagcaatctgcatgctgaaatttcagacctacgtgcagagaagggcacatctctactggagttacagatgtctcaggcttctgtcaggaatcttgagattttggtcggaaagcaaactgagaacatttcaactctacagcaagctaatgaagagttacaaaagaacatctacactttgactgagcaatcacaacaggtcaaggtggagatgcaaagtgatttgaaggcaatacaagaagagaagaatgcggtgctatcacaactgaagcagtcagaaacttcagtacaaaatcttgagaatgaggtgatacgactgaaagaggagctttctgtccagctagaaaacaattccaccttggacaagcagtttgaagaagccaggagcaatctgcatgctgaaatttcagagctacgtgcagataagaacacatctctattgaaattacagacgtctcaggattctgtcaggaatcttgagattgtggttgaaaagcaaactgagaacatttcaactctacagcaagctaatgatgagttacagaagaacatctacactttgacggagcaatcacaacgagacaaggcggagatgcaggatgagttgaaggcaatacaagaagataaggatgcagtgctaacacaactgaagcagtcagagacttcagtacaaaatctagaggatgagttgacacgactgaaagaggagctttccgtccagctagaaaacaattccaccttggacaagcagtttgcagaagccaggagcaatctgcatgctgaaatttcagacctacatacagagaaggacacatctctacgggaattacagacgtctcaggcttgtgtcaggaatcttgagattgtggttgaaaagcaaactgagaacatttcaactctacagcaagctaatgatgaattacagaagaatgtctatactttgactgagcaatcacagcaagccaaggtggagatgcaggatgagttgaagtcaatacaagaagagaaggatgcagcgctaacacaactgaagctgtcagagacttcagtacaaaatcttgagaatgaggtgacacgactgaaatgggagttctccgtccagctagaaaacaattccaccttggacaagcagttggaggaggcaatgttgaaagtgtctagcctacatgagaatcttgagaaggcccaagctgaagcagcttgtcaacttgatggcatgagtacaaaaaccaaagatctagaggagacaatcaatcaattgtcttctcaaaagactaagttggagaaggatgtgaaaattatgattgaagcatgcacagaaaacatgtcatgtttggcaggatttgaagatagagttacacaaaaaatttcagatcaggaggcaggactgaaggttctccaccagagccttggaggggctgttggtagctgtcagaggcttcagtatgcatatgatgaggtgtccacaagggcatcacatcttgagatacttaagaggagtcagatggagcagattgatcagctagagcagaaaaacacagaaactgtggagaaacatcggcttctggaagaggaaaagttatctgcaaataaggagaatattaagctacaaaagcatgtccaagaccttgaagttcagctccagctagcaaagcagaagcttaaagttactgaggcagaaagcaaatgcaaagaagagagatatgaagcgtcagtggaagcactgcgggcagagatctgtcatcttgaacaattagtacagcagttttcagggagagtcagcttgctggaaggaactctcatgcaggttaaaggacatgctgagtcagtggtctgtaaatgggctgacaaattggatgagctagaaacaatctgcagtcagaattttgtgctcttcattgaccgctcatctgcatgtagtgacgagcttaaaatcctgaggaagaaggtacatgatcatcttaatgaacagaaggaacttgccaatgcgaacaacgagctggctattaggttcaaagagaaagaaatggtggtgtcagaaatggtgaagagtgctgctgaggcacagacaaagatgctccagctccagaagacggtggacgagaaagaagacgagctagcagctagagtgcaggagaagagagaagccatcaagcaactgagcgacaccattgtttaccacaagaactatagcgatgacctggtgcgctacatccgcagtcagagtcgccctcgcctcccgttctgcctttaaatctgaaagtcaatgaaagatgtaaaggcttaatctagctgtgattttttttttttgcagtaaggagaccattgcaatttttcttatgtatcatatatagggctcgaatactttctggaggtagccatatattcagtggcttgtgtattctattcgctactaaggggactgctgtagtaattgatttattcgttttgccttatcttttttatcggatcggtgaatatactgcctgagactgcgaaggaaggctcaagaaatatccaggtttgcagttttctatccaaattcgcacaggtaagtaacggcttgtaaagaatctttgccaaacatttttgctgttcatggcagattgtaggattgtctttgttcttcttcagttctggttcagattagtcccctgcaaattcaccatgcatttaagtttatttatatttaaactctcctcatcttggagccttttgtaatttgattgctaaaaggcgaatgaaaactatcaccagatccgtcattggctgcactttatcagaagtcaagcctgtagggtgagtttctag

SEQ ID NO: 32507 - DNA, 454 bp, Zea Mays
cgtcctcgccgcccggcggcggcggcggcggctacgcggtgggtggtggtggcggcgtggccggtgtcccgaacgtgcctgacgtggagctcgcctccacgacaaactcccctatggctatgggggagatggatttcatgttcccgctggacgccgccgatttcttggagctggagaacccggccagctatttctaaacgacacaaaccacgtgcctgcatctatactagtctagctagccaagaaataccgataggtaaacacgacaaggcgaaacgagcacctctctcactgccatccctcactggtacggtgtataatctccccttgcaagctggaagtatgcaagggtagatacggctatgacatgtcacgccacgcgtcatcctagttctgaaacctttctccaacatatgtatagttgcccgctctcttgcatatatatacttcgact

SEQ ID NO: 32508 - DNA, 4107 bp, Zea Mays
gaaaaacaaccaacattttcctttcccattttctccacccacacgatctcgtcgtctcccatcccggcggccgccgcctccccctccccctccccctcccctccgctccctcaccctaccaaaaccctagccgctgaaccccaagcgccctcgcgctcgcctctccccgccgccacggcagcctagatccccgcgcgccccgcgtcgccagcttcggagcttccgcatctgggttggtggtgttctgttagggttggcccaccatgcctcggagttcgcgtcacaggtcgcaccggtcccacaggcggggagggtccgctgaccggtcggagtcagagggcgaggagtcggctccggcctcgggcgcgcgggaggaggccgcggcggcggctagggtttccaaagatgccgagcccgagaggcgtcgttcgtcctcggggaaggagcccgtgagatcggggaacgggtacccggagcacgggaaaaagaggaaggagagggttgaggatgccgtggtggatgtggtcagcgaccggtggaatagtggcgtctgcgacgatcacctggtcgacaagaggtccaagagtgagacctttgggcatgctgaaatggagaaactgcccgacaagtccaggggatcgggggatgagtccaagaggtcaagcagacgggcgatgattgtggatgacagggccgaggaggttgcgtccaagagtgactctgggaagcggaggtcagagaaagagaaggatgggaggaaggagagtgctgggcaagaaagattatgattccaagcatgagaggtatgaggatggcggtagcaggaagagtggctcaaagacgagtagggcggaagaggatgcctacttgtataggagagatacagatgtcaatgaaatttcagcaaaagggaagtacaataatcctgatatgcaagctgacaaacacagccgaagaaaagatgattctgaagatacagataagtggcccactgacaatagagacagcgatgacagaaagaccctgtccagatatgaacatggtaaatctaggagttctaaggagcaaaggtttgatgatgacaagtataaggaaaagtacaaggacgaatatggaagggataaaaggcaacatgatgacaagttttctgatgagcgagtggctcgtagtcatgaaagtgatagagctaattataagagtgctaaagatgggcacaaaagctcagagagccattacagaaaggatgcagttcaagatgatcattatgaggattatggcaacaggtataaagaaagtagagggaaaaaacgacctcctgaggaaaatgacgaccaatacgatttaaagcctccaaacacacgtgatcaacgtgtgcatttggaaaaatcttcaggcagtgggcgtctggattctttgattgagagagcaagacctgatcgtagttgtagtccaagtaaaatccactcaagaagttcacctagcacaagttcttatcatgataaagatcaaaaccggcatggatctaaagtggtagatcatggaaagagagaaatgccatatgatgagagaaatagtcgaccaagaacatcttctgctagagaaaggacacctgcttctagacttcgtgacagggatgcagaaaattggtcttctgaaaggcttaaacagaaggatgaccagccttgtgatgtagcattggaaattcctacatcatcacactatgatcgcacacctaggaaagataagcatacttcaccaaaacaactgtctgaaaaatctccctcttcaggtgatcagaggttttcaggcaggcctagtggtgggcgcagtctagataataaaggagaaagaaacagccttacgaaatacagagatagagatggcgacctagcccaagaacgatcacatcatcaagatcgaacaccagctaaagttccattcagagagctaacaccatcaaattcatccataagtagaagttgtcatttttcaggcagttcaccaaatcatcctctgccaccttctgcaaggaatagcgactcttccttccttagtctgcatgatgatgaccgtaggcctcaaaatggagataggagattccatggtcatcaaaagaggaatgacatgaattcggttcgtggacatggacatgcctggaacaatccgccaaactgggcttctccagtttctaatggatttgcccccatccaacatggtggtcctccttgttttcatccgcctgtccatcagtttcgaggcccacctatgtttaaccttagacctcaaatgaagttaaaccagcctggagtttcatatcccatgcatgatgctgtcgataggttttcaacccacatgcacccatttgggtggcctaatcatctggatgaatcatgcccacctcatatgcaagtttggaatggaggcagtagtgtgtttccgggtgaaccctatatttacggtagacaagagtgggatcagaatagacctcatggtggcagcagagggtgggagctgactggtgatatatccaagggaccaaatgatgtgccggatgctgaacttctgatagctaagaaggatccttactctgcaataactgctgtttctgattctggtggacaacataatcttcaaccccaggctgagcaaaaggagattggacacttgactgctgaaaaatttgaaacaaaggatgattctaaaagttcaaaaagtttggaatctcttcaaggagtacaacatgtgacttctatgctgacaaagaatggtgcggtcttttgtaaagactatctagccagaatcaatgtttcacatgaccttgttgagtctgagttgtacaaaaggtgtatatccttgctgggagacttgggcgtaacaaaagcctctcatttggttaggaatggaattcaggataacgaaaatattgaaaaaatgtctacaaaatatggacacctcaaccctttcagttcacgttacctcaagagtgacagtactatctttcagagggctttggcccttcgtaacaaccagactcgaaagggtttaattattgtctccgcatctgtaaaaatggaagcgaacatggatgtactagaagatgaccatggcaaggaaatgcttgaacaagtggtgagcaatcctgctctgcaacgtcacactgaggtcatggaggaaggatcactgtcaaaacaggaacttggtgatggcatagaggggactattccagcaactataggatctgggggtctggatgcacctccagaaattccccaacctgaggtggtggtggcaacaacagcaatcacacagtttaacaaggacatggaggatgtgttacctccagcaattgaggatggtgcactacaagcaaccctcgaacatgctgttggcatactggaagttacacctggtgatggcttggggaatgttgcaccttcttcaggtgatgacatggagattatgccctctgctatgacagaacctcgactaggcaaagaaactgctcctgttgctagccctcctgacagtcaagagaagccatccatcatgcatgattctgagacaggtatggaggttgataaagttatcgatgatattcatggggatggtagggtgagctctattcttggcaccaaacttgatgttgctgcaagtgatggggattctgaagctttgttggtggaaagtagggtaaatttaagtcggatacctaattccccagaaagtacacattgaacaccttttattccattttaatttctttttgtctgagggtcttctgccctcagcctagcccgagttgccatattttgtttacatctgggcgttctcttatagtttaatgttcgcagtgagataggtgtccttatgggggacttggacgtacccgtggaatgcaggacctggtggctggtgcaatggcacgcctagtagtccgtgcgcatccagctgcgtttcttgttttctgcttggacgcagtagtgcccccttattggcatgaatgtctcgctgcagcttttgctaaggtcgccccatagctcggccaccctttttcatgaaacatttttctgggatgggattgttagggaaaaaatgagtgtcccaaat

SEQ ID NO: 32509 - DNA, 3847 bp, Zea Mays
gaaaaacaaccaacattttcctttcccattttctccacccacacgatctcgtcgtctcccatcccggcggccgccgcctccccctccccctccccctcccctccgctccctcaccctaccaaaaccctagccgctgaaccccaagcgccctcgcgctcgcctctccccgccgccacggcagcctagatccccgcgcgccccgcgtcgccagcttcggagcttccgcatctgggttggtggtgttctgttagggttggcccaccatgcctcggagttcgcgtcacaggtcgcaccggtcccacaggcggggagggtccgctgaccggtcggagtcagagggcgaggagtcggctccggcctcgggcgcgcgggaggaggccgcggcggcggctagggtttccaaagatgccgagcccgagaggcgtcgttcgtcctcggggaaggagcccgtgagatcggggaacgggtacccggagcacgggaaaaagaggaaggagagggttgaggatgccgtggtggatgtggtcagcgaccggtggaatagtggcgtctgcgacgatcacctggtcgacaagaggtccaagagtgagacctttgggcatgctgaaatggagaaactgcccgacaagtccaggggatcgggggatgagtccaagaggtcaagcagacgggcgatgattgtggatgacagggccgaggaggttgcgtccaagagtgactctgggaagcggaggtcagagaaagagaaggatgggaggaaggagagtgctgggcattataaggatgacagagatagggagagggagaaggaaagggaaagggacagggaaagggaaaaagaatgggagcggcagagggagcgagatatgggaaggagtagggatagagagcgtgagaaggaaagagaacgggagaaggagagggagagggagagagaacgggaacaggaacaggaacacgagcgtgagaaagataaggatcgagagcgggatagggaaagggagagggagcgtgataggcagaaggaccgtgagagggacaagaaagattatgattccaagcatgagaggtatgaggatggcggtagcaggaagagtggctcaaagacgagtagggcggaagaggatgcctacttgtataggagagatacagatgtcaatgcaaaagggaagtacaataatcctgatatgcaagctgacaaacacagccgaagaaaagatgattctgaagatacagataagtggcccactgacaatagagacagcgatgacagaaagaccctgtccagatatgaacatggtaaatctaggagttctaaggagcaaaggtttgatgatgacaagtataaggaaaagtacaaggacgaatatggaagggataaaaggcaacatgatgacaagttttctgatgagcgagtggctcgtagtcatgaaagtgatagagctaattataagagtgctaaagatgggcacaaaagctcagagagccattacagaaaggatgcagttcaagatgatcattatgaggattatggcaacaggtataaagaaagtagagggaaaaaacgacctcctgaggaaaatgacgaccaatacgatttaaagcctccaaacacacgtgatcaacgtgtgcatttggaaaaatcttcaggcagtgggcgtctggattctttgattgagagagcaagacctgatcgtagttgtagtccaagtaaaatccactcaagaagttcacctagcacaagttcttatcatgataaagatcaaaaccggcatggatctaaagtggtagatcatggaaagagagaaatgccatatgatgagagaaatagtcgaccaagaacatcttctgctagagaaaggacacctgcttctagacttcgtgacagggatgcagaaaattggtcttctgaaaggcttaaacagaaggatgaccagccttgtgatgtagcattggaaattcctacatcatcacactatgatcgcacacctaggaaagataagcatacttcaccaaaacaactgtctgaaaaatctccctcttcaggtgatcagaggttttcaggcaggcctagtggtgggcgcagtctagataataaaggagaaagaaacagccttacgaaatacagagatagagatggcgacctagcccaagaacgatcacatcatcaagatcgaacaccagctaaagttccattcagagagctaacaccatcaaattcatccataagtagaagttgtcatttttcaggcagttcaccaaatcatcctctgccaccttctgcaaggaatagcgactcttccttccttagtctgcatgatgatgaccgtaggcctcaaaatggagataggagattccatggtcatcaaaagaggaatgacatgaattcggttcgtggacatggacatgcctggaacaatccgccaaactgggcttctccagtttctaatggatttgcccccatccaacatggtggtcctccttgttttcatccgcctgtccatcagtttcgaggcccacctatgtttaaccttagacctcaaatgaagttaaaccagcctggagtttcatatcccatgcatgatgctgtcgataggttttcaacccacatgcacccatttgggtggcctaatcatctggatgaatcatgcccacctcatatgcaagtttggaatggaggcagtagtgtgtttccgggtgaaccctatatttacggtagacaagagtgggatcagaatagacctcatggtggcagcagagggtgggagctgactggtgatatatccaagggaccaaatgatgtgccggatgctgaacttctgatagctaagaaggatccttactctgcaataactgctgtttctgattctggtggacaacataatcttcaaccccaggctgagcaaaaggagattggacacttgactgctgaaaaatttgaaacaaaggatgattctaaaagttcaaaaagtttggaatctcttcaaggagtacaacatgtgacttctatgctgacaaagaatggtgcggtcttttgtaaagactatctagccagaatcaatgtttcacatgaccttgttgagtctgagttgtacaaaaggtgtatatccttgctgggagacttgggcgtaacaaaagcctctcatttggttaggaatggaattcaggataacgaaaatattgaaaaaatgtctacaaaatatggacacctcaaccctttcagttcacgttacctcaagagtgacagtactatctttcagagggctttggcccttcgtaacaaccagactcgaaagggtttaattattgtctccgcatctgtaaaaatggaagcgaacatggatgtactagaagatgaccatggcaaggaaatgcttgaacaagtggtgagcaatcctgctctgcaacgtcacactgaggtcatggaggaaggatcactgtcaaaacaggaacttggtgatggcatagaggggactattccagcaactataggatctgggggtctggatgcacctccagaaattccccaacctgaggtggtggtggcaacaacagcaatcacacagtttaacaaggacatggaggatgtgttacctccagcaattgaggatggtgcactacaagcaaccctcgaacatgctgttggcatactggaagttacacctggtgatggcttggggaatgttgcaccttcttcaggtgatgacatggagattatgccctctgctatgacagaacctcgactaggcaaagaaactgctcctgttgctagccctcctgacagtcaagagaagccatccatcatgcatgattctgagacaggcggatggggttttcaatgtgaaag

SEQ ID NO: 32510 - DNA, 3999 bp, Zea Mays
gaaaaacaaccaacattttcctttcccattttctccacccacacgatctcgtcgtctcccatcccggcggccgccgcctccccctccccctccccctcccctccgctccctcaccctaccaaaaccctagccgctgaaccccaagcgccctcgcgctcgcctctccccgccgccacggcagcctagatccccgcgcgccccgcgtcgccagcttcggagcttccgcatctgggttggtggtgttctgttagggttggcccaccatgcctcggagttcgcgtcacaggtcgcaccggtcccacaggcggggagggtccgctgaccggtcggagtcagagggcgaggagtcggctccggcctcgggcgcgcgggaggaggccgcggcggcggctagggtttccaaagatgccgagcccgagaggcgtcgttcgtcctcggggaaggagcccgtgagatcggggaacgggtacccggagcacgggaaaaagaggaaggagagggttgaggatgccgtggtggatgtggtcagcgaccggtggaatagtggcgtctgcgacgatcacctggtcgacaagaggtccaagagtgagacctttgggcatgctgaaatggagaaactgcccgacaagtccaggggatcgggggatgagtccaagaggtcaagcagacgggcgatgattgtggatgacagggccgaggaggttgcgtccaagagtgactctgggaagcggaggtcagagaaagagaaggatgggaggaaggagagtgctgggcattataaggatgacagagatagggagagggagaaggaaagggaaagggacagggaaagggaaaaagaatgggagcggcagagggagcgagatatgggaaggagtagggatagagagcgtgagaaggaaagagaacgggagaaggagagggagagggagagagaacgggaacaggaacaggaacacgagcgtgagaaagataaggatcgagagcgggatagggaaagggagagggagcgtgataggcagaaggaccgtgagagggacaagaaagattatgattccaagcatgagaggtatgaggatggcggtagcaggaagagtggctcaaagacgagtagggcggaagaggatgcctacttgtataggagagatacagatgtcaatggcagaaatttcagcaaaagggaagtacaataatcctgatatgcaagctgacaaacacagccgaagaaaagatgattctgaagatacagataagtggcccactgacaatagagacagcgatgacagaaagaccctgtccagatatgaacatggtaaatctaggagttctaaggagcaaaggtttgatgatgacaagtataaggaaaagtacaaggacgaatatggaagggataaaaggcaacatgatgacaagttttctgatgagcgagtggctcgtagtcatgaaagtgatagagctaattataagagtgctaaagatgggcacaaaagctcagagagccattacagaaaggatgcagttcaagatgatcattatgaggattatggcaacaggtataaagaaagtagagggaaaaaacgacctcctgaggaaaatgacgaccaatacgatttaaagcctccaaacacacgtgatcaacgtgtgcatttggaaaaatcttcaggcagtgggcgtctggattctttgattgagagagcaagacctgatcgtagttgtagtccaagtaaaatccactcaagaagttcacctagcacaagttcttatcatgataaagatcaaaaccggcatggatctaaagtggtagatcatggaaagagagaaatgccatatgatgagagaaatagtcgaccaagaacatcttctgctagagaaaggacacctgcttctagacttcgtgacagggatgcagaaaattggtcttctgaaaggcttaaacagaaggatgaccagccttgtgatgtagcattggaaattcctacatcatcacactatgatcgcacacctaggaaagataagcatacttcaccaaaacaactgtctgaaaaatctccctcttcaggtgatcagaggttttcaggcaggcctagtggtgggcgcagtctagataataaaggagaaagaaacagccttacgaaatacagagatagagatggcgacctagcccaagaacgatcacatcatcaagatcgaacaccagctaaagttccattcagagagctaacaccatcaaattcatccataagtagaagttgtcatttttcaggcagttcaccaaatcatcctctgccaccttctgcaaggaatagcgactcttccttccttagtctgcatgatgatgaccgtaggcctcaaaatggagataggagattccatggtcatcaaaagaggaatgacatgaattcggttcgtggacatggacatgcctggaacaatccgccaaactgggcttctccagtttctaatggatttgcccccatccaacatggtggtcctccttgttttcatccgcctgtccatcagtttcgaggcccacctatgtttaaccttagacctcaaatgaagttaaaccagcctggagtttcatatcccatgcatgatgctgtcgataggttttcaacccacatgcacccatttgggtggcctaatcatctggatgaatcatgcccacctcatatgcaagtttggaatggaggcagtagtgtgtttccgggtgaaccctatatttacggtagacaagagtgggatcagaatagacctcatggtggcagcagagggtgggagctgactggtgatatatccaagggaccaaatgatgtgccggatgctgaacttctgatagctaagaaggatccttactctgcaataactgctgtttctgattctggtggacaacataatcttcaaccccaggctgagcaaaaggagattggacacttgactgctgaaaaatttgaaacaaaggatgattctaaaagttcaaaaagtttggaatctcttcaaggagtacaacatgtgacttctatgctgacaaagaatggtgcggtcttttgtaaagactatctagccagaatcaatgtttcacatgaccttgttgagtctgagttgtacaaaaggtgtatatccttgctgggagacttgggcgtaacaaaagcctctcatttggttaggaatggaattcaggataacgaaaatattgaaaaaatgtctacaaaatatggacacctcaaccctttcagttcacgttacctcaagagtgacagtactatctttcagagggctttggcccttcgtaacaaccagactcgaaagggtttaattattgtctccgcatctgtaaaaatggaagcgaacatggatgtactagaagatgaccatggcaaggaaatgcttgaacaagtggtgagcaatcctgctctgcaacgtcacactgaggtcatggaggaaggatcactgtcaaaacaggaacttggtgatggcatagaggggactattccagcaactataggatctgggggtctggatgcacctccagaaattccccaacctgaggtggtggtggcaacaacagcaatcacacagtttaacaaggacatggaggatgtgttacctccagcaattgaggatggtgcactacaagcaaccctcgaacatgctgttggcatactggaagttacacctggtgatggcttggggaatgttgcaccttcttcaggtgatgacatggagattatgccctctgctatgacagaacctcgactaggcaaagaaactgctcctgttgctagccctcctgacagtcaagagaagccatccatcatgcatgattctgagacagcagcgacaagggccgaggaagctcgagacatcgctcccctacgtgtttgtgaaggcaccatgggagatgggttgtgaggagtccaatggattttaaatacctaagatttttatccaaaccatgcatttgggtctcatgccaattgatatccatgtccaaaaaag

SEQ ID NO: 32511 - DNA, 3995 bp, Zea Mays
gaaaaacaaccaacattttcctttcccattttctccacccacacgatctcgtcgtctcccatcccggcggccgccgcctccccctccccctccccctcccctccgctccctcaccctaccaaaaccctagccgctgaaccccaagcgccctcgcgctcgcctctccccgccgccacggcagcctagatccccgcgcgccccgcgtcgccagcttcggagcttccgcatctgggttggtggtgttctgttagggttggcccaccatgcctcggagttcgcgtcacaggtcgcaccggtcccacaggcggggagggtccgctgaccggtcggagtcagagggcgaggagtcggctccggcctcgggcgcgcgggaggaggccgcggcggcggctagggtttccaaagatgccgagcccgagaggcgtcgttcgtcctcggggaaggagcccgtgagatcggggaacgggtacccggagcacgggaaaaagaggaaggagagggttgaggatgccgtggtggatgtggtcagcgaccggtggaatagtggcgtctgcgacgatcacctggtcgacaagaggtccaagagtgagacctttgggcatgctgaaatggagaaactgcccgacaagtccaggggatcgggggatgagtccaagaggtcaagcagacgggcgatgattgtggatgacagggccgaggaggttgcgtccaagagtgactctgggaagcggaggtcagagaaagagaaggatgggaggaaggagagtgctgggcattataaggatgacagagatagggagagggagaaggaaagggaaagggacagggaaagggaaaaagaatgggagcggcagagggagcgagatatgggaaggagtagggatagagagcgtgagaaggaaagagaacgggagaaggagagggagagggagagagaacgggaacaggaacaggaacacgagcgtgagaaagataaggatcgagagcgggatagggaaagggagagggagcgtgataggcagaaggaccgtgagagggacaagaaagattatgattccaagcatgagaggtatgaggatggcggtagcaggaagagtggctcaaagacgagtagggcggaagaggatgcctacttgtataggagagatacagatgtcaatgaaatttcagcaaaagggaagtacaataatcctgatatgcaagctgacaaacacagccgaagaaaagatgattctgaagatacagataagtggcccactgacaatagagacagcgatgacagaaagaccctgtccagatatgaacatggtaaatctaggagttctaaggagcaaaggtttgatgatgacaagtataaggaaaagtacaaggacgaatatggaagggataaaaggcaacatgatgacaagttttctgatgagcgagtggctcgtagtcatgaaagtgatagagctaattataagagtgctaaagatgggcacaaaagctcagagagccattacagaaaggatgcagttcaagatgatcattatgaggattatggcaacaggtataaagaaagtagagggaaaaaacgacctcctgaggaaaatgacgaccaatacgatttaaagcctccaaacacacgtgatcaacgtgtgcatttggaaaaatcttcaggcagtgggcgtctggattctttgattgagagagcaagacctgatcgtagttgtagtccaagtaaaatccactcaagaagttcacctagcacaagttcttatcatgataaagatcaaaaccggcatggatctaaagtggtagatcatggaaagagagaaatgccatatgatgagagaaatagtcgaccaagaacatcttctgctagagaaaggacacctgcttctagacttcgtgacagggatgcagaaaattggtcttctgaaaggcttaaacagaaggatgaccagccttgtgatgtagcattggaaattcctacatcatcacactatgatcgcacacctaggaaagataagcatacttcaccaaaacaactgtctgaaaaatctccctcttcaggtgatcagaggttttcaggcaggcctagtggtgggcgcagtctagataataaaggagaaagaaacagccttacgaaatacagagatagagatggcgacctagcccaagaacgatcacatcatcaagatcgaacaccagctaaagttccattcagagagctaacaccatcaaattcatccataagtagaagttgtcatttttcaggcagttcaccaaatcatcctctgccaccttctgcaaggaatagcgactcttccttccttagtctgcatgatgatgaccgtaggcctcaaaatggagataggagattccatggtcatcaaaagaggaatgacatgaattcggttcgtggacatggacatgcctggaacaatccgccaaactgggcttctccagtttctaatggatttgcccccatccaacatggtggtcctccttgttttcatccgcctgtccatcagtttcgaggcccacctatgtttaaccttagacctcaaatgaagttaaaccagcctggagtttcatatcccatgcatgatgctgtcgataggttttcaacccacatgcacccatttgggtggcctaatcatctggatgaatcatgcccacctcatatgcaagtttggaatggaggcagtagtgtgtttccgggtgaaccctatatttacggtagacaagagtgggatcagaatagacctcatggtggcagcagagggtgggagctgactggtgatatatccaagggaccaaatgatgtgccggatgctgaacttctgatagctaagaaggatccttactctgcaataactgctgtttctgattctggtggacaacataatcttcaaccccaggctgagcaaaaggagattggacacttgactgctgaaaaatttgaaacaaaggatgattctaaaagttcaaaaagtttggaatctcttcaaggagtacaacatgtgacttctatgctgacaaagaatggtgcggtcttttgtaaagactatctagccagaatcaatgtttcacatgaccttgttgagtctgagttgtacaaaaggtgtatatccttgctgggagacttgggcgtaacaaaagcctctcatttggttaggaatggaattcaggataacgaaaatattgaaaaaatgtctacaaaatatggacacctcaaccctttcagttcacgttacctcaagagtgacagtactatctttcagagggctttggcccttcgtaacaaccagactcgaaagggtttaattattgtctccgcatctgtaaaaatggaagcgaacatggatgtactagaagatgaccatggcaaggaaatgcttgaacaagtggtgagcaatcctgctctgcaacgtcacactgaggtcatggaggaaggatcactgtcaaaacaggaacttggtgatggcatagaggggactattccagcaactataggatctgggggtctggatgcacctccagaaattccccaacctgaggtggtggtggcaacaacagcaatcacacagtttaacaaggacatggaggatgtgttacctccagcaattgaggatggtgcactacaagcaaccctcgaacatgctgttggcatactggaagttacacctggtgatggcttggggaatgttgcaccttcttcaggtgatgacatggagattatgccctctgctatgacagaacctcgactaggcaaagaaactgctcctgttgctagccctcctgacagtcaagagaagccatccatcatgcatgattctgagacagcagcgacaagggccgaggaagctcgagacatcgctcccctacgtgtttgtgaaggcaccatgggagatgggttgtgaggagtccaatggattttaaatacctaagatttttatccaaaccatgcatttgggtctcatgccaattgatatccatgtccaaaaaag

SEQ ID NO: 32512 - DNA, 2693 bp, Zea Mays
tggacttccggtcaaatttccagcactagtcccatggtgcgatcctagtctggcgcccacggggtagttagtagccccttctcgatctttgaggcaaagctacgactccaccaccgctggcatggcgttcgagaagatcaaggtctccaacccaatcgtcgagatggacggtgatgagatgaccagagtattctggcagtctatcaaggacaagcttatctttccatttctggacctggacatcaagtactatgacttggggatactgcaccgtgacgcaactgatgacaaggtcacagtggaggctgcagaggctactctcaagtacaatgtggccattaagtgtgcgaccattactccagatgaaactagggttaaggagttcaatttgaagcacatgtggaagagcccaaatggcacaattaggaacattataaatggtactgtgttcagagaaccaattatatgcaaaaacgttccaaggcttgttccaggatggacgaagcccatctgcattggaaggcatgccttcggtgatcagtaccgagctactgatgcagttctgaaggggcctgggaagctgaagctagtttttgagggaaaagaagaacagattgatctggaggtgttcaacttcactggtgctggaggagttgccttgtctatgtacaacactgatgagtcaattcgagcttttgccgcagcttctatgacaactgcatatgagaagaaatggccgctctaccttagcaccaaaaacacaatcctgaagaaatatgatggcaggtttaaggacattttccaggaggtctatgaagctgactggaaatccaaatttgaggctgctggaatatggtatgagcatcgtcttattgatgacatggttgcatatgcacttaagagtgaaggaggctacgtgtgggcttgcaagaattacgatggagatgtgcagagtgatttcttagcacaaggttttggctctttgggtttgatgacatcagtgttggtgtgccctgatgggaaaaccattgaagctgaagcagcccatggcacggttacccgccatttccgtgttcaccagaaaggaggtgaaaccagtacgaacagcattgcttcaatctttgcatggacaagggggcttgcacatagggcaaagctcgacgacaatgcgaggctcctcgacttcgctctcaaactcgaggccgcttgcgttggagctgtggagtctgggaagatgactaaagatctcgcacttcttgttcatggatcttccaaagtcacgagaagccattacctgaacacagaagagttcatcgatgcagtcgctactgagcttcgatcaagattgggagccaattgagctgacaggaaactctgcgttgcaacttgaatgcttcatcaccgatcggctctagtcatgcttccgtgattaagtgaatgtgcgccgccgcaatttcgagccaagctaattaaagatgatgggatcgcatcgcatgagcgttcaaaataaaggaatatgtagaacaatggtcgcagatgattaaattactcatattatgttcagtcattccctcagtattttctagcttgttttctcctctgaattgcgtgtccattctgtggttcacacaaatcaccgtcgggttgcctgcgctccgttttcgtagacttcggaggcagtagggtagctgaacaactcagacgaccaggtggttcatgacttcatgtcatgtttatcctgaccgaagaacccaaacccaagccagcaacggcgtctcttctgttctgttctctggacagcggacacgagtccgccaccaattccgcgcgaaagatagtcccgcccatgtgtccccgggacgccgctcccgtcgcaccacgtccccaggccacgcggcgcctcacgcgcgggggggtacccacgaggccacgacgcagctcagctgtatatatacacacacgacttgcttcccatctctgcactgcagcgcaagcgaaatcgccgaaggaaaggagaccccgagacgagcaaggcggcgagggagggcaaagaccacgtaccagcgcgcacgcacaatgtcgggagcacagggcgcgcacccggtcggccagacgacgccgacgacgtacgagtcggtgggcggcggggagaaccgcacgcgcacggacctgcggtcgcgggaggaccagggcgccatccagatcgagaaggtgcaggacaaggccgatgccggggcaaccggcaccggcacaggcgcgtgattttgtgcccttccgcagtgtacctgatcgtgtgtgtacgatagctttgtgtccgctgcttggctgctctgtatccgcgcgcgtggagtgtgtgaaacctttctgtaaaaaatgcacatgttagattgaaataaaacaaggaccgactggtctgaatcccacttggtactcccccaattgggaaaataataagggcttgttcgttttgctctcaatctatgtggattgggtgggattggatgtgtttcaatcccaaacaagtcaaaatctttcacaattttttccaattccatctaatccatatgggataggaataaccgaacaagccctaatatgtctgacgaggagcaatctgttgcgtctcgctgttttcagtttctacagtactttagtgtttatccagttcgaatgactgttggagcatcttcaac

SEQ ID NO: 32513 - DNA, 2888 bp, Zea Mays
acttccggtcaaatttccagcactagtcccatggtgcgatcctagtctggcgcccacggggtagttagtaggtaagaaacgtacccactactggcagaagggtccgtagcaagtagcaaccctccggttgtttaaattcgctcgcatactctcttcctgtgtctgacatctctcttcctccttccacaagcgccgccgcagccccttctcgatctttgaggcaaagctacgactccaccaccgctggcatggcgttcgagaagatcaaggtctccaacccaatcgtcgagatggacggtgatgagatgaccagagtattctggcagtctatcaaggacaagcttatctttccatttctggacctggacatcaagtactatgacttggggatactgcaccgtgacgcaactgatgacaaggtcacagtggaggctgcagaggctactctcaagtacaatgtggccattaagtgtgcgaccattactccagatgaaactagggttaaggagttcaatttgaagcacatgtggaagagcccaaatggcacaattaggaacattataaatggtactgtgttcagagaaccaattatatgcaaaaacgttccaaggcttgttccaggatggacgaagcccatctgcattggaaggcatgccttcggtgatcagtaccgagctactgatgcagttctgaaggggcctgggaagctgaagctagtttttgagggaaaagaagaacagattgatctggaggtgttcaacttcactggtgctggaggagttgccttgtctatgtacaacactgatgagtcaattcgagcttttgccgcagcttctatgacaactgcatatgagaagaaatggccgctctaccttagcaccaaaaacacaatcctgaagaaatatgatggtttaaggacattttccaggaggtctatgaagctgactggaaatccaaatttgaggctgctggaatatggtatgagcatcgtcttattgatgacatggttgcatatgcacttaagagtgaaggaggctacgtgtgggcttgcaagaattacgatggagatgtgcagagtgatttcttagcacaaggttttggctctttgggtttgatgacatcagtgttggtgtgccctgatgggaaaaccattgaagctgaagcagcccatggcacggttacccgccatttccgtgttcaccagaaaggaggtgaaaccagtacgaacagcattgcttcaatctttgcatggacaagggggcttgcacatagggcaaagctcgacgacaatgcgaggctcctcgacttcgctctcaaactcgaggccgcttgcgttggagctgtggagtctgggaagatgactaaagatctcgcacttcttgttcatggatcttccaaagtcacgagaagccattacctgaacacagaagagttcatcgatgcagtcgctactgagcttcgatcaagattgggagccaattgagctgacaggaaactctgcgttgcaacttgaatgcttcatcaccgatcggctctagtcatgcttccgtgattaagtgaatgtgcgccgccgcaatttcgagccaagctaattaaagatgatgggatcgcatcgcatgagcgttcaaaataaaggaatatgtagaacaatggtcgcagatgattaaattactcatattatgttcagtcattccctcagtattttctagcttgttttctcctctgaattgcgtgtccattctgtggttcacacaaatcaccgtcgggttgcctgcgctccgttttcgtagacttcggaggcagtagggtagctgaacaactcagacgaccaggtggttcatgacttcatgtcatgtttatcctgaccgaagaacccaaacccaagccagcaacggcgtctcttctgttctgttctctggacagcggacacgagtccgccaccaattccgcgcgaaagatagtcccgcccatgtgtccccgggacgccgctcccgtcgcaccacgtccccaggccacgcggcgcctcacgcgcgggggggtacccacgaggccacgacgcagctcagctgtatatatacacacacgacttgcttcccatctctgcactgcagcgcaagcgaaatcgccgaaggaaaggagaccccgagacgagcaaggcggcgagggagggcaaagaccacgtaccagcgcgcacgcacaatgtcgggagcacagggcgcgcacccggtcggccagacgacgccgacgacgtacgagtcggtgggcggcggggagaaccgcacgcgcacggacctgcggtcgcgggaggaccagggcgccatccagatcgagaaggtgcaggacaaggtcgacgatgccgcggggcgtggggtagaccacagcaccttcggcgccaacaaggagggccgcgacgacaaggccgatgccggggcaaccggcaccggcacaggcgcgtgattttgtgcccttccgcagtgtacctgatcgtgtgtgtacgatagctttgtgtccgctgcttggctgctctgtatccgcgcgcgtggagtgtgtgaaacctttctgtaaaaaatgcacatgttagattgaaataaaacaaggaccgactggtctgaatcccacttggtactcccccaattgggaaaataataagggcttgttcgttttgctctcaatctatgtggattgggtgggattggatgtgtttcaatcccaaacaagtcaaaatctttcacaattttttccaattccatctaatccatatgggataggaataaccgaacaagccctaatatgtctgacgaggagcaatctgttgcgtctcgctgttttcagtttctacagtactttagtgtttatccagttcgaatgactgttggagcatcttcaac

SEQ ID NO: 32514 - DNA, 2882 bp, Zea Mays
acttccggtcaaatttccagcactagtcccatggtgcgatcctagtctggcgcccacggggtagttagtaggtaagaaacgtacccactactggcagaagggtccgtagcaagtagcaaccctccggttgtttaaattcgctcgcatactctcttcctgtgtctgacatctctcttcctccttccacaagcgccgccgcagccccttctcgatctttgaggcaaagctacgactccaccaccgctggcatggcgttcgagaagatcaaggtctccaacccaatcgtcgagatggacggtgatgagatgaccagagtattctggcagtctatcaaggacaagcttatctttccatttctggacctggacatcaagtactatgacttggggatactgcaccgtgacgcaactgatgacaaggtcacagtggaggctgcagaggctactctcaagtacaatgtggccattaagtgtgcgaccattactccagggttaaggagttcaatttgaagcacatgtggaagagcccaaatggcacaattaggaacattataaatggtactgtgttcagagaaccaattatatgcaaaaacgttccaaggcttgttccaggatggacgaagcccatctgcattggaaggcatgccttcggtgatcagtaccgagctactgatgcagttctgaaggggcctgggaagctgaagctagtttttgagggaaaagaagaacagattgatctggaggtgttcaacttcactggtgctggaggagttgccttgtctatgtacaacactgatgagtcaattcgagcttttgccgcagcttctatgacaactgcatatgagaagaaatggccgctctaccttagcaccaaaaacacaatcctgaagaaatatgatggcaggtttaaggacattttccaggaggtctatgaagctgactggaaatccaaatttgaggctgctggaatatggtatgagcatcgtcttattgatgacatggttgcatatgcacttaagagtgaaggaggctacgtgtgggcttgcaagaattacgatggagatgtgcagagtgatttcttagcacaaggttttggctctttgggtttgatgacatcagtgttggtgtgccctgatgggaaaaccattgaagctgaagcagcccatggcacggttacccgccatttccgtgttcaccagaaaggaggtgaaaccagtacgaacagcattgcttcaatctttgcatggacaagggggcttgcacatagggcaaagctcgacgacaatgcgaggctcctcgacttcgctctcaaactcgaggccgcttgcgttggagctgtggagtctgggaagatgactaaagatctcgcacttcttgttcatggatcttccaaagtcacgagaagccattacctgaacacagaagagttcatcgatgcagtcgctactgagcttcgatcaagattgggagccaattgagctgacaggaaactctgcgttgcaacttgaatgcttcatcaccgatcggctctagtcatgcttccgtgattaagtgaatgtgcgccgccgcaatttcgagccaagctaattaaagatgatgggatcgcatcgcatgagcgttcaaaataaaggaatatgtagaacaatggtcgcagatgattaaattactcatattatgttcagtcattccctcagtattttctagcttgttttctcctctgaattgcgtgtccattctgtggttcacacaaatcaccgtcgggttgcctgcgctccgttttcgtagacttcggaggcagtagggtagctgaacaactcagacgaccaggtggttcatgacttcatgtcatgtttatcctgaccgaagaacccaaacccaagccagcaacggcgtctcttctgttctgttctctggacagcggacacgagtccgccaccaattccgcgcgaaagatagtcccgcccatgtgtccccgggacgccgctcccgtcgcaccacgtccccaggccacgcggcgcctcacgcgcgggggggtacccacgaggccacgacgcagctcagctgtatatatacacacacgacttgcttcccatctctgcactgcagcgcaagcgaaatcgccgaaggaaaggagaccccgagacgagcaaggcggcgagggagggcaaagaccacgtaccagcgcgcacgcacaatgtcgggagcacagggcgcgcacccggtcggccagacgacgccgacgacgtacgagtcggtgggcggcggggagaaccgcacgcgcacggacctgcggtcgcgggaggaccagggcgccatccagatcgagaaggtgcaggacaaggtcgacgatgccgcggggcgtggggtagaccacagcaccttcggcgccaacaaggagggccgcgacgacaaggccgatgccggggcaaccggcaccggcacaggcgcgtgattttgtgcccttccgcagtgtacctgatcgtgtgtgtacgatagctttgtgtccgctgcttggctgctctgtatccgcgcgcgtggagtgtgtgaaacctttctgtaaaaaatgcacatgttagattgaaataaaacaaggaccgactggtctgaatcccacttggtactcccccaattgggaaaataataagggcttgttcgttttgctctcaatctatgtggattgggtgggattggatgtgtttcaatcccaaacaagtcaaaatctttcacaattttttccaattccatctaatccatatgggataggaataaccgaacaagccctaatatgtctgacgaggagcaatctgttgcgtctcgctgttttcagtttctacagtactttagtgtttatccagttcgaatgactgttggagcatcttcaac

SEQ ID NO: 32515 - DNA, 2859 bp, Zea Mays
acttccggtcaaatttccagcactagtcccatggtgcgatcctagtctggcgcccacggggtagttagtaggtaagaaacgtacccactactggcagaagggtccgtagcaagtagcaaccctccggttgtttaaattcgctcgcatactctcttcctgtgtctgacatctctcttcctccttccacaagcgccgccgcagccccttctcgatctttgaggcaaagctacgactccaccaccgctggcatggcgttcgagaagatcaaggtctccaacccaatcgtcgagatggacggtgatgagatgaccagagtattctggcagtctatcaaggacaagtactatgacttggggatactgcaccgtgacgcaactgatgacaaggtcacagtggaggctgcagaggctactctcaagtacaatgtggccattaagtgtgcgaccattactccagatgaaactagggttaaggagttcaatttgaagcacatgtggaagagcccaaatggcacaattaggaacattataaatggtactgtgttcagagaaccaattatatgcaaaaacgttccaaggcttgttccaggatggacgaagcccatctgcattggaaggcatgccttcggtgatcagtaccgagctactgatgcagttctgaaggggcctgggaagctgaagctagtttttgagggaaaagaagaacagattgatctggaggtgttcaacttcactggtgctggaggagttgccttgtctatgtacaacactgatgagtcaattcgagcttttgccgcagcttctatgacaactgcatatgagaagaaatggccgctctaccttagcaccaaaaacacaatcctgaagaaatatgatggcaggtttaaggacattttccaggaggtctatgaagctgactggaaatccaaatttgaggctgctggaatatggtatgagcatcgtcttattgatgacatggttgcatatgcacttaagagtgaaggaggctacgtgtgggcttgcaagaattacgatggagatgtgcagagtgatttcttagcacaaggttttggctctttgggtttgatgacatcagtgttggtgtgccctgatgggaaaaccattgaagctgaagcagcccatggcacggttacccgccatttccgtgttcaccagaaaggaggtgaaaccagtacgaacagcattgcttcaatctttgcatggacaagggggcttgcacatagggcaaagctcgacgacaatgcgaggctcctcgacttcgctctcaaactcgaggccgcttgcgttggagctgtggagtctgggaagatgactaaagatctcgcacttcttgttcatggatcttccaaagtcacgagaagccattacctgaacacagaagagttcatcgatgcagtcgctactgagcttcgatcaagattgggagccaattgagctgacaggaaactctgcgttgcaacttgaatgcttcatcaccgatcggctctagtcatgcttccgtgattaagtgaatgtgcgccgccgcaatttcgagccaagctaattaaagatgatgggatcgcatcgcatgagcgttcaaaataaaggaatatgtagaacaatggtcgcagatgattaaattactcatattatgttcagtcattccctcagtattttctagcttgttttctcctctgaattgcgtgtccattctgtggttcacacaaatcaccgtcgggttgcctgcgctccgttttcgtagacttcggaggcagtagggtagctgaacaactcagacgaccaggtggttcatgacttcatgtcatgtttatcctgaccgaagaacccaaacccaagccagcaacggcgtctcttctgttctgttctctggacagcggacacgagtccgccaccaattccgcgcgaaagatagtcccgcccatgtgtccccgggacgccgctcccgtcgcaccacgtccccaggccacgcggcgcctcacgcgcgggggggtacccacgaggccacgacgcagctcagctgtatatatacacacacgacttgcttcccatctctgcactgcagcgcaagcgaaatcgccgaaggaaaggagaccccgagacgagcaaggcggcgagggagggcaaagaccacgtaccagcgcgcacgcacaatgtcgggagcacagggcgcgcacccggtcggccagacgacgccgacgacgtacgagtcggtgggcggcggggagaaccgcacgcgcacggacctgcggtcgcgggaggaccagggcgccatccagatcgagaaggtgcaggacaaggtcgacgatgccgcggggcgtggggtagaccacagcaccttcggcgccaacaaggagggccgcgacgacaaggccgatgccggggcaaccggcaccggcacaggcgcgtgattttgtgcccttccgcagtgtacctgatcgtgtgtgtacgatagctttgtgtccgctgcttggctgctctgtatccgcgcgcgtggagtgtgtgaaacctttctgtaaaaaatgcacatgttagattgaaataaaacaaggaccgactggtctgaatcccacttggtactcccccaattgggaaaataataagggcttgttcgttttgctctcaatctatgtggattgggtgggattggatgtgtttcaatcccaaacaagtcaaaatctttcacaattttttccaattccatctaatccatatgggataggaataaccgaacaagccctaatatgtctgacgaggagcaatctgttgcgtctcgctgttttcagtttctacagtactttagtgtttatccagttcgaatgactgttggagcatcttcaac

SEQ ID NO: 32516 - DNA, 2885 bp, Zea Mays
acttccggtcaaatttccagcactagtcccatggtgcgatcctagtctggcgcccacggggtagttagtaggtaagaaacgtacccactactggcagaagggtccgtagcaagtagcaaccctccggttgtttaaattcgctcgcatactctcttcctgtgtctgacatctctcttcctccttccacaagcgccgccgcagccccttctcgatctttgaggcaaagctacgactccaccaccgctggcatggcgttcgagaagatcaaggtctccaacccaatcgtcgagatggacggtgatgagatgaccagagtattctggcagtctatcaaggacaagcttatctttccatttctggacctggacatcaagtactatgacttggggatactgcaccgtgacgcaactgatgacaaggtcacagtggaggctgcagaggctactctcaagtacaatgtggccattaagtgtgcgaccattactccagatgaaactagggttaaggagttcaatttgaagcacatgtggaagagcccaaatggcacaattaggaacattataaatggtactgtgttcagagaaccaattatatgcaaaaacgttccaaggcttgttccaggatggacgaagcccatctgcattggaaggcatgccttcggtgatcagtaccgagctactgatgcagttctgaaggggcctgggaagctgaagctagtttttgagggaaaagaagaacagattgatctggaggtgttcaacttcactggtgctggaggagttgccttgtctatgtacaacactgatgagtcaattcgagcttttgccgcagcttctatgacaactgcatatgagaagaaatggccgctctaccttagcaccaaaaacacaatcctgaagaaatatgatggcaggacattttccaggaggtctatgaagctgactggaaatccaaatttgaggctgctggaatatggtatgagcatcgtcttattgatgacatggttgcatatgcacttaagagtgaaggaggctacgtgtgggcttgcaagaattacgatggagatgtgcagagtgatttcttagcacaaggttttggctctttgggtttgatgacatcagtgttggtgtgccctgatgggaaaaccattgaagctgaagcagcccatggcacggttacccgccatttccgtgttcaccagaaaggaggtgaaaccagtacgaacagcattgcttcaatctttgcatggacaagggggcttgcacatagggcaaagctcgacgacaatgcgaggctcctcgacttcgctctcaaactcgaggccgcttgcgttggagctgtggagtctgggaagatgactaaagatctcgcacttcttgttcatggatcttccaaagtcacgagaagccattacctgaacacagaagagttcatcgatgcagtcgctactgagcttcgatcaagattgggagccaattgagctgacaggaaactctgcgttgcaacttgaatgcttcatcaccgatcggctctagtcatgcttccgtgattaagtgaatgtgcgccgccgcaatttcgagccaagctaattaaagatgatgggatcgcatcgcatgagcgttcaaaataaaggaatatgtagaacaatggtcgcagatgattaaattactcatattatgttcagtcattccctcagtattttctagcttgttttctcctctgaattgcgtgtccattctgtggttcacacaaatcaccgtcgggttgcctgcgctccgttttcgtagacttcggaggcagtagggtagctgaacaactcagacgaccaggtggttcatgacttcatgtcatgtttatcctgaccgaagaacccaaacccaagccagcaacggcgtctcttctgttctgttctctggacagcggacacgagtccgccaccaattccgcgcgaaagatagtcccgcccatgtgtccccgggacgccgctcccgtcgcaccacgtccccaggccacgcggcgcctcacgcgcgggggggtacccacgaggccacgacgcagctcagctgtatatatacacacacgacttgcttcccatctctgcactgcagcgcaagcgaaatcgccgaaggaaaggagaccccgagacgagcaaggcggcgagggagggcaaagaccacgtaccagcgcgcacgcacaatgtcgggagcacagggcgcgcacccggtcggccagacgacgccgacgacgtacgagtcggtgggcggcggggagaaccgcacgcgcacggacctgcggtcgcgggaggaccagggcgccatccagatcgagaaggtgcaggacaaggtcgacgatgccgcggggcgtggggtagaccacagcaccttcggcgccaacaaggagggccgcgacgacaaggccgatgccggggcaaccggcaccggcacaggcgcgtgattttgtgcccttccgcagtgtacctgatcgtgtgtgtacgatagctttgtgtccgctgcttggctgctctgtatccgcgcgcgtggagtgtgtgaaacctttctgtaaaaaatgcacatgttagattgaaataaaacaaggaccgactggtctgaatcccacttggtactcccccaattgggaaaataataagggcttgttcgttttgctctcaatctatgtggattgggtgggattggatgtgtttcaatcccaaacaagtcaaaatctttcacaattttttccaattccatctaatccatatgggataggaataaccgaacaagccctaatatgtctgacgaggagcaatctgttgcgtctcgctgttttcagtttctacagtactttagtgtttatccagttcgaatgactgttggagcatcttcaac

SEQ ID NO: 32517 - DNA, 2543 bp, Zea Mays
attcgaactgaagaacttgggtgatgagatgaccagagtattctggcagtctatcaaggacaagcttatctttccatttctggacctggacatcaagtactatgacttggggatactgcaccgtgacgcaactgatgacaaggtcacagtggaggctgcagaggctactctcaagtacaatgtggccattaagtgtgcgaccattactccagatgaaactagggttaaggagttcaatttgaagcacatgtggaagagcccaaatggcacaattaggaacattataaatggtactgtgttcagagaaccaattatatgcaaaaacgttccaaggcttgttccaggatggacgaagcccatctgcattggaaggcatgccttcggtgatcagtaccgagctactgatgcagttctgaaggggcctgggaagctgaagctagtttttgagggaaaagaagaacagattgatctggaggtgttcaacttcactggtgctggaggagttgccttgtctatgtacaacactgatgagtcaattcgagcttttgccgcagcttctatgacaactgcatatgagaagaaatggccgctctaccttagcaccaaaaacacaatcctgaagaaatatgatggcaggtttaaggacattttccaggaggtctatgaagctgactggaaatccaaatttgaggctgctggaatatggtatgagcatcgtcttattgatgacatggttgcatatgcacttaagagtgaaggaggctacgtgtgggcttgcaagaattacgatggagatgtgcagagtgatttcttagcacaaggttttggctctttgggtttgatgacatcagtgttggtgtgccctgatgggaaaaccattgaagctgaagcagcccatggcacggttacccgccatttccgtgttcaccagaaaggaggtgaaaccagtacgaacagcattgcttcaatctttgcatggacaagggggcttgcacatagggcaaagctcgacgacaatgcgaggctcctcgacttcgctctcaaactcgaggccgcttgcgttggagctgtggagtctgggaagatgactaaagatctcgcacttcttgttcatggatcttccaaagtcacgagaagccattacctgaacacagaagagttcatcgatgcagtcgctactgagcttcgatcaagattgggagccaattgagctgacaggaaactctgcgttgcaacttgaatgcttcatcaccgatcggctctagtcatgcttccgtgattaagtgaatgtgcgccgccgcaatttcgagccaagctaattaaagatgatgggatcgcatcgcatgagcgttcaaaataaaggaatatgtagaacaatggtcgcagatgattaaattactcatattatgttcagtcattccctcagtattttctagcttgttttctcctctgaattgcgtgtccattctgtggttcacacaaatcaccgtcgggttgcctgcgctccgttttcgtagacttcggaggcagtagggtagctgaacaactcagacgaccaggtggttcatgacttcatgtcatgtttatcctgaccgaagaacccaaacccaagccagcaacggcgtctcttctgttctgttctctggacagcggacacgagtccgccaccaattccgcgcgaaagatagtcccgcccatgtgtccccgggacgccgctcccgtcgcaccacgtccccaggccacgcggcgcctcacgcgcgggggggtacccacgaggccacgacgcagctcagctgtatatatacacacacgacttgcttcccatctctgcactgcagcgcaagcgaaatcgccgaaggaaaggagaccccgagacgagcaaggcggcgagggagggcaaagaccacgtaccagcgcgcacgcacaatgtcgggagcacagggcgcgcacccggtcggccagacgacgccgacgacgtacgagtcggtgggcggcggggagaaccgcacgcgcacggacctgcggtcgcgggaggaccagggcgccatccagatcgagaaggtgcaggacaaggccgatgccggggcaaccggcaccggcacaggcgcgtgattttgtgcccttccgcagtgtacctgatcgtgtgtgtacgatagctttgtgtccgctgcttggctgctctgtatccgcgcgcgtggagtgtgtgaaacctttctgtaaaaaatgcacatgttagattgaaataaaacaaggaccgactggtctgaatcccacttggtactcccccaattgggaaaataataagggcttgttcgttttgctctcaatctatgtggattgggtgggattggatgtgtttcaatcccaaacaagtcaaaatctttcacaattttttccaattccatctaatccatatgggataggaataaccgaacaagccctaatatgtctgacgaggagcaatctgttgcgtctcgctgttttcagtttctacagtactttagtgtttatccagttcgaatgactgttggagcatcttcaac

SEQ ID NO: 32518 - DNA, 5737 bp, Zea Mays
ctagtctgtcatatgtggacgctatgatgcatggacagtgggcttcttagggcctttatgggccaggaattcgtcgaagcctgaaggaaggaaaaaaaaaacctaaagatggtcgctgccaccaggtagtttccaggcttccacgtttcactccaccgcttgtttccagttaccaccactccacttctaggttccagccgtgccggcgccgccgcttgcgctactctgcgcgccctcgccgctgcttgcttgctcgcaacttagaaggtgacgccgcctgcccagtgcgagcacgcctccacttgcactgcgggctgcggccctgccgaatctggaaggtgtcgagaagaaatagatccttgcactccatgccgctatgatcagcgctggccgcagcaggcggcgggggcgggcaccggcgtccctgcccacgaccacgaccgctgcttcccgccggaccgagcactccatctcctgctgttattgtgactgcaagatatattccttaaacgacgccctcttcaatttggggtggaagtatgctagatatatgagagcatggttttctgtaggtgtttatctatctctcattgctttagtcagtatatccttgatgctattgtgggagtcaattggtgtgttttattttaggagtggattccttagtgcctggttacagaacctactgacttcaggtctcaacatatctattgtagacaccacaatcattataatgtcaacaatcctgtctattgtttttcatgagtttggacatgccattgcagctgcaaggtctttatgtcttaccttctcatttctatttttttctctcttacatgttgcgtgctttttgttcagttcacctggtactcaaaacatctgtaagcgaggaaaataggcggcaaatagtgggtttattatgagggaataaattactggattatataggcaaggatgttctagggttttagtttatagaaatgacaccaatcacagaggtccttgtgaccttgcctaccacaaaattgatatgtgtgtgtgcgcgcgcgcgtgtggtgtgtgtgtgtgtgtgggggggggggcacatgcacagcaataaggcccacagcctaaaccaattatctgtctaaaaactctcatgaattattttgtttcatattctgacacatcatttgctacttacacaacagtgagggactacagattgaatatgttgctatatttgtcgctgtactttttcctggggcatttgttgctctgaactatgacctactacaaaatatgcctctcttttccatgcttcggatttattgtgcagggatttggaataatgttatggtaagtcatgctgttatgcatttattatttccaaaagatagaaataagttcatttattgattgtgcctctttgtatcttcgtaatgcattgtcatatacttttgatatttgggtacttgatgctacctcatatagaagtagtttaatcattaaaaggaaaatgcataactatttgtttacttgcaataatgaaggcaacgagaagtaagaacaatatactctatgcagtctagcgtaagatgcaattggtctcactaaatatttgttcgaaataatgtgagcaaagttattgtagagaattagggaacacctcacacccaattagggggtggctttcatatatatgtagtcatgtacaacttggaatacaatatgtgttagactatacatacctctaatacctgcccacagtcacaactgtagggaactgaatgagactggacctgaagacattgaactactgtgtaagcagtctcttagtcataatgtacgtgaactgattagttgaggccacatggagtaccctaaagccaccttctcacgaacaaagtggatgtcaattgtcaatgtctatatgcttcgtacgacgatggtgaaccgaattggcagtcatatagactgtggtgacattgtcacaatagacaatggtcgccaaaccgagtgatagtctgaaattgaccatcgactatgttaaagctatcgtgagggaggctacacttgaggcttcgtcgggcaaacgggagcccttgcccccatcggttgcggcaagtccagagcagcaaccttcttcagcgatggaggcggaaaagaacgccgctgaggaactatcttttctaaagcacgcaactttgggaaaatattgtctgattgtggcgaagaagaaagatgaaggctctttggcgcgacctgttgactaggtgtaaattttgtacactaggccatgctgaagattcgttaggttgagttttgcttgaaggccttggaaaatattatgtctgattgtctgccacgcttcaattgtcgaccaatacatcatgcacggtgaagcttatattacagttgattaccatgatattgctgtgtgggtaatatcttagccgaaggtcatcttgagtgaatgttacaggcatatgaaccacttagatctgatataggacccctgaacacctatatgttggaccctcctttgaagttcttgtttttatctcttattgagtggcccgaagcttgatcttctcattattgggaatatgtgctttgctggtggaactaagttgttgacgtctgagctttgggctcttcccttctactgagctggctatgttctcgtatgtggcgtttttgtggaggttgattatataacattggatcatattgtgatgggtctggtagttgggggttgtaagcttcccactgttgtgactgatgttgcacaattgggcttgaggacgaagaatgtgagttctgcccttgatgctggatgtatgacacatcatagttagtcgagcattaagatgatgtatggcacacattcttcggctggccttcctgcttcacggttgccaattccttatgcttttggatggtgatgctacaatattttgttgtatgctctttattctccccgcaaaatacacaatactagtcaatggcgcgcgccagcgcttgcataggatttccctttttttactgggaaggtagagcggcacaacaacagtcgtcgcccacgcgtgcggctagatgtaccaacggccaagatttttcgcgcgacatggatagtgcgaatgtcgaggaagttgcatcggtttaataagaagaaatagctttcttgattgaccgttgttggagtacctgcctccaaaggtgtggccccccttctgtccctttgtgttgagccaccccagaaactactttgctggctttgctaaggtccgttcgaaggttggcttgttgttggagtttgcggaaactacttttctccatcaaactagggtgtagtctgaattgttcgggcttcccttgcatccttgttgaaaaccctcatgatctctctgtgtttctgttgttcttgtcaacgctgtcgaaagtcattgtgtgctctaatatattcatccatcttctgaaacagcttcttcaaggtttgcggaggctttcaggtgaagtattatgagcatgggtcaactttgagctccttgattgttgacttaatgacaattttaactagtactccttgtgcatgtactttgacttagacaaaccttcacatataactttgaagggattcatctacttcttgaaaacatggaacaatgcatgtgccatgactaggtttgtttgaaagccttggaaacttgcaatcgattgtttcttaagttgttcccatgtggttatcgatctggacaaagggatgagtactaggtttgagctatgccttttgttgacggagggatgagtaccaggtttgagctatgccttttgcggccataatatgatttggctaacattgttgtgtttctgccgaattatgcaatggttgcttcgtaactcatgaggaattgctttgatttcgactgcccatcattcagaggaagcatggacagtttatatgcagcttgccatggggctacctgcaaatcccttgagaacgaagatgcactatcatagatgaaattacatttttacctttccctatttcatagtcaccctttgcaattaagggagtacaataatgtcattttactgcgtagacgtgtcgcacacatcttctcttcgtagaagcttcttatgtctcctctccttcgaagtcctctttatcgacgacaaagctttgctttcaatgccttcggcttcatgcacctttggctcattcagatctaccgaagctttttcaaggagagcggtgatcttcctttggccttcattagctttctggacctgaaaaaccatctaaatattgatttcatcattttggaccttcgactagagacctccccaacaacaaccaaatagaaacaattgctggtttacaaatgccattaaaccctggttagagaagtgcaaatataattctaatgcagtcttagacatacttcacgcgagtgtgaaatgtaacgttatatacttgtatactgaccttgttacttaatcattgtgatgttttataatttttttgttatgatttcatgtttaatagctctgtacagcatgtgtgatgataacattgttacttcctgtgatgttatatcctctctatgtgagtggtgatggcctcatggtaagtctacttctagttctatgtgtttacattattttaattttggcaatcttcacaatctaaaagtctgtcagaacaggtcatggaagtccctgaaatatctcctatgtcagaatacttgtccactcatgatgttattctttctgtggatggtctgaaaataaccagaactgatgattggatcaagattctgaaccaaggtactacagcgaaatctagggatcctgaattccttgaaggctctcatagatatgttgccactagttctaccaagggttattgcgtgcccgattcatggatagatgcaagcaaaaatctctggcagataagagacaagctgccttgcccagatgaactgatagccttcgaaaaagttatctgtaacgtctcaaccattttgacagagaagactagcataggtagtgaccagaaggaagttgagggaaaatattgtttgattgcgaaagatgtagtaaagcttagaagatgtggaaacggatggcacatgactgaagatgatgaaagtagctgtgcatgttttgaggtctcctatgccaggccatactctttgagatgtttacaaaaaggaggaaatttgttatcatcacatactgcaaatagtaactttggacagagtccttgtgaaggatcttttgtttatgtgggtgatctgtcatcagcagcacgttcggttaggttatcccgctaccgacctcgatgggcacttctacttttcattgcagacatcccatatatcttggaaaatggtttaagtagcttgcttcatgcatctgcagcattggctgtaatcaattgcctaccggtgtattttctggatggtgaagcgattctggagactaccttaagctatgtagcttggtttaccccaagactgcaacgcagaattctaaaagtatgcagcgtggtgtggacgggtttattagtcattactttctcaagtatttgttattccacagtgctacattatggcgtatagcaaataacccatgtaattttgtcttgaacaaagagaagatcattttaatggaacatgccaactgtactctgtccattgtaaattataagttgttttgacttttatatatacataacttttgttaggct

SEQ ID NO: 32519 - DNA, 5709 bp, Zea Mays
ctagtctgtcatatgtggacgctatgatgcatggacagtgggcttcttagggcctttatgggccaggaattcgtcgaagcctgaaggaaggaaaaaaaaaacctaaagatggtcgctgccaccaggtagtttccaggcttccacgtttcactccaccgcttgtttccagttaccaccactccacttctaggttccagccgtgccggcgccgccgcttgcgctactctgcgcgccctcgccgctgcttgcttgctcgcaacttagaaggtgacgccgcctgcccagtgcgagcacgcctccacttgcactgcgggctgcggccctgccgaatctggaaggtgtcgagaagaaatagatccttgcactccatgccgctatgatcagcgctggccgcagcaggcggcgggggcgggcaccggcgtccctgcccacgaccacgaccgctgcttcccgccggaccgagcactccatctcctgctgttattgtgactgcaagatatattccttaaacgacgccctcttcaatttggggtggaagtatgctagatatatgagagcatggttttctgtaggtgtttatctatctctcattgctttagtcagtatatccttgatgctattgtgggagtcaattggtgtgttttattttaggagtggattccttagtgcctggttacagaacctactgacttcaggtctcaacatatctattgtagacaccacaatcattataatgtcaacaatcctgtctattgtttttcatgagtttggacatgccattgcagctgcaaggtctttatgtcttaccttctcatttctatttttttctctcttacatgttgcgtgctttttgttcagttcacctggtactcaaaacatctgtaagcgaggaaaataggcggcaaatagtgggtttattatgagggaataaattactggattatataggcaaggatgttctagggttttagtttatagaaatgacaccaatcacagaggtccttgtgaccttgcctaccacaaaattgatatgtgtgtgtgcgcgcgcgcgtgtggtgtgtgtgtgtgtgtgggggggggggcacatgcacagcaataaggcccacagcctaaaccaattatctgtctaaaaactctcatgaattattttgtttcatattctgacacatcatttgctacttacacaacagtgagggactacagattgaatatgttgctatatttgtcgctgtactttttcctggggcatttgttgctctgaactatgacctactacaaaatatgcctctcttttccatgcttcggatttattgtgcagggatttggaataatgttatggtaagtcatgctgttatgcatttattatttccaaaagatagaaataagttcatttattgattgtgcctctttgtatcttcgtaatgcattgtcatatacttttgatatttgggtacttgatgctacctcatatagaagtagtttaatcattaaaaggaaaatgcataactatttgtttacttgcaataatgaaggcaacgagaagtaagaacaatatactctatgcagtctagcgtaagatgcaattggtctcactaaatatttgttcgaaataatgtgagcaaagttattgtagagaattagggaacacctcacacccaattagggggtggctttcatatatatgtagtcatgtacaacttggaatacaatatgtgttagactatacatacctctaatacctgcccacagtcacaactgtagggaactgaatgagactggacctgaagacattgaactactgtgtaagcagtctcttagtcataatgtacgtgaactgattagttgaggccacatggagtaccctaaagccaccttctcacgaacaaagtggatgtcaattgtcaatgtctatatgcttcgtacgacgatggtgaaccgaattggcagtcatatagactgtggtgacattgtcacaatagacaatggtcgccaaaccgagtgatagtctgaaattgaccatcgactatgttaaagctatcgtgagggaggctacacttgaggcttcgtcgggcaaacgggagcccttgcccccatcggttgcggcaagtccagagcagcaaccttcttcagcgatggaggcggaaaagaacgccgctgaggaactatcttttctaaagcacgcaactttgggaaaatattgtctgattgtggcgaagaagaaagatgaaggctctttggcgcgacctgttgactaggtgtaaattttgtacactaggccatgctgaagattcgttaggttgagttttgcttgaaggccttggaaaatattatgtctgattgtctgccacgcttcaattgtcgaccaatacatcatgcacggtgaagcttatattacagttgattaccatgatattgctgtgtgggtaatatcttagccgaaggtcatcttgagtgaatgttacaggcatatgaaccacttagatctgatataggacccctgaacacctatatgttggaccctcctttgaagttcttgtttttatctcttattgagtggcccgaagcttgatcttctcattattgggaatatgtgctttgctggtggaactaagttgttgacgtctgagctttgggctcttcccttctactgagctggctatgttctcgtatgtggcgtttttgtggaggttgattatataacattggatcatattgtgatgggtctggtagttgggggttgtaagcttcccactgttgtgactgatgttgcacaattgggcttgaggacgaagaatgtgagttctgcccttgatgctggatgtatgacacatcatagttagtcgagcattaagatgatgtatggcacacattcttcggctggccttcctgcttcacggttgccaattccttatgcttttggatggtgatgctacaatattttgttgtatgctctttattctccccgcaaaatacacaatactagtcaatggcgcgcgccagcgcttgcataggatttccctttttttactgggaaggtagagcggcacaacaacagtcgtcgcccacgcgtgcggctagatgtaccaacggccaagatttttcgcgcgacatggatagtgcgaatgtcgaggaagttgcatcggtttaataagaagaaatagctttcttgattgaccgttgttggagtacctgcctccaaaggtgtggccccccttctgtccctttgtgttgagccaccccagaaactactttgctggctttgctaaggtccgttcgaaggttggcttgttgttggagtttgcggaaactacttttctccatcaaactagggtgtagtctgaattgttcgggcttcccttgcatccttgttgaaaaccctcatgatctctctgtgtttctgttgttcttgtcaacgctgtcgaaagtcattgtgtgctctaatatattcatccatcttctgaaacagcttcttcaaggtttgcggaggctttcaggtgaagtattatgagcatgggtcaactttgagctccttgattgttgacttaatgacaattttaactagtactccttgtgcatgtactttgacttagacaaaccttcacatataactttgaagggattcatctacttcttgaaaacatggaacaatgcatgtgccatgactaggtttgtttgaaagccttggaaacttgcaatcgattgtttcttaagttgttcccatgtggttatcgatctggacaaagggatgagtactaggtttgagctatgccttttgttgacggagggatgagtaccaggtttgagctatgccttttgcggccataatatgatttggctaacattgttgtgtttctgccgaattatgcaatggttgcttcgtaactcatgaggaattgctttgatttcgactgcccatcattcagaggaagcatggacagtttatatgcagcttgccatggggctacctgcaaatcccttgagaacgaagatgcactatcatagatgaaattacatttttacctttccctatttcatagtcaccctttgcaattaagggagtacaataatgtcattttactgcgtagacgtgtcgcacacatcttctcttcgtagaagcttcttatgtctcctctccttcgaagtcctctttatcgacgacaaagctttgctttcaatgccttcggcttcatgcacctttggctcattcagatctaccgaagctttttcaaggagagcggtgatcttcctttggccttcattagctttctggacctgaaaaaccatctaaatattgatttcatcattttggaccttcgactagagacctccccaacaacaaccaaatagaaacaattgctggtttacaaatgccattaaaccctggttagagaagtgcaaatataattctaatgcagtcttagacatacttcacgcgagtgtgaaatgtaacgttatatacttgtatactgaccttgttacttaatcattgtgatgttttataatttttttgttatgatttcatgtttaatagctctgtacagcatgtgtgatgataacattgttacttcctgtgatgttatatcctctctatgtgagtggtgatggcctcatggtcatggaagtccctgaaatatctcctatgtcagaatacttgtccactcatgatgttattctttctgtggatggtctgaaaataaccagaactgatgattggatcaagattctgaaccaaggtactacagcgaaatctagggatcctgaattccttgaaggctctcatagatatgttgccactagttctaccaagggttattgcgtgcccgattcatggatagatgcaagcaaaaatctctggcagataagagacaagctgccttgcccagatgaactgatagccttcgaaaaagttatctgtaacgtctcaaccattttgacagagaagactagcataggtagtgaccagaaggaagttgagggaaaatattgtttgattgcgaaagatgtagtaaagcttagaagatgtggaaacggatggcacatgactgaagatgatgaaagtagctgtgcatgttttgaggatgagcactgtttggtacctgttctgaacccaggcttttcatggattgaggtctcctatgccaggccatactctttgagatgtttacaaaaaggaggaaatttgttatcatcacatactgcaaatagtaactttggacagagtccttgtgaaggatcttttgtttatgtgggtgatctgtcatcagcagcacgttcggttaggttatcccgctaccgacctcgatgggcacttctacttttcattgcagacatcccatatatcttggaaaatggtttaagtagcttgcttcatgcatctgcagcattggctgtaatcaattgcctaccggtgtattttctggatggtgaagcgattctggagactaccttaagctatgtagcttggtttaccccaagactgcaacgcagaattctaaaagtatgcagcgtggtgtggacgggtttattagtcattactttctcaagtatttgttattccacagtgctacattatggcgtatagcaaataacccatgtaattttgtcttgaacaaagagaagatcattttaatggaacatgccaactgtactctgtccattgtaaattataagttgttttgacttttatatatacataacttttgttaggct

SEQ ID NO: 32520 - DNA, 5186 bp, Zea Mays
ctagtctgtcatatgtggacgctatgatgcatggacagtgggcttcttagggcctttatgggccaggaattcgtcgaagcctgaaggaaggaaaaaaaaaacctaaagatggtcgctgccaccaggtagtttccaggcttccacgtttcactccaccgcttgtttccagttaccaccactccacttctaggttccagccgtgccggcgccgccgcttgcgctactctgcgcgccctcgccgctgcttgcttgctcgcaacttagaaggtgacgccgcctgcccagtgcgagcacgcctccacttgcactgcgggctgcggccctgccgaatctggaaggtgtcgagaagaaatagatccttgcactccatgccgctatgatcagcgctggccgcagcaggcggcgggggcgggcaccggcgtccctgcccacgaccacgaccgctgcttcccgccggaccgagcactccatctcctgctgttattgtgactgcaagatatattccttaaacgacgccctcttcaatttggggtggaagtatgctagatatatgagagcatggttttctgtaggtgtttatctatctctcattgctttagtcagtatatccttgatgctattgtgggagtcaattggtgtgttttattttaggagtggattccttagtgcctggttacagaacctactgacttcaggtctcaacatatctattgtagacaccacaatcattataatgtcaacaatcctgtctattgtttttcatgagtttggacatgccattgcagctgcaagtgagggactacagattgaatatgttgctatatttgtcgctgtactttttcctggggcatttgttgctctgaactatgacctactacaaaatatgcctctcttttccatgcttcggatttattgtgcagggatttggaataatgttatggtaagtcatgctgttatgcatttattatttccaaaagatagaaataagttcatttattgattgtgcctctttgtatcttcgtaatgcattgtcatatacttttgatatttgggtacttgatgctacctcatatagaagtagtttaatcattaaaaggaaaatgcataactatttgtttacttgcaataatgaaggcaacgagaagtaagaacaatatactctatgcagtctagcgtaagatgcaattggtctcactaaatatttgttcgaaataatgtgagcaaagttattgtagagaattagggaacacctcacacccaattagggggtggctttcatatatatgtagtcatgtacaacttggaatacaatatgtgttagactatacatacctctaatacctgcccacagtcacaactgtagggaactgaatgagactggacctgaagacattgaactactgtgtaagcagtctcttagtcataatgtacgtgaactgattagttgaggccacatggagtaccctaaagccaccttctcacgaacaaagtggatgtcaattgtcaatgtctatatgcttcgtacgacgatggtgaaccgaattggcagtcatatagactgtggtgacattgtcacaatagacaatggtcgccaaaccgagtgatagtctgaaattgaccatcgactatgttaaagctatcgtgagggaggctacacttgaggcttcgtcgggcaaacgggagcccttgcccccatcggttgcggcaagtccagagcagcaaccttcttcagcgatggaggcggaaaagaacgccgctgaggaactatcttttctaaagcacgcaactttgggaaaatattgtctgattgtggcgaagaagaaagatgaaggctctttggcgcgacctgttgactaggtgtaaattttgtacactaggccatgctgaagattcgttaggttgagttttgcttgaaggccttggaaaatattatgtctgattgtctgccacgcttcaattgtcgaccaatacatcatgcacggtgaagcttatattacagttgattaccatgatattgctgtgtgggtaatatcttagccgaaggtcatcttgagtgaatgttacaggcatatgaaccacttagatctgatataggacccctgaacacctatatgttggaccctcctttgaagttcttgtttttatctcttattgagtggcccgaagcttgatcttctcattattgggaatatgtgctttgctggtggaactaagttgttgacgtctgagctttgggctcttcccttctactgagctggctatgttctcgtatgtggcgtttttgtggaggttgattatataacattggatcatattgtgatgggtctggtagttgggggttgtaagcttcccactgttgtgactgatgttgcacaattgggcttgaggacgaagaatgtgagttctgcccttgatgctggatgtatgacacatcatagttagtcgagcattaagatgatgtatggcacacattcttcggctggccttcctgcttcacggttgccaattccttatgcttttggatggtgatgctacaatattttgttgtatgctctttattctccccgcaaaatacacaatactagtcaatggcgcgcgccagcgcttgcataggatttccctttttttactgggaaggtagagcggcacaacaacagtcgtcgcccacgcgtgcggctagatgtaccaacggccaagatttttcgcgcgacatggatagtgcgaatgtcgaggaagttgcatcggtttaataagaagaaatagctttcttgattgaccgttgttggagtacctgcctccaaaggtgtggccccccttctgtccctttgtgttgagccaccccagaaactactttgctggctttgctaaggtccgttcgaaggttggcttgttgttggagtttgcggaaactacttttctccatcaaactagggtgtagtctgaattgttcgggcttcccttgcatccttgttgaaaaccctcatgatctctctgtgtttctgttgttcttgtcaacgctgtcgaaagtcattgtgtgctctaatatattcatccatcttctgaaacagcttcttcaaggtttgcggaggctttcaggtgaagtattatgagcatgggtcaactttgagctccttgattgttgacttaatgacaattttaactagtactccttgtgcatgtactttgacttagacaaaccttcacatataactttgaagggattcatctacttcttgaaaacatggaacaatgcatgtgccatgactaggtttgtttgaaagccttggaaacttgcaatcgattgtttcttaagttgttcccatgtggttatcgatctggacaaagggatgagtactaggtttgagctatgccttttgttgacggagggatgagtaccaggtttgagctatgccttttgcggccataatatgatttggctaacattgttgtgtttctgccgaattatgcaatggttgcttcgtaactcatgaggaattgctttgatttcgactgcccatcattcagaggaagcatggacagtttatatgcagcttgccatggggctacctgcaaatcccttgagaacgaagatgcactatcatagatgaaattacatttttacctttccctatttcatagtcaccctttgcaattaagggagtacaataatgtcattttactgcgtagacgtgtcgcacacatcttctcttcgtagaagcttcttatgtctcctctccttcgaagtcctctttatcgacgacaaagctttgctttcaatgccttcggcttcatgcacctttggctcattcagatctaccgaagctttttcaaggagagcggtgatcttcctttggccttcattagctttctggacctgaaaaaccatctaaatattgatttcatcattttggaccttcgactagagacctccccaacaacaaccaaatagaaacaattgctggtttacaaatgccattaaaccctggttagagaagtgcaaatataattctaatgcagtcttagacatacttcacgcgagtgtgaaatgtaacgttatatacttgtatactgaccttgttacttaatcattgtgatgttttataatttttttgttatgatttcatgtttaatagctctgtacagcatgtgtgatgataacattgttacttcctgtgatgttatatcctctctatgtgagtggtgatggcctcatggtaagtctacttctagttctatgtgtttacattattttaattttggcaatcttcacaatctaaaagtctgtcagaacaggtcatggaagtccctgaaatatctcctatgtcagaatacttgtccactcatgatgttattctttctgtggatggtctgaaaataaccagaactgatgattggatcaagattctgaaccaagagaagactagcataggtagtgaccagaaggaagttgagggaaaatattgtttgattgcgaaagatgtagtaaagcttagaagatgtggaaacggatggcacatgactgaagatgatgaaagtagctgtgcatgttttgaggatgagcactgtttggtacctgttctgaacccaggcttttcatggattgaggtctcctatgccaggccatactctttgagatgtttacaaaaaggaggaaatttgttatcatcacatactgcaaatagtaactttggacagagtccttgtgaaggatcttttgtttatgtgggtgatctgtcatcagcagcacgttcggttaggttatcccgctaccgacctcgatgggcacttctacttttcattgcagacatcccatatatcttggaaaatggtttaagtagcttgcttcatgcatctgcagcattggctgtaatcaattgcctaccggtgtattttctggatggtgaagcgattctggagactaccttaagctatgtagcttggtttaccccaagactgcaacgcagaattctaaaagtatgcagcgtggtgtggacgggtttattagtcattactttctcaagtatttgttattccacagtgctacattatggcgtatagcaaataacccatgtaattttgtcttgaacaaagagaagatcattttaatggaacatgccaactgtactctgtccattgtaaattataagttgttttgacttttatatatacataacttttgttaggct

SEQ ID NO: 32521 - DNA, 5356 bp, Zea Mays
ctagtctgtcatatgtggacgctatgatgcatggacagtgggcttcttagggcctttatgggccaggaattcgtcgaagcctgaaggaaggaaaaaaaaaacctaaagatggtcgctgccaccaggtagtttccaggcttccacgtttcactccaccgcttgtttccagttaccaccactccacttctaggttccagccgtgccggcgccgccgcttgcgctactctgcgcgccctcgccgctgcttgcttgctcgcaacttagaaggtgacgccgcctgcccagtgcgagcacgcctccacttgcactgcgggctgcggccctgccgaatctggaaggtgtcgagaagaaatagatccttgcactccatgccgctatgatcagcgctggccgcagcaggcggcgggggcgggcaccggcgtccctgcccacgaccacgaccgctgcttcccgccggaccgagcactccatctcctgctgttattgtgactgcaagatatattccttaaacgacgccctcttcaatttggggtggaagtatgctagatatatgagagcatggttttctgtaggtgtttatctatctctcattgctttagtcagtatatccttgatgctattgtgggagtcaattggtgtgttttattttaggagtggattccttagtgcctggttacagaacctactgacttcaggtctcaacatatctattgtagacaccacaatcattataatgtcaacaatcctgtctattgtttttcatgagtttggacatgccattgcagctgcaagtgagggactacagattgaatatgttgctatatttgtcgctgtactttttcctggggcatttgttgctctgaactatgacctactacaaaatatgcctctcttttccatgcttcggatttattgtgcagggatttggaataatgttatggtaagtcatgctgttatgcatttattatttccaaaagatagaaataagttcatttattgattgtgcctctttgtatcttcgtaatgcattgtcatatacttttgatatttgggtacttgatgctacctcatatagaagtagtttaatcattaaaaggaaaatgcataactatttgtttacttgcaataatgaaggcaacgagaagtaagaacaatatactctatgcagtctagcgtaagatgcaattggtctcactaaatatttgttcgaaataatgtgagcaaagttattgtagagaattagggaacacctcacacccaattagggggtggctttcatatatatgtagtcatgtacaacttggaatacaatatgtgttagactatacatacctctaatacctgcccacagtcacaactgtagggaactgaatgagactggacctgaagacattgaactactgtgtaagcagtctcttagtcataatgtacgtgaactgattagttgaggccacatggagtaccctaaagccaccttctcacgaacaaagtggatgtcaattgtcaatgtctatatgcttcgtacgacgatggtgaaccgaattggcagtcatatagactgtggtgacattgtcacaatagacaatggtcgccaaaccgagtgatagtctgaaattgaccatcgactatgttaaagctatcgtgagggaggctacacttgaggcttcgtcgggcaaacgggagcccttgcccccatcggttgcggcaagtccagagcagcaaccttcttcagcgatggaggcggaaaagaacgccgctgaggaactatcttttctaaagcacgcaactttgggaaaatattgtctgattgtggcgaagaagaaagatgaaggctctttggcgcgacctgttgactaggtgtaaattttgtacactaggccatgctgaagattcgttaggttgagttttgcttgaaggccttggaaaatattatgtctgattgtctgccacgcttcaattgtcgaccaatacatcatgcacggtgaagcttatattacagttgattaccatgatattgctgtgtgggtaatatcttagccgaaggtcatcttgagtgaatgttacaggcatatgaaccacttagatctgatataggacccctgaacacctatatgttggaccctcctttgaagttcttgtttttatctcttattgagtggcccgaagcttgatcttctcattattgggaatatgtgctttgctggtggaactaagttgttgacgtctgagctttgggctcttcccttctactgagctggctatgttctcgtatgtggcgtttttgtggaggttgattatataacattggatcatattgtgatgggtctggtagttgggggttgtaagcttcccactgttgtgactgatgttgcacaattgggcttgaggacgaagaatgtgagttctgcccttgatgctggatgtatgacacatcatagttagtcgagcattaagatgatgtatggcacacattcttcggctggccttcctgcttcacggttgccaattccttatgcttttggatggtgatgctacaatattttgttgtatgctctttattctccccgcaaaatacacaatactagtcaatggcgcgcgccagcgcttgcataggatttccctttttttactgggaaggtagagcggcacaacaacagtcgtcgcccacgcgtgcggctagatgtaccaacggccaagatttttcgcgcgacatggatagtgcgaatgtcgaggaagttgcatcggtttaataagaagaaatagctttcttgattgaccgttgttggagtacctgcctccaaaggtgtggccccccttctgtccctttgtgttgagccaccccagaaactactttgctggctttgctaaggtccgttcgaaggttggcttgttgttggagtttgcggaaactacttttctccatcaaactagggtgtagtctgaattgttcgggcttcccttgcatccttgttgaaaaccctcatgatctctctgtgtttctgttgttcttgtcaacgctgtcgaaagtcattgtgtgctctaatatattcatccatcttctgaaacagcttcttcaaggtttgcggaggctttcaggtgaagtattatgagcatgggtcaactttgagctccttgattgttgacttaatgacaattttaactagtactccttgtgcatgtactttgacttagacaaaccttcacatataactttgaagggattcatctacttcttgaaaacatggaacaatgcatgtgccatgactaggtttgtttgaaagccttggaaacttgcaatcgattgtttcttaagttgttcccatgtggttatcgatctggacaaagggatgagtactaggtttgagctatgccttttgttgacggagggatgagtaccaggtttgagctatgccttttgcggccataatatgatttggctaacattgttgtgtttctgccgaattatgcaatggttgcttcgtaactcatgaggaattgctttgatttcgactgcccatcattcagaggaagcatggacagtttatatgcagcttgccatggggctacctgcaaatcccttgagaacgaagatgcactatcatagatgaaattacatttttacctttccctatttcatagtcaccctttgcaattaagggagtacaataatgtcattttactgcgtagacgtgtcgcacacatcttctcttcgtagaagcttcttatgtctcctctccttcgaagtcctctttatcgacgacaaagctttgctttcaatgccttcggcttcatgcacctttggctcattcagatctaccgaagctttttcaaggagagcggtgatcttcctttggccttcattagctttctggacctgaaaaaccatctaaatattgatttcatcattttggaccttcgactagagacctccccaacaacaaccaaatagaaacaattgctggtttacaaatgccattaaaccctggttagagaagtgcaaatataattctaatgcagtcttagacatacttcacgcgagtgtgaaatgtaacgttatatacttgtatactgaccttgttacttaatcattgtgatgttttataatttttttgttatgatttcatgtttaatagctctgtacagcatgtgtgatgataacattgttacttcctgtgatgttatatcctctctatgtgagtggtgatggcctcatggtaagtctacttctagttctatgtgtttacattattttaattttggcaatcttcacaatctaaaagtctgtcagaacaggtcatggaagtccctgaaatatctcctatgtcagaatacttgtccactcatgatgttattctttctgtggatggtctgaaaataaccagaactgatgattggatcaagattctgaaccaaggtactacagcgaaatctagggatcctgaattccttgaaggctctcatagatatgttgccactagttctaccaagggttattgcgtgcccgattcatggatagatgcaagcaaaaatctctggcagataagagacaagctgccttgcccagatgaactgatagccttcgaaaaagttatctgtaacgtctcaaccattttgacagagaagactagcataggtagtgaccagaaggaagttgagggaaaatattgtttgattgcgaaagatgtagtaaagcttagaagatgtggaaacggatggcacatgactgaagatgatgaaagtagctgtgcatgttttgaggcttttcatggattgaggtctcctatgccaggccatactctttgagatgtttacaaaaaggaggaaatttgttatcatcacatactgcaaatagtaactttggacagagtccttgtgaaggatcttttgtttatgtgggtgatctgtcatcagcagcacgttcggttaggttatcccgctaccgacctcgatgggcacttctacttttcattgcagacatcccatatatcttggaaaatggtttaagtagcttgcttcatgcatctgcagcattggctgtaatcaattgcctaccggtgtattttctggatggtgaagcgattctggagactaccttaagctatgtagcttggtttaccccaagactgcaacgcagaattctaaaagtatgcagcgtggtgtggacgggtttattagtcattactttctcaagtatttgttattccacagtgctacattatggcgtatagcaaataacccatgtaattttgtcttgaacaaagagaagatcattttaatggaacatgccaactgtactctgtccattgtaaattataagttgttttgacttttatatatacataacttttgttaggct

SEQ ID NO: 32522 - DNA, 4979 bp, Zea Mays
ctagtctgtcatatgtggacgctatgatgcatggacagtgggcttcttagggcctttatgggccaggaattcgtcgaagcctgaaggaaggaaaaaaaaaacctaaagatggtcgctgccaccaggtagtttccaggcttccacgtttcactccaccgcttgtttccagttaccaccactccacttctaggttccagccgtgccggcgccgccgcttgcgctactctgcgcgccctcgccgctgcttgcttgctcgcaacttagaaggtgacgccgcctgcccagtgcgagcacgcctccacttgcactgcgggctgcggccctgccgaatctggaaggtgtcgagaagaaatagatccttgcactccatgccgctatgatcagcgctggccgcagcaggcggcgggggcgggcaccggcgtccctgcccacgaccacgaccgctgcttcccgccggaccgagcactccatctcctgctgttattgtgactgcaagatatattccttaaacgacgccctcttcaatttggggtggaagtatgctagatatatgagagcatggttttctgtaggtgtttatctatctctcattgctttagtcagtatatccttgatgctattgtgggagtcaattggtgtgttttattttaggagtggattccttagtgcctggttacagaacctactgacttcaggtctcaacatatctattgtagacaccacaatcattataatgtcaacaatcctgtctattgtttttcatgagtttggacatgccattgcagctgcaagtgagggactacagattgaatatgttgctatatttgtcgctgtactttttcctggggcatttgttgctctgaactatgacctactacaaaatatgcctctcttttccatgcttcggatttattgtgcagggatttggaataatgttatgtcacaactgtagggaactgaatgagactggacctgaagacattgaactactgtgtaagcagtctcttagtcataatgtacgtgaactgattagttgaggccacatggagtaccctaaagccaccttctcacgaacaaagtggatgtcaattgtcaatgtctatatgcttcgtacgacgatggtgaaccgaattggcagtcatatagactgtggtgacattgtcacaatagacaatggtcgccaaaccgagtgatagtctgaaattgaccatcgactatgttaaagctatcgtgagggaggctacacttgaggcttcgtcgggcaaacgggagcccttgcccccatcggttgcggcaagtccagagcagcaaccttcttcagcgatggaggcggaaaagaacgccgctgaggaactatcttttctaaagcacgcaactttgggaaaatattgtctgattgtggcgaagaagaaagatgaaggctctttggcgcgacctgttgactaggtgtaaattttgtacactaggccatgctgaagattcgttaggttgagttttgcttgaaggccttggaaaatattatgtctgattgtctgccacgcttcaattgtcgaccaatacatcatgcacggtgaagcttatattacagttgattaccatgatattgctgtgtgggtaatatcttagccgaaggtcatcttgagtgaatgttacaggcatatgaaccacttagatctgatataggacccctgaacacctatatgttggaccctcctttgaagttcttgtttttatctcttattgagtggcccgaagcttgatcttctcattattgggaatatgtgctttgctggtggaactaagttgttgacgtctgagctttgggctcttcccttctactgagctggctatgttctcgtatgtggcgtttttgtggaggttgattatataacattggatcatattgtgatgggtctggtagttgggggttgtaagcttcccactgttgtgactgatgttgcacaattgggcttgaggacgaagaatgtgagttctgcccttgatgctggatgtatgacacatcatagttagtcgagcattaagatgatgtatggcacacattcttcggctggccttcctgcttcacggttgccaattccttatgcttttggatggtgatgctacaatattttgttgtatgctctttattctccccgcaaaatacacaatactagtcaatggcgcgcgccagcgcttgcataggatttccctttttttactgggaaggtagagcggcacaacaacagtcgtcgcccacgcgtgcggctagatgtaccaacggccaagatttttcgcgcgacatggatagtgcgaatgtcgaggaagttgcatcggtttaataagaagaaatagctttcttgattgaccgttgttggagtacctgcctccaaaggtgtggccccccttctgtccctttgtgttgagccaccccagaaactactttgctggctttgctaaggtccgttcgaaggttggcttgttgttggagtttgcggaaactacttttctccatcaaactagggtgtagtctgaattgttcgggcttcccttgcatccttgttgaaaaccctcatgatctctctgtgtttctgttgttcttgtcaacgctgtcgaaagtcattgtgtgctctaatatattcatccatcttctgaaacagcttcttcaaggtttgcggaggctttcaggtgaagtattatgagcatgggtcaactttgagctccttgattgttgacttaatgacaattttaactagtactccttgtgcatgtactttgacttagacaaaccttcacatataactttgaagggattcatctacttcttgaaaacatggaacaatgcatgtgccatgactaggtttgtttgaaagccttggaaacttgcaatcgattgtttcttaagttgttcccatgtggttatcgatctggacaaagggatgagtactaggtttgagctatgccttttgttgacggagggatgagtaccaggtttgagctatgccttttgcggccataatatgatttggctaacattgttgtgtttctgccgaattatgcaatggttgcttcgtaactcatgaggaattgctttgatttcgactgcccatcattcagaggaagcatggacagtttatatgcagcttgccatggggctacctgcaaatcccttgagaacgaagatgcactatcatagatgaaattacatttttacctttccctatttcatagtcaccctttgcaattaagggagtacaataatgtcattttactgcgtagacgtgtcgcacacatcttctcttcgtagaagcttcttatgtctcctctccttcgaagtcctctttatcgacgacaaagctttgctttcaatgccttcggcttcatgcacctttggctcattcagatctaccgaagctttttcaaggagagcggtgatcttcctttggccttcattagctttctggacctgaaaaaccatctaaatattgatttcatcattttggaccttcgactagagacctccccaacaacaaccaaatagaaacaattgctggtttacaaatgccattaaaccctggttagagaagtgcaaatataattctaatgcagtcttagacatacttcacgcgagtgtgaaatgtaacgttatatacttgtatactgaccttgttacttaatcattgtgatgttttataatttttttgttatgatttcatgtttaatagctctgtacagcatgtgtgatgataacattgttacttcctgtgatgttatatcctctctatgtgagtggtgatggcctcatggtaagtctacttctagttctatgtgtttacattattttaattttggcaatcttcacaatctaaaagtctgtcagaacaggtcatggaagtccctgaaatatctcctatgtcagaatacttgtccactcatgatgttattctttctgtggatggtctgaaaataaccagaactgatgattggatcaagattctgaaccaaggtactacagcgaaatctagggatcctgaattccttgaaggctctcatagatatgttgccactagttctaccaagggttattgcgtgcccgattcatggatagatgcaagcaaaaatctctggcagataagagacaagctgccttgcccagatgaactgatagccttcgaaaaagttatctgtaacgtctcaaccattttgacagagaagactagcataggtagtgaccagaaggaagttgagggaaaatattgtttgattgcgaaagatgtagtaaagcttagaagatgtggaaacggatggcacatgactgaagatgatgaaagtagctgtgcatgttttgaggatgagcactgtttggtacctgttctgaacccaggcttttcatggattgaggtctcctatgccaggccatactctttgagatgtttacaaaaaggaggaaatttgttatcatcacatactgcaaatagtaactttggacagagtccttgtgaaggatcttttgtttatgtgggtgatctgtcatcagcagcacgttcggttaggttatcccgctaccgacctcgatgggcacttctacttttcattgcagacatcccatatatcttggaaaatggtttaagtagcttgcttcatgcatctgcagcattggctgtaatcaattgcctaccggtgtattttctggatggtgaagcgattctggagactaccttaagctatgtagcttggtttaccccaagactgcaacgcagaattctaaaagtatgcagcgtggtgtggacgggtttattagtcattactttctcaagtatttgttattccacagtgctacattatggcgtatagcaaataacccatgtaattttgtcttgaacaaagagaagatcattttaatggaacatgccaactgtactctgtccattgtaaattataagttgttttgacttttatatatacataacttttgttaggct

SEQ ID NO: 32523 - DNA, 5620 bp, Zea Mays
ctagtctgtcatatgtggacgctatgatgcatggacagtgggcttcttagggcctttatgggccaggaattcgtcgaagcctgaaggaaggaaaaaaaaaacctaaagatggtcgctgccaccaggtagtttccaggcttccacgtttcactccaccgcttgtttccagttaccaccactccacttctaggttccagccgtgccggcgccgccgcttgcgctactctgcgcgccctcgccgctgcttgcttgctcgcaacttagaaggtgacgccgcctgcccagtgcgagcacgcctccacttgcactgcgggctgcggccctgccgaatctggaaggtgtcgagaagaaatagatccttgcactccatgccgctatgatcagcgctggccgcagcaggcggcgggggcgggcaccggcgtccctgcccacgaccacgaccgctgcttcccgccggaccgagcactccatctcctgctgttattgtgactgcaagatatattccttaaacgacgccctcttcaatttggggtggaagtatgctagatatatgagagcatggttttctgtaggtgtttatctatctctcattgctttagtcagtatatccttgatgctattgtgggagtcaattggtgtgttttattttaggagtggattccttagtgcctggttacagaacctactgacttcaggtctcaacatatctattgtagacaccacaatcattataatgtcaacaatcctgtctattgtttttcatgagtttggacatgccattgcagctgcaaggtctttatgtcttaccttctcatttctatttttttctctcttacatgttgcgtgctttttgttcagttcacctggtactcaaaacatctgtaagcgaggaaaataggcggcaaatagtgggtttattatgagggaataaattactggattatataggcaaggatgttctagggttttagtttatagaaatgacaccaatcacagaggtccttgtgaccttgcctaccacaaaattgatatgtgtgtgtgcgcgcgcgcgtgtggtgtgtgtgtgtgtgtgggggggggggcacatgcacagcaataaggcccacagcctaaaccaattatctgtctaaaaactctcatgaattattttgtttcatattctgacacatcatttgctacttacacaacagtgagggactacagattgaatatgttgctatatttgtcgctgtactttttcctggggcatttgttgctctgaactatgacctactacaaaatatgcctctcttttccatgcttcggatttattgtgcagggatttggaataatgttatggtaagtcatgctgttatgcatttattatttccaaaagatagaaataagttcatttattgattgtgcctctttgtatcttcgtaatgcattgtcatatacttttgatatttgggtacttgatgctacctcatatagaagtagtttaatcattaaaaggaaaatgcataactatttgtttacttgcaataatgaaggcaacgagaagtaagaacaatatactctatgcagtctagcgtaagatgcaattggtctcactaaatatttgttcgaaataatgtgagcaaagttattgtagagaattagggaacacctcacacccaattagggggtggctttcatatatatgtagtcatgtacaacttggaatacaatatgtgttagactatacatacctctaatacctgcccacagtcacaactgtagggaactgaatgagactggacctgaagacattgaactactgtgtaagcagtctcttagtcataatgtacgtgaactgattagttgaggccacatggagtaccctaaagccaccttctcacgaacaaagtggatgtcaattgtcaatgtctatatgcttcgtacgacgatggtgaaccgaattggcagtcatatagactgtggtgacattgtcacaatagacaatggtcgccaaaccgagtgatagtctgaaattgaccatcgactatgttaaagctatcgtgagggaggctacacttgaggcttcgtcgggcaaacgggagcccttgcccccatcggttgcggcaagtccagagcagcaaccttcttcagcgatggaggcggaaaagaacgccgctgaggaactatcttttctaaagcacgcaactttgggaaaatattgtctgattgtggcgaagaagaaagatgaaggctctttggcgcgacctgttgactaggtgtaaattttgtacactaggccatgctgaagattcgttaggttgagttttgcttgaaggccttggaaaatattatgtctgattgtctgccacgcttcaattgtcgaccaatacatcatgcacggtgaagcttatattacagttgattaccatgatattgctgtgtgggtaatatcttagccgaaggtcatcttgagtgaatgttacaggcatatgaaccacttagatctgatataggacccctgaacacctatatgttggaccctcctttgaagttcttgtttttatctcttattgagtggcccgaagcttgatcttctcattattgggaatatgtgctttgctggtggaactaagttgttgacgtctgagctttgggctcttcccttctactgagctggctatgttctcgtatgtggcgtttttgtggaggttgattatataacattggatcatattgtgatgggtctggtagttgggggttgtaagcttcccactgttgtgactgatgttgcacaattgggcttgaggacgaagaatgtgagttctgcccttgatgctggatgtatgacacatcatagttagtcgagcattaagatgatgtatggcacacattcttcggctggccttcctgcttcacggttgccaattccttatgcttttggatggtgatgctacaatattttgttgtatgctctttattctccccgcaaaatacacaatactagtcaatggcgcgcgccagcgcttgcataggatttccctttttttactgggaaggtagagcggcacaacaacagtcgtcgcccacgcgtgcggctagatgtaccaacggccaagatttttcgcgcgacatggatagtgcgaatgtcgaggaagttgcatcggtttaataagaagaaatagctttcttgattgaccgttgttggagtacctgcctccaaaggtgtggccccccttctgtccctttgtgttgagccaccccagaaactactttgctggctttgctaaggtccgttcgaaggttggcttgttgttggagtttgcggaaactacttttctccatcaaactagggtgtagtctgaattgttcgggcttcccttgcatccttgttgaaaaccctcatgatctctctgtgtttctgttgttcttgtcaacgctgtcgaaagtcattgtgtgctctaatatattcatccatcttctgaaacagcttcttcaaggtttgcggaggctttcaggtgaagtattatgagcatgggtcaactttgagctccttgattgttgacttaatgacaattttaactagtactccttgtgcatgtactttgacttagacaaaccttcacatataactttgaagggattcatctacttcttgaaaacatggaacaatgcatgtgccatgactaggtttgtttgaaagccttggaaacttgcaatcgattgtttcttaagttgttcccatgtggttatcgatctggacaaagggatgagtactaggtttgagctatgccttttgttgacggagggatgagtaccaggtttgagctatgccttttgcggccataatatgatttggctaacattgttgtgtttctgccgaattatgcaatggttgcttcgtaactcatgaggaattgctttgatttcgactgcccatcattcagaggaagcatggacagtttatatgcagcttgccatggggctacctgcaaatcccttgagaacgaagatgcactatcatagatgaaattacatttttacctttccctatttcatagtcaccctttgcaattaagggagtacaataatgtcattttactgcgtagacgtgtcgcacacatcttctcttcgtagaagcttcttatgtctcctctccttcgaagtcctctttatcgacgacaaagctttgctttcaatgccttcggcttcatgcacctttggctcattcagatctaccgaagctttttcaaggagagcggtgatcttcctttggccttcattagctttctggacctgaaaaaccatctaaatattgatttcatcattttggaccttcgactagagacctccccaacaacaaccaaatagaaacaattgctggtttacaaatgccattaaaccctggttagagaagtgcaaatataattctaatgcagtcttagacatacttcacgcgagtgtgaaatgtaacgttatatacttgtatactgaccttgttacttaatcattgtgatgttttataatttttttgttatgatttcatgtttaatagctctgtacagcatgtgtgatgataacattgttacttcctgtgatgttatatcctctctatgtgagtggtgatggcctcatgaactgatgattggatcaagattctgaaccaaggtactacagcgaaatctagggatcctgaattccttgaaggctctcatagatatgttgccactagttctaccaagggttattgcgtgcccgattcatggatagatgcaagcaaaaatctctggcagataagagacaagctgccttgcccagatgaactgatagccttcgaaaaagttatctgtaacgtctcaaccattttgacagagaagactagcataggtagtgaccagaaggaagttgagggaaaatattgtttgattgcgaaagatgtagtaaagcttagaagatgtggaaacggatggcacatgactgaagatgatgaaagtagctgtgcatgttttgaggatgagcactgtttggtacctgttctgaacccaggcttttcatggattgaggtctcctatgccaggccatactctttgagatgtttacaaaaaggaggaaatttgttatcatcacatactgcaaatagtaactttggacagagtccttgtgaaggatcttttgtttatgtgggtgatctgtcatcagcagcacgttcggttaggttatcccgctaccgacctcgatgggcacttctacttttcattgcagacatcccatatatcttggaaaatggtttaagtagcttgcttcatgcatctgcagcattggctgtaatcaattgcctaccggtgtattttctggatggtgaagcgattctggagactaccttaagctatgtagcttggtttaccccaagactgcaacgcagaattctaaaagtatgcagcgtggtgtggacgggtttattagtcattactttctcaagtatttgttattccacagtgctacattatggcgtatagcaaataacccatgtaattttgtcttgaacaaagagaagatcattttaatggaacatgccaactgtactctgtccattgtaaattataagttgttttgacttttatatatacataacttttgttaggct

SEQ ID NO: 32524 - DNA, 2118 bp, Zea Mays
ctagtctgtcatatgtggacgctatgatgcatggacagtgggcttcttagggcctttatgggccaggaattcgtcgaagcctgaaggaaggaaaaaaaaaacctaaagatggtcgctgccaccaggtagtttccaggcttccacgtttcactccaccgcttgtttccagttaccaccactccacttctaggttccagccgtgccggcgccgccgcttgcgctactctgcgcgccctcgccgctgcttgcttgctcgcaacttagaaggtgacgccgcctgcccagtgcgagcacgcctccacttgcactgcgggctgcggccctgccgaatctggaaggtgtcgagaagaaatagatccttgcactccatgccgctatgatcagcgctggccgcagcaggcggcgggggcgggcaccggcgtccctgcccacgaccacgaccgctgcttcccgccggaccgagcactccatctcctgctgttattgtgactgcaagatatattccttaaacgacgccctcttcaatttggggtggaagtatgctagatatatgagagcatggttttctgtaggtgtttatctatctctcattgctttagtcagtatatccttgatgctattgtgggagtcaattggtgtgttttattttaggagtggattccttagtgcctggttacagaacctactgacttcaggtctcaacatatctattgtagacaccacaatcattataatgtcaacaatcctgtctattgtttttcatgagtttggacatgccattgcagctgcaagtgagggactacagattgaatatgttgctatatttgtcgctgtactttttcctggggcatttgttgctctgaactatgacctactacaaaatatgcctctcttttccatgcttcggatttattgtgcagggatttggaataatgttatgctctgtacagcatgtgtgatgataacattgttacttcctgtgatgttatatcctctctatgtgagtggtgatggcctcatggtcatggaagtccctgaaatatctcctatgtcagaatacttgtccactcatgatgttattctttctgtggatggtctgaaaataaccagaactgatgattggatcaagattctgaaccaaggtactacagcgaaatctagggatcctgaattccttgaaggctctcatagatatgttgccactagttctaccaagggttattgcgtgcccgattcatggatagatgcaagcaaaaatctctggcagataagagacaagctgccttgcccagatgaactgatagccttcgaaaaagttatctgtaacgtctcaaccattttgacagagaagactagcataggtagtgaccagaaggaagttgagggaaaatattgtttgattgcgaaagatgtagtaaagcttagaagatgtggaaacggatggcacatgactgaagatgatgaaagtagctgtgcatgttttgaggatgagcactgtttggtacctgttctgaacccaggcttttcatggattgaggtctcctatgccaggccatactctttgagatgtttacaaaaaggaggaaatttgttatcatcacatactgcaaatagtaactttggacagagtccttgtgaaggatcttttgtttatgtgggtgatctgtcatcagcagcacgttcggttaggttatcccgctaccgacctcgatgggcacttctacttttcattgcagacatcccatatatcttggaaaatggtttaagtagcttgcttcatgcatctgcagcattggctgtaatcaattgcctaccggtgtattttctggatggtgaagcgattctggagactaccttaagctatgtagcttggtttaccccaagactgcaacgcagaattctaaaagtatgcagcgtggtgtggacgggtttattagtcattactttctcaagtatttgttattccacagtgctacattatggcgtatagcaaataacccatgtaattttgtcttgaacaaagagaagatcattttaatggaacatgccaactgtactctgtccattgtaaattataagttgttttgacttttatatatacataacttttgttaggct

SEQ ID NO: 32525 - DNA, 5227 bp, Zea Mays
ctagtctgtcatatgtggacgctatgatgcatggacagtgggcttcttagggcctttatgggccaggaattcgtcgaagcctgaaggaaggaaaaaaaaaacctaaagatggtcgctgccaccaggtagtttccaggcttccacgtttcactccaccgcttgtttccagttaccaccactccacttctaggttccagccgtgccggcgccgccgcttgcgctactctgcgcgccctcgccgctgcttgcttgctcgcaacttagaaggtgacgccgcctgcccagtgcgagcacgcctccacttgcactgcgggctgcggccctgccgaatctggaaggtgtcgagaagaaatagatccttgcactccatgccgctatgatcagcgctggccgcagcaggcggcgggggcgggcaccggcgtccctgcccacgaccacgaccgctgcttcccgccggaccgagcactccatctcctgctgttattgtgactgcaagatatattccttaaacgacgccctcttcaatttggggtggaagtatgctagatatatgagagcatggttttctgtaggtgtttatctatctctcattgctttagtcagtatatccttgatgctattgtgggagtcaattggtgtgttttattttaggagtggattccttagtgcctggttacagaacctactggtctcaacatatctattgtagacaccacaatcattataatgtcaacaatcctgtctattgtttttcatgagtttggacatgccattgcagctgcaaggtctttatgtcttaccttctcatttctatttttttctctcttacatgttgcgtgctttttgttcagttcacctggtactcaaaacatctgtaagcgaggaaaataggcggcaaatagtgggtttattatgagggaataaattactggattatataggcaaggatgttctagggttttagtttatagaaatgacaccaatcacagaggtccttgtgaccttgcctaccacaaaattgatatgtgtgtgtgcgcgcgcgcgtgtggtgtgtgtgtgtgtgtgggggggggggcacatgcacagcaataaggcccacagcctaaaccaattatctgtctaaaaactctcatgaattattttgtttcatattctgacacatcatttgctacttacacaacagtgagggactacagattgaatatgttgctatatttgtcgctgtactttttcctggggcatttgttgctctgaactatgacctactacaaaatatgcctctcttttccatgcttcggatttattgtgcagggatttggaataatgttatgtcacaactgtagggaactgaatgagactggacctgaagacattgaactactgtgtaagcagtctcttagtcataatgtacgtgaactgattagttgaggccacatggagtaccctaaagccaccttctcacgaacaaagtggatgtcaattgtcaatgtctatatgcttcgtacgacgatggtgaaccgaattggcagtcatatagactgtggtgacattgtcacaatagacaatggtcgccaaaccgagtgatagtctgaaattgaccatcgactatgttaaagctatcgtgagggaggctacacttgaggcttcgtcgggcaaacgggagcccttgcccccatcggttgcggcaagtccagagcagcaaccttcttcagcgatggaggcggaaaagaacgccgctgaggaactatcttttctaaagcacgcaactttgggaaaatattgtctgattgtggcgaagaagaaagatgaaggctctttggcgcgacctgttgactaggtgtaaattttgtacactaggccatgctgaagattcgttaggttgagttttgcttgaaggccttggaaaatattatgtctgattgtctgccacgcttcaattgtcgaccaatacatcatgcacggtgaagcttatattacagttgattaccatgatattgctgtgtgggtaatatcttagccgaaggtcatcttgagtgaatgttacaggcatatgaaccacttagatctgatataggacccctgaacacctatatgttggaccctcctttgaagttcttgtttttatctcttattgagtggcccgaagcttgatcttctcattattgggaatatgtgctttgctggtggaactaagttgttgacgtctgagctttgggctcttcccttctactgagctggctatgttctcgtatgtggcgtttttgtggaggttgattatataacattggatcatattgtgatgggtctggtagttgggggttgtaagcttcccactgttgtgactgatgttgcacaattgggcttgaggacgaagaatgtgagttctgcccttgatgctggatgtatgacacatcatagttagtcgagcattaagatgatgtatggcacacattcttcggctggccttcctgcttcacggttgccaattccttatgcttttggatggtgatgctacaatattttgttgtatgctctttattctccccgcaaaatacacaatactagtcaatggcgcgcgccagcgcttgcataggatttccctttttttactgggaaggtagagcggcacaacaacagtcgtcgcccacgcgtgcggctagatgtaccaacggccaagatttttcgcgcgacatggatagtgcgaatgtcgaggaagttgcatcggtttaataagaagaaatagctttcttgattgaccgttgttggagtacctgcctccaaaggtgtggccccccttctgtccctttgtgttgagccaccccagaaactactttgctggctttgctaaggtccgttcgaaggttggcttgttgttggagtttgcggaaactacttttctccatcaaactagggtgtagtctgaattgttcgggcttcccttgcatccttgttgaaaaccctcatgatctctctgtgtttctgttgttcttgtcaacgctgtcgaaagtcattgtgtgctctaatatattcatccatcttctgaaacagcttcttcaaggtttgcggaggctttcaggtgaagtattatgagcatgggtcaactttgagctccttgattgttgacttaatgacaattttaactagtactccttgtgcatgtactttgacttagacaaaccttcacatataactttgaagggattcatctacttcttgaaaacatggaacaatgcatgtgccatgactaggtttgtttgaaagccttggaaacttgcaatcgattgtttcttaagttgttcccatgtggttatcgatctggacaaagggatgagtactaggtttgagctatgccttttgttgacggagggatgagtaccaggtttgagctatgccttttgcggccataatatgatttggctaacattgttgtgtttctgccgaattatgcaatggttgcttcgtaactcatgaggaattgctttgatttcgactgcccatcattcagaggaagcatggacagtttatatgcagcttgccatggggctacctgcaaatcccttgagaacgaagatgcactatcatagatgaaattacatttttacctttccctatttcatagtcaccctttgcaattaagggagtacaataatgtcattttactgcgtagacgtgtcgcacacatcttctcttcgtagaagcttcttatgtctcctctccttcgaagtcctctttatcgacgacaaagctttgctttcaatgccttcggcttcatgcacctttggctcattcagatctaccgaagctttttcaaggagagcggtgatcttcctttggccttcattagctttctggacctgaaaaaccatctaaatattgatttcatcattttggaccttcgactagagacctccccaacaacaaccaaatagaaacaattgctggtttacaaatgccattaaaccctggttagagaagtgcaaatataattctaatgcagtcttagacatacttcacgcgagtgtgaaatgtaacgttatatacttgtatactgaccttgttacttaatcattgtgatgttttataatttttttgttatgatttcatgtttaatagctctgtacagcatgtgtgatgataacattgttacttcctgtgatgttatatcctctctatgtgagtggtgatggcctcatggtcatggaagtccctgaaatatctcctatgtcagaatacttgtccactcatgatgttattctttctgtggatggtctgaaaataaccagaactgatgattggatcaagattctgaaccaagttctaccaagggttattgcgtgcccgattcatggatagatgcaagcaaaaatctctggcagataagagacaagctgccttgcccagatgaactgatagccttcgaaaaagttatctgtaacgtctcaaccattttgacagagaagactagcataggtagtgaccagaaggaagttgagggaaaatattgtttgattgcgaaagatgtagtaaagcttagaagatgtggaaacggatggcacatgactgaagatgatgaaagtagctgtgcatgttttgaggatgagcactgtttggtacctgttctgaacccaggcttttcatggattgaggtctcctatgccaggccatactctttgagatgtttacaaaaaggaggaaatttgttatcatcacatactgcaaatagtaactttggacagagtccttgtgaaggatcttttgtttatgtgggtgatctgtcatcagcagcacgttcggttaggttatcccgctaccgacctcgatgggcacttctacttttcattgcagacatcccatatatcttggaaaatggtttaagtagcttgcttcatgcatctgcagcattggctgtaatcaattgcctaccggtgtattttctggatggtgaagcgattctggagactaccttaagctatgtagcttggtttaccccaagactgcaacgcagaattctaaaagtatgcagcgtggtgtggacgggtttattagtcattactttctcaagtatttgttattccacagtgctacattatggcgtatagcaaataacccatgtaattttgtcttgaacaaagagaagatcattttaatggaacatgccaactgtactctgtccattgtaaattataagttgttttgacttttatatatacataacttttgttaggct

SEQ ID NO: 32526 - DNA, 2516 bp, Zea Mays
ctagtctgtcatatgtggacgctatgatgcatggacagtgggcttcttagggcctttatgggccaggaattcgtcgaagcctgaaggaaggaaaaaaaaaacctaaagatggtcgctgccaccaggtagtttccaggcttccacgtttcactccaccgcttgtttccagttaccaccactccacttctaggttccagccgtgccggcgccgccgcttgcgctactctgcgcgccctcgccgctgcttgcttgctcgcaacttagaaggtgacgccgcctgcccagtgcgagcacgcctccacttgcactgcgggctgcggccctgccgaatctggaaggtgtcgagaagaaatagatccttgcactccatgccgctatgatcagcgctggccgcagcaggcggcgggggcgggcaccggcgtccctgcccacgaccacgaccgctgcttcccgccggaccgagcactccatctcctgctgttattgtgactgcaagatatattccttaaacgacgccctcttcaatttggggtggaagtatgctagatatatgagagcatggttttctgtaggtgtttatctatctctcattgctttagtcagtatatccttgatgctattgtgggagtcaattggtgtgttttattttaggagtggattccttagtgcctggttacagaacctactgacttcaggtctcaacatatctattgtagacaccacaatcattataatgtcaacaatcctgtctattgtttttcatgagtttggacatgccattgcagctgcaaggtctttatgtcttaccttctcatttctatttttttctctcttacatgttgcgtgctttttgttcagttcacctggtactcaaaacatctgtaagcgaggaaaataggcggcaaatagtgggtttattatgagggaataaattactggattatataggcaaggatgttctagggttttagtttatagaaatgacaccaatcacagaggtccttgtgaccttgcctaccacaaaattgatatgtgtgtgtgcgcgcgcgcgtgtggtgtgtgtgtgtgtgtgggggggggggcacatgcacagcaataaggcccacagcctaaaccaattatctgtctaaaaactctcatgaattattttgtttcatattctgacacatcatttgctacttacacaacagtgagggactacagattgaatatgttgctatatttgtcgctgtactttttcctggggcatttgttgctctgaactatgacctactacaaaatatgcctctcttttccatgcttcggatttattgtgcagggatttggaataatgttatgctctgtacagcatgtgtgatgataacattgttacttcctgtgatgttatatcctctctatgtgagtggtgatggcctcatggtcatggaagtccctgaaatatctcctatgtcagaatacttgtccactcatgatgttattctttctgtggatggtctgaaaataaccagaactgatgattggatcaagattctgaaccaaggtactacagcgaaatctagggatcctgaattccttgaaggctctcatagatatgttgccactagttctaccaagggttattgcgtgcccgattcatggatagatgcaagcaaaaatctctggcagataagagacaagctgccttgcccagatgaactgatagccttcgaaaaagttatctgtaacgtctcaaccattttgacagagaagactagcataggtagtgaccagaaggaagttgagggaaaatattgtttgattgcgaaagatgtagtaaagcttagaagatgtggaaacggatggcacatgactgaagatgatgaaagtagctgtgcatgttttgaggatgagcactgtttggtacctgttctgaacccaggcttttcatggattgaggtctcctatgccaggccatactctttgagatgtttacaaaaaggaggaaatttgttatcatcacatactgcaaatagtaactttggacagagtccttgtgaaggatcttttgtttatgtgggtgatctgtcatcagcagcacgttcggttaggttatcccgctaccgacctcgatgggcacttctacttttcattgcagacatcccatatatcttggaaaatggtttaagtagcttgcttcatgcatctgcagcattggctgtaatcaattgcctaccggtgtattttctggatggtgaagcgattctggagactaccttaagctatgtagcttggtttaccccaagactgcaacgcagaattctaaaagtatgcagcgtggtgtggacgggtttattagtcattactttctcaagtatttgttattccacagtgctacattatggcgtatagcaaataacccatgtaattttgtcttgaacaaagagaagatcattttaatggaacatgccaactgtactctgtccattgtaaattataagttgttttgacttttatatatacataacttttgttaggct

SEQ ID NO: 32527 - DNA, 2506 bp, Zea Mays
ctagtctgtcatatgtggacgctatgatgcatggacagtgggcttcttagggcctttatgggccaggaattcgtcgaagcctgaaggaaggaaaaaaaaaacctaaagatggtcgctgccaccaggtagtttccaggcttccacgtttcactccaccgcttgtttccagttaccaccactccacttctaggttccagccgtgccggcgccgccgcttgcgctactctgcgcgccctcgccgctgcttgcttgctcgcaacttagaaggtgacgccgcctgcccagtgcgagcacgcctccacttgcactgcgggctgcggccctgccgaatctggaaggtgtcgagaagaaatagatccttgcactccatgccgctatgatcagcgctggccgcagcaggcggcgggggcgggcaccggcgtccctgcccacgaccacgaccgctgcttcccgccggaccgagcactccatctcctgctgttattgtgactgcaagatatattccttaaacgacgccctcttcaatttggggtggaagtatgctagatatatgagagcatggttttctgtaggtgtttatctatctctcattgctttagtcagtatatccttgatgctattgtgggagtcaattggtgtgttttattttaggagtggattccttagtgcctggttacagaacctactgacttcaggtctcaacatatctattgtagacaccacaatcattataatgtcaacaatcctgtctattgtttttcatgagtttggacatgccattgcagctgcaaggtctttatgtcttaccttctcatttctatttttttctctcttacatgttgcgtgctttttgttcagttcacctggtactcaaaacatctgtaagcgaggaaaataggcggcaaatagtgggtttattatgagggaataaattactggattatataggcaaggatgttctagggttttagtttatagaaatgacaccaatcacagaggtccttgtgaccttgcctaccacaaaattgatatgtgtgtgtgcgcgcgcgcgtgtggtgtgtgtgtgtgtgtgggggggggggcacatgcacagcaataaggcccacagcctaaaccaattatctgtctaaaaactctcatgaattattttgtttcatattctgacacatcatttgctacttacacaacagtgagggactacagattgaatatgttgctatatttgtcgctgtactttttcctggggcatttgttgctctgaactatgacctactacaaaatatgcctctcttttccatgcttcggatttattgtgcagggatttggaataatgttatgcatgtgtgatgataacattgttacttcctgtgatgttatatcctctctatgtgagtggtgatggcctcatggtcatggaagtccctgaaatatctcctatgtcagaatacttgtccactcatgatgttattctttctgtggatggtctgaaaataaccagaactgatgattggatcaagattctgaaccaaggtactacagcgaaatctagggatcctgaattccttgaaggctctcatagatatgttgccactagttctaccaagggttattgcgtgcccgattcatggatagatgcaagcaaaaatctctggcagataagagacaagctgccttgcccagatgaactgatagccttcgaaaaagttatctgtaacgtctcaaccattttgacagagaagactagcataggtagtgaccagaaggaagttgagggaaaatattgtttgattgcgaaagatgtagtaaagcttagaagatgtggaaacggatggcacatgactgaagatgatgaaagtagctgtgcatgttttgaggatgagcactgtttggtacctgttctgaacccaggcttttcatggattgaggtctcctatgccaggccatactctttgagatgtttacaaaaaggaggaaatttgttatcatcacatactgcaaatagtaactttggacagagtccttgtgaaggatcttttgtttatgtgggtgatctgtcatcagcagcacgttcggttaggttatcccgctaccgacctcgatgggcacttctacttttcattgcagacatcccatatatcttggaaaatggtttaagtagcttgcttcatgcatctgcagcattggctgtaatcaattgcctaccggtgtattttctggatggtgaagcgattctggagactaccttaagctatgtagcttggtttaccccaagactgcaacgcagaattctaaaagtatgcagcgtggtgtggacgggtttattagtcattactttctcaagtatttgttattccacagtgctacattatggcgtatagcaaataacccatgtaattttgtcttgaacaaagagaagatcattttaatggaacatgccaactgtactctgtccattgtaaattataagttgttttgacttttatatatacataacttttgttaggct

SEQ ID NO: 32528 - DNA, 5383 bp, Zea Mays
ctagtctgtcatatgtggacgctatgatgcatggacagtgggcttcttagggcctttatgggccaggaattcgtcgaagcctgaaggaaggaaaaaaaaaacctaaagatggtcgctgccaccaggtagtttccaggcttccacgtttcactccaccgcttgtttccagttaccaccactccacttctaggttccagccgtgccggcgccgccgcttgcgctactctgcgcgccctcgccgctgcttgcttgctcgcaacttagaaggtgacgccgcctgcccagtgcgagcacgcctccacttgcactgcgggctgcggccctgccgaatctggaaggtgtcgagaagaaatagatccttgcactccatgccgctatgatcagcgctggccgcagcaggcggcgggggcgggcaccggcgtccctgcccacgaccacgaccgctgcttcccgccggaccgagcactccatctcctgctgttattgtgactgcaagatatattccttaaacgacgccctcttcaatttggggtggaagtatgctagatatatgagagcatggttttctgtaggtgtttatctatctctcattgctttagtcagtatatccttgatgctattgtgggagtcaattggtgtgttttattttaggagtggattccttagtgcctggttacagaacctactggtctcaacatatctattgtagacaccacaatcattataatgtcaacaatcctgtctattgtttttcatgagtttggacatgccattgcagctgcaagtgagggactacagattgaatatgttgctatatttgtcgctgtactttttcctggggcatttgttgctctgaactatgacctactacaaaatatgcctctcttttccatgcttcggatttattgtgcagggatttggaataatgttatggtaagtcatgctgttatgcatttattatttccaaaagatagaaataagttcatttattgattgtgcctctttgtatcttcgtaatgcattgtcatatacttttgatatttgggtacttgatgctacctcatatagaagtagtttaatcattaaaaggaaaatgcataactatttgtttacttgcaataatgaaggcaacgagaagtaagaacaatatactctatgcagtctagcgtaagatgcaattggtctcactaaatatttgttcgaaataatgtgagcaaagttattgtagagaattagggaacacctcacacccaattagggggtggctttcatatatatgtagtcatgtacaacttggaatacaatatgtgttagactatacatacctctaatacctgcccacagtcacaactgtagggaactgaatgagactggacctgaagacattgaactactgtgtaagcagtctcttagtcataatgtacgtgaactgattagttgaggccacatggagtaccctaaagccaccttctcacgaacaaagtggatgtcaattgtcaatgtctatatgcttcgtacgacgatggtgaaccgaattggcagtcatatagactgtggtgacattgtcacaatagacaatggtcgccaaaccgagtgatagtctgaaattgaccatcgactatgttaaagctatcgtgagggaggctacacttgaggcttcgtcgggcaaacgggagcccttgcccccatcggttgcggcaagtccagagcagcaaccttcttcagcgatggaggcggaaaagaacgccgctgaggaactatcttttctaaagcacgcaactttgggaaaatattgtctgattgtggcgaagaagaaagatgaaggctctttggcgcgacctgttgactaggtgtaaattttgtacactaggccatgctgaagattcgttaggttgagttttgcttgaaggccttggaaaatattatgtctgattgtctgccacgcttcaattgtcgaccaatacatcatgcacggtgaagcttatattacagttgattaccatgatattgctgtgtgggtaatatcttagccgaaggtcatcttgagtgaatgttacaggcatatgaaccacttagatctgatataggacccctgaacacctatatgttggaccctcctttgaagttcttgtttttatctcttattgagtggcccgaagcttgatcttctcattattgggaatatgtgctttgctggtggaactaagttgttgacgtctgagctttgggctcttcccttctactgagctggctatgttctcgtatgtggcgtttttgtggaggttgattatataacattggatcatattgtgatgggtctggtagttgggggttgtaagcttcccactgttgtgactgatgttgcacaattgggcttgaggacgaagaatgtgagttctgcccttgatgctggatgtatgacacatcatagttagtcgagcattaagatgatgtatggcacacattcttcggctggccttcctgcttcacggttgccaattccttatgcttttggatggtgatgctacaatattttgttgtatgctctttattctccccgcaaaatacacaatactagtcaatggcgcgcgccagcgcttgcataggatttccctttttttactgggaaggtagagcggcacaacaacagtcgtcgcccacgcgtgcggctagatgtaccaacggccaagatttttcgcgcgacatggatagtgcgaatgtcgaggaagttgcatcggtttaataagaagaaatagctttcttgattgaccgttgttggagtacctgcctccaaaggtgtggccccccttctgtccctttgtgttgagccaccccagaaactactttgctggctttgctaaggtccgttcgaaggttggcttgttgttggagtttgcggaaactacttttctccatcaaactagggtgtagtctgaattgttcgggcttcccttgcatccttgttgaaaaccctcatgatctctctgtgtttctgttgttcttgtcaacgctgtcgaaagtcattgtgtgctctaatatattcatccatcttctgaaacagcttcttcaaggtttgcggaggctttcaggtgaagtattatgagcatgggtcaactttgagctccttgattgttgacttaatgacaattttaactagtactccttgtgcatgtactttgacttagacaaaccttcacatataactttgaagggattcatctacttcttgaaaacatggaacaatgcatgtgccatgactaggtttgtttgaaagccttggaaacttgcaatcgattgtttcttaagttgttcccatgtggttatcgatctggacaaagggatgagtactaggtttgagctatgccttttgttgacggagggatgagtaccaggtttgagctatgccttttgcggccataatatgatttggctaacattgttgtgtttctgccgaattatgcaatggttgcttcgtaactcatgaggaattgctttgatttcgactgcccatcattcagaggaagcatggacagtttatatgcagcttgccatggggctacctgcaaatcccttgagaacgaagatgcactatcatagatgaaattacatttttacctttccctatttcatagtcaccctttgcaattaagggagtacaataatgtcattttactgcgtagacgtgtcgcacacatcttctcttcgtagaagcttcttatgtctcctctccttcgaagtcctctttatcgacgacaaagctttgctttcaatgccttcggcttcatgcacctttggctcattcagatctaccgaagctttttcaaggagagcggtgatcttcctttggccttcattagctttctggacctgaaaaaccatctaaatattgatttcatcattttggaccttcgactagagacctccccaacaacaaccaaatagaaacaattgctggtttacaaatgccattaaaccctggttagagaagtgcaaatataattctaatgcagtcttagacatacttcacgcgagtgtgaaatgtaacgttatatacttgtatactgaccttgttacttaatcattgtgatgttttataatttttttgttatgatttcatgtttaatagctctgtacagcatgtgtgatgataacattgttacttcctgtgatgttatatcctctctatgtgagtggtgatggcctcatggtaagtctacttctagttctatgtgtttacattattttaattttggcaatcttcacaatctaaaagtctgtcagaacaggtcatggaagtccctgaaatatctcctatgtcagaatacttgtccactcatgatgttattctttctgtggatggtctgaaaataaccagaactgatgattggatcaagattctgaaccaaggtactacagcgaaatctagggatcctgaattccttgaaggctctcatagatatgttgccactagttctaccaagggttattgcgtgcccgattcatggatagatgcaagcaaaaatctctggcagataagagacaagctgccttgcccagatgaactgatagccttcgaaaaagttatctgtaacgtctcaaccattttgacagagaagactagcataggtagtgaccagaaggaagttgagggaaaatattgtttgattgcgaaagatgtagtaaagcttagaagatgtggaaacggatggcacatgactgaagatgatgaaagtagctgtgcatgttttgaggatgagcactgtttggtacctgttctgaacccaggcttttcatggattgaggtctcctatgccaggccatactctttgagatgtttacaaaaaggaggaaatttgttatcatcacatactgcaaatagtaactttggacagagtccttgtgaaggatcttttgtttatgtgggtgatctgtcatcagcagcacgttcggttaggttatcccgctaccgacctcgatgggcacttctacttttcattgcagacatcccatatatcttggaaaatggtttaagtagcttgcttcatgcatctgcagcattggctgtaatcaattgcctaccggtgtattttctggatggtgaagcgattctggagactaccttaagctatgtagcttggtttaccccaagactgcaacgcagaattctaaaagtatgcagcgtggtgtggacgggtttattagtcattactttctcaagtatttgttattccacagtgctacattatggcgtatagcaaataacccatgtaattttgtcttgaacaaagagaagatcattttaatggaacatgccaactgtactctgtccattgtaaattataagttgttttgacttttatatatacataacttttgttaggct

SEQ ID NO: 32529 - DNA, 5215 bp, Zea Mays
ctagtctgtcatatgtggacgctatgatgcatggacagtgggcttcttagggcctttatgggccaggaattcgtcgaagcctgaaggaaggaaaaaaaaaacctaaagatggtcgctgccaccaggtagtttccaggcttccacgtttcactccaccgcttgtttccagttaccaccactccacttctaggttccagccgtgccggcgccgccgcttgcgctactctgcgcgccctcgccgctgcttgcttgctcgcaacttagaaggtgacgccgcctgcccagtgcgagcacgcctccacttgcactgcgggctgcggccctgccgaatctggaaggtgtcgagaagaaatagatccttgcactccatgccgctatgatcagcgctggccgcagcaggcggcgggggcgggcaccggcgtccctgcccacgaccacgaccgctgcttcccgccggaccgagcactccatctcctgctgttattgtgactgcaagatatattccttaaacgacgccctcttcaatttggggtggaagtatgctagatatatgagagcatggttttctgtaggtgtttatctatctctcattgctttagtcagtatatccttgatgctattgtgggagtcaattggtgtgttttattttaggagtggattccttagtgcctggttacagaacctactgacttcaggtctcaacatatctattgtagacaccacaatcattataatgtcaacaatcctgtctattgtttttcatgagtttggacatgccattgcagctgcaagtgagggactacagattgaatatgttgctatatttgtcgctgtactttttcctggggcatttgttgctctgaactatgacctactacaaaatatgcctctcttttccatgcttcggatttattgtgcagggatttggaataatgttatggtaagtcatgctgttatgcatttattatttccaaaagatagaaataagttcatttattgattgtgcctctttgtatcttcgtaatgcattgtcatatacttttgatatttgggtacttgatgctacctcatatagaagtagtttaatcattaaaaggaaaatgcataactatttgtttacttgcaataatgaaggcaacgagaagtaagaacaatatactctatgcagtctagcgtaagatgcaattggtctcactaaatatttgttcgaaataatgtgagcaaagttattgtagagaattagggaacacctcacacccaattagggggtggctttcatatatatgtagtcatgtacaacttggaatacaatatgtgttagactatacatacctctaatacctgcccacagtcacaactgtagggaactgaatgagactggacctgaagacattgaactactgtgtaagcagtctcttagtcataatgtacgtgaactgattagttgaggccacatggagtaccctaaagccaccttctcacgaacaaagtggatgtcaattgtcaatgtctatatgcttcgtacgacgatggtgaaccgaattggcagtcatatagactgtggtgacattgtcacaatagacaatggtcgccaaaccgagtgatagtctgaaattgaccatcgactatgttaaagctatcgtgagggaggctacacttgaggcttcgtcgggcaaacgggagcccttgcccccatcggttgcggcaagtccagagcagcaaccttcttcagcgatggaggcggaaaagaacgccgctgaggaactatcttttctaaagcacgcaactttgggaaaatattgtctgattgtggcgaagaagaaagatgaaggctctttggcgcgacctgttgactaggtgtaaattttgtacactaggccatgctgaagattcgttaggttgagttttgcttgaaggccttggaaaatattatgtctgattgtctgccacgcttcaattgtcgaccaatacatcatgcacggtgaagcttatattacagttgattaccatgatattgctgtgtgggtaatatcttagccgaaggtcatcttgagtgaatgttacaggcatatgaaccacttagatctgatataggacccctgaacacctatatgttggaccctcctttgaagttcttgtttttatctcttattgagtggcccgaagcttgatcttctcattattgggaatatgtgctttgctggtggaactaagttgttgacgtctgagctttgggctcttcccttctactgagctggctatgttctcgtatgtggcgtttttgtggaggttgattatataacattggatcatattgtgatgggtctggtagttgggggttgtaagcttcccactgttgtgactgatgttgcacaattgggcttgaggacgaagaatgtgagttctgcccttgatgctggatgtatgacacatcatagttagtcgagcattaagatgatgtatggcacacattcttcggctggccttcctgcttcacggttgccaattccttatgcttttggatggtgatgctacaatattttgttgtatgctctttattctccccgcaaaatacacaatactagtcaatggcgcgcgccagcgcttgcataggatttccctttttttactgggaaggtagagcggcacaacaacagtcgtcgcccacgcgtgcggctagatgtaccaacggccaagatttttcgcgcgacatggatagtgcgaatgtcgaggaagttgcatcggtttaataagaagaaatagctttcttgattgaccgttgttggagtacctgcctccaaaggtgtggccccccttctgtccctttgtgttgagccaccccagaaactactttgctggctttgctaaggtccgttcgaaggttggcttgttgttggagtttgcggaaactacttttctccatcaaactagggtgtagtctgaattgttcgggcttcccttgcatccttgttgaaaaccctcatgatctctctgtgtttctgttgttcttgtcaacgctgtcgaaagtcattgtgtgctctaatatattcatccatcttctgaaacagcttcttcaaggtttgcggaggctttcagacaaaccttcacatataactttgaagggattcatctacttcttgaaaacatggaacaatgcatgtgccatgactaggtttgtttgaaagccttggaaacttgcaatcgattgtttcttaagttgttcccatgtggttatcgatctggacaaagggatgagtactaggtttgagctatgccttttgttgacggagggatgagtaccaggtttgagctatgccttttgcggccataatatgatttggctaacattgttgtgtttctgccgaattatgcaatggttgcttcgtaactcatgaggaattgctttgatttcgactgcccatcattcagaggaagcatggacagtttatatgcagcttgccatggggctacctgcaaatcccttgagaacgaagatgcactatcatagatgaaattacatttttacctttccctatttcatagtcaccctttgcaattaagggagtacaataatgtcattttactgcgtagacgtgtcgcacacatcttctcttcgtagaagcttcttatgtctcctctccttcgaagtcctctttatcgacgacaaagctttgctttcaatgccttcggcttcatgcacctttggctcattcagatctaccgaagctttttcaaggagagcggtgatcttcctttggccttcattagctttctggacctgaaaaaccatctaaatattgatttcatcattttggaccttcgactagagacctccccaacaacaaccaaatagaaacaattgctggtttacaaatgccattaaaccctggttagagaagtgcaaatataattctaatgcagtcttagacatacttcacgcgagtgtgaaatgtaacgttatatacttgtatactgaccttgttacttaatcattgtgatgttttataatttttttgttatgatttcatgtttaatagctctgtacagcatgtgtgatgataacattgttacttcctgtgatgttatatcctctctatgtgagtggtgatggcctcatggtcatggaagtccctgaaatatctcctatgtcagaatacttgtccactcatgatgttattctttctgtggatggtctgaaaataaccagaactgatgattggatcaagattctgaaccaaggtactacagcgaaatctagggatcctgaattccttgaaggctctcatagatatgttgccactagttctaccaagggttattgcgtgcccgattcatggatagatgcaagcaaaaatctctggcagataagagacaagctgccttgcccagatgaactgatagccttcgaaaaagttatctgtaacgtctcaaccattttgacagagaagactagcataggtagtgaccagaaggaagttgagggaaaatattgtttgattgcgaaagatgtagtaaagcttagaagatgtggaaacggatggcacatgactgaagatgatgaaagtagctgtgcatgttttgaggatgagcactgtttggtacctgttctgaacccaggcttttcatggattgaggtctcctatgccaggccatactctttgagatgtttacaaaaaggaggaaatttgttatcatcacatactgcaaatagtaactttggacagagtccttgtgaaggatcttttgtttatgtgggtgatctgtcatcagcagcacgttcggttaggttatcccgctaccgacctcgatgggcacttctacttttcattgcagacatcccatatatcttggaaaatggtttaagtagcttgcttcatgcatctgcagcattggctgtaatcaattgcctaccggtgtattttctggatggtgaagcgattctggagactaccttaagctatgtagcttggtttaccccaagactgcaacgcagaattctaaaagtatgcagcgtggtgtggacgggtttattagtcattactttctcaagtatttgttattccacagtgctacattatggcgtatagcaaataacccatgtaattttgtcttgaacaaagagaagatcattttaatggaacatgccaactgtactctgtccattgtaaattataagttgttttgacttttatatatacataacttttgttaggct

SEQ ID NO: 32530 - DNA, 2346 bp, Zea Mays
ctagtctgtcatatgtggacgctatgatgcatggacagtgggcttcttagggcctttatgggccaggaattcgtcgaagcctgaaggaaggaaaaaaaaaacctaaagatggtcgctgccaccaggtagtttccaggcttccacgtttcactccaccgcttgtttccagttaccaccactccacttctaggttccagccgtgccggcgccgccgcttgcgctactctgcgcgccctcgccgctgcttgcttgctcgcaacttagaaggtgacgccgcctgcccagtgcgagcacgcctccacttgcactgcgggctgcggccctgccgaatctggaaggtgtcgagaagaaatagatccttgcactccatgccgctatgatcagcgctggccgcagcaggcggcgggggcgggcaccggcgtccctgcccacgaccacgaccgctgcttcccgccggaccgagcactccatctcctgctgttattgtgactgcaagatatattccttaaacgacgccctcttcaatttggggtggaagtatgctagatatatgagagcatggttttctgtaggtgtttatctatctctcattgctttagtcagtatatccttgatgctattgtgggagtcaattggtgtgttttattttaggagtggattccttagtgcctggttacagaacctactgacttcaggtctcaacatatctattgtagacaccacaatcattataatgtcaacaatcctgtctattgtttttcatgagtttggacatgccattgcagctgcaaggtctttatgtcttaccttctcatttctatttttttctctcttacatgttgcgtgctttttgttcagttcacctggtactcaaaacatctgtaagcgaggaaaataggcggcaaatagtgggtttattatgagggaataaattactggattatataggcaaggatgttctagggttttagtttatagaaatgacaccaatcacagaggtccttgtgaccttgcctaccacaaaattgatatgtgtgtgtgcgcgcgcgcgtgtggtgtgtgtgtgtgtgtgggggggggggcacatgcacagcaataaggcccacagcctaaaccaattatctgtctaaaaactctcatgaattattttgtttcatattctgacacatcatttgctacttacacaacagtgagggactacagattgaatatgttgctatatttgtcgctgtactttttcctggggcatttgttgctctgaactatgacctactacaaaatatgcctctcttttccatgcttcggatttattgtgcagggatttggaataatgttatgaactgatgattggatcaagattctgaaccaaggtactacagcgaaatctagggatcctgaattccttgaaggctctcatagatatgttgccactagttctaccaagggttattgcgtgcccgattcatggatagatgcaagcaaaaatctctggcagataagagacaagctgccttgcccagatgaactgatagccttcgaaaaagttatctgtaacgtctcaaccattttgacagagaagactagcataggtagtgaccagaaggaagttgagggaaaatattgtttgattgcgaaagatgtagtaaagcttagaagatgtggaaacggatggcacatgactgaagatgatgaaagtagctgtgcatgttttgaggatgagcactgtttggtacctgttctgaacccaggcttttcatggattgaggtctcctatgccaggccatactctttgagatgtttacaaaaaggaggaaatttgttatcatcacatactgcaaatagtaactttggacagagtccttgtgaaggatcttttgtttatgtgggtgatctgtcatcagcagcacgttcggttaggttatcccgctaccgacctcgatgggcacttctacttttcattgcagacatcccatatatcttggaaaatggtttaagtagcttgcttcatgcatctgcagcattggctgtaatcaattgcctaccggtgtattttctggatggtgaagcgattctggagactaccttaagctatgtagcttggtttaccccaagactgcaacgcagaattctaaaagtatgcagcgtggtgtggacgggtttattagtcattactttctcaagtatttgttattccacagtgctacattatggcgtatagcaaataacccatgtaattttgtcttgaacaaagagaagatcattttaatggaacatgccaactgtactctgtccattgtaaattataagttgttttgacttttatatatacataacttttgttaggct

SEQ ID NO: 32531 - DNA, 5732 bp, Zea Mays
ctagtctgtcatatgtggacgctatgatgcatggacagtgggcttcttagggcctttatgggccaggaattcgtcgaagcctgaaggaaggaaaaaaaaaacctaaagatggtcgctgccaccaggtagtttccaggcttccacgtttcactccaccgcttgtttccagttaccaccactccacttctaggttccagccgtgccggcgccgccgcttgcgctactctgcgcgccctcgccgctgcttgcttgctcgcaacttagaaggtgacgccgcctgcccagtgcgagcacgcctccacttgcactgcgggctgcggccctgccgaatctggaaggtgtcgagaagaaatagatccttgcactccatgccgctatgatcagcgctggccgcagcaggcggcgggggcgggcaccggcgtccctgcccacgaccacgaccgctgcttcccgccggaccgagcactccatctcctgctgttattgtgactgcaagatatattccttaaacgacgccctcttcaatttggggtggaagtatgctagatatatgagagcatggttttctgtaggtgtttatctatctctcattgctttagtcagtatatccttggtcccatatcttcggatgtaatgtggatgaagttaagctttggttatattttcccccctaggagtggattccttagtgcctggttacagaacctactgacttcaggtctcaacatatctattgtagacaccacaatcattataatgtcaacaatcctgtctattgtttttcatgagtttggacatgccattgcagctgcaaggtctttatgtcttaccttctcatttctatttttttctctcttacatgttgcgtgctttttgttcagttcacctggtactcaaaacatctgtaagcgaggaaaataggcggcaaatagtgggtttattatgagggaataaattactggattatataggcaaggatgttctagggttttagtttatagaaatgacaccaatcacagaggtccttgtgaccttgcctaccacaaaattgatatgtgtgtgtgcgcgcgcgcgtgtggtgtgtgtgtgtgtgtgggggggggggcacatgcacagcaataaggcccacagcctaaaccaattatctgtctaaaaactctcatgaattattttgtttcatattctgacacatcatttgctacttacacaacagtgagggactacagattgaatatgttgctatatttgtcgctgtactttttcctggggcatttgttgctctgaactatgacctactacaaaatatgcctctcttttccatgcttcggatttattgtgcagggatttggaataatgttatggtaagtcatgctgttatgcatttattatttccaaaagatagaaataagttcatttattgattgtgcctctttgtatcttcgtaatgcattgtcatatacttttgatatttgggtacttgatgctacctcatatagaagtagtttaatcattaaaaggaaaatgcataactatttgtttacttgcaataatgaaggcaacgagaagtaagaacaatatactctatgcagtctagcgtaagatgcaattggtctcactaaatatttgttcgaaataatgtgagcaaagttattgtagagaattagggaacacctcacacccaattagggggtggctttcatatatatgtagtcatgtacaacttggaatacaatatgtgttagactatacatacctctaatacctgcccacagtcacaactgtagggaactgaatgagactggacctgaagacattgaactactgtgtaagcagtctcttagtcataatgtacgtgaactgattagttgaggccacatggagtaccctaaagccaccttctcacgaacaaagtggatgtcaattgtcaatgtctatatgcttcgtacgacgatggtgaaccgaattggcagtcatatagactgtggtgacattgtcacaatagacaatggtcgccaaaccgagtgatagtctgaaattgaccatcgactatgttaaagctatcgtgagggaggctacacttgaggcttcgtcgggcaaacgggagcccttgcccccatcggttgcggcaagtccagagcagcaaccttcttcagcgatggaggcggaaaagaacgccgctgaggaactatcttttctaaagcacgcaactttgggaaaatattgtctgattgtggcgaagaagaaagatgaaggctctttggcgcgacctgttgactaggtgtaaattttgtacactaggccatgctgaagattcgttaggttgagttttgcttgaaggccttggaaaatattatgtctgattgtctgccacgcttcaattgtcgaccaatacatcatgcacggtgaagcttatattacagttgattaccatgatattgctgtgtgggtaatatcttagccgaaggtcatcttgagtgaatgttacaggcatatgaaccacttagatctgatataggacccctgaacacctatatgttggaccctcctttgaagttcttgtttttatctcttattgagtggcccgaagcttgatcttctcattattgggaatatgtgctttgctggtggaactaagttgttgacgtctgagctttgggctcttcccttctactgagctggctatgttctcgtatgtggcgtttttgtggaggttgattatataacattggatcatattgtgatgggtctggtagttgggggttgtaagcttcccactgttgtgactgatgttgcacaattgggcttgaggacgaagaatgtgagttctgcccttgatgctggatgtatgacacatcatagttagtcgagcattaagatgatgtatggcacacattcttcggctggccttcctgcttcacggttgccaattccttatgcttttggatggtgatgctacaatattttgttgtatgctctttattctccccgcaaaatacacaatactagtcaatggcgcgcgccagcgcttgcataggatttccctttttttactgggaaggtagagcggcacaacaacagtcgtcgcccacgcgtgcggctagatgtaccaacggccaagatttttcgcgcgacatggatagtgcgaatgtcgaggaagttgcatcggtttaataagaagaaatagctttcttgattgaccgttgttggagtacctgcctccaaaggtgtggccccccttctgtccctttgtgttgagccaccccagaaactactttgctggctttgctaaggtccgttcgaaggttggcttgttgttggagtttgcggaaactacttttctccatcaaactagggtgtagtctgaattgttcgggcttcccttgcatccttgttgaaaaccctcatgatctctctgtgtttctgttgttcttgtcaacgctgtcgaaagtcattgtgtgctctaatatattcatccatcttctgaaacagcttcttcaaggtttgcggaggctttcaggtgaagtattatgagcatgggtcaactttgagctccttgattgttgacttaatgacaattttaactagtactccttgtgcatgtactttgacttagacaaaccttcacatataactttgaagggattcatctacttcttgaaaacatggaacaatgcatgtgccatgactaggtttgtttgaaagccttggaaacttgcaatcgattgtttcttaagttgttcccatgtggttatcgatctggacaaagggatgagtactaggtttgagctatgccttttgttgacggagggatgagtaccaggtttgagctatgccttttgcggccataatatgatttggctaacattgttgtgtttctgccgaattatgcaatggttgcttcgtaactcatgaggaattgctttgatttcgactgcccatcattcagaggaagcatggacagtttatatgcagcttgccatggggctacctgcaaatcccttgagaacgaagatgcactatcatagatgaaattacatttttacctttccctatttcatagtcaccctttgcaattaagggagtacaataatgtcattttactgcgtagacgtgtcgcacacatcttctcttcgtagaagcttcttatgtctcctctccttcgaagtcctctttatcgacgacaaagctttgctttcaatgccttcggcttcatgcacctttggctcattcagatctaccgaagctttttcaaggagagcggtgatcttcctttggccttcattagctttctggacctgaaaaaccatctaaatattgatttcatcattttggaccttcgactagagacctccccaacaacaaccaaatagaaacaattgctggtttacaaatgccattaaaccctggttagagaagtgcaaatataattctaatgcagtcttagacatacttcacgcgagtgtgaaatgtaacgttatatacttgtatactgaccttgttacttaatcattgtgatgttttataatttttttgttatgatttcatgtttaatagctctgtacagcatgtgtgatgataacattgttacttcctgtgatgttatatcctctctatgtgagtggtgatggcctcatggtcatggaagtccctgaaatatctcctatgtcagaatacttgtccactcatgatgttattctttctgtggatggtctgaaaataaccagaactgatgattggatcaagattctgaaccaaggtactacagcgaaatctagggatcctgaattccttgaaggctctcatagatatgttgccactagttctaccaagggttattgcgtgcccgattcatggatagatgcaagcaaaaatctctggcagataagagacaagctgccttgcccagatgaactgatagccttcgaaaaagttatctgtaacgtctcaaccattttgacagagaagactagcataggtagtgaccagaaggaagttgagggaaaatattgtttgattgcgaaagatgtagtaaagcttagaagatgtggaaacggatggcacatgactgaagatgatgaaagtagctgtgcatgttttgaggatgagcactgtttggtacctgttctgaacccaggcttttcatggattgaggtctcctatgccaggccatactctttgagatgtttacaaaaaggaggaaatttgttatcatcacatactgcaaatagtaactttggacagagtccttgtgaaggatcttttgtttatgtgggtgatctgtcatcagcagcacgttcggttaggttatcccgctaccgacctcgatgggcacttctacttttcattgcagacatcccatatatcttggaaaatggtttaagtagcttgcttcatgcatctgcagcattggctgtaatcaattgcctaccggtgtattttctggatggtgaagcgattctggagactaccttaagctatgtagcttggtttaccccaagactgcaacgcagaattctaaaagtatgcagcgtggtgtggacgggtttattagtcattactttctcaagtatttgttattccacagtgctacattatggcgtatagcaaataacccatgtaattttgtcttgaacaaagagaagatcattttaatggaacatgccaactgtactctgtccattgtaaattataagttgttttgacttttatatatacataacttttgttaggct

SEQ ID NO: 32532 - DNA, 5777 bp, Zea Mays
ctagtctgtcatatgtggacgctatgatgcatggacagtgggcttcttagggcctttatgggccaggaattcgtcgaagcctgaaggaaggaaaaaaaaaacctaaagatggtcgctgccaccaggtagtttccaggcttccacgtttcactccaccgcttgtttccagttaccaccactccacttctaggttccagccgtgccggcgccgccgcttgcgctactctgcgcgccctcgccgctgcttgcttgctcgcaacttagaaggtgacgccgcctgcccagtgcgagcacgcctccacttgcactgcgggctgcggccctgccgaatctggaaggtgtcgagaagaaatagatccttgcactccatgccgctatgatcagcgctggccgcagcaggcggcgggggcgggcaccggcgtccctgcccacgaccacgaccgctgcttcccgccggaccgagcactccatctcctgctgttattgtgactgcaagatatattccttaaacgacgccctcttcaatttggggtggaagtatgctagatatatgagagcatggttttctgtaggtgtttatctatctctcattgctttagtcagtatatccttggtcccatatcttcggatgtaatgtggatgaagttaagctttggttatattttcccccctaggagtggattccttagtgcctggttacagaacctactgacttcaggtctcaacatatctattgtagacaccacaatcattataatgtcaacaatcctgtctattgtttttcatgagtttggacatgccattgcagctgcaaggtctttatgtcttaccttctcatttctatttttttctctcttacatgttgcgtgctttttgttcagttcacctggtactcaaaacatctgtaagcgaggaaaataggcggcaaatagtgggtttattatgagggaataaattactggattatataggcaaggatgttctagggttttagtttatagaaatgacaccaatcacagaggtccttgtgaccttgcctaccacaaaattgatatgtgtgtgtgcgcgcgcgcgtgtggtgtgtgtgtgtgtgtgggggggggggcacatgcacagcaataaggcccacagcctaaaccaattatctgtctaaaaactctcatgaattattttgtttcatattctgacacatcatttgctacttacacaacagtgagggactacagattgaatatgttgctatatttgtcgctgtactttttcctggggcatttgttgctctgaactatgacctactacaaaatatgcctctcttttccatgcttcggatttattgtgcagggatttggaataatgttatggtaagtcatgctgttatgcatttattatttccaaaagatagaaataagttcatttattgattgtgcctctttgtatcttcgtaatgcattgtcatatacttttgatatttgggtacttgatgctacctcatatagaagtagtttaatcattaaaaggaaaatgcataactatttgtttacttgcaataatgaaggcaacgagaagtaagaacaatatactctatgcagtctagcgtaagatgcaattggtctcactaaatatttgttcgaaataatgtgagcaaagttattgtagagaattagggaacacctcacacccaattagggggtggctttcatatatatgtagtcatgtacaacttggaatacaatatgtgttagactatacatacctctaatacctgcccacagtcacaactgtagggaactgaatgagactggacctgaagacattgaactactgtgtaagcagtctcttagtcataatgtacgtgaactgattagttgaggccacatggagtaccctaaagccaccttctcacgaacaaagtggatgtcaattgtcaatgtctatatgcttcgtacgacgatggtgaaccgaattggcagtcatatagactgtggtgacattgtcacaatagacaatggtcgccaaaccgagtgatagtctgaaattgaccatcgactatgttaaagctatcgtgagggaggctacacttgaggcttcgtcgggcaaacgggagcccttgcccccatcggttgcggcaagtccagagcagcaaccttcttcagcgatggaggcggaaaagaacgccgctgaggaactatcttttctaaagcacgcaactttgggaaaatattgtctgattgtggcgaagaagaaagatgaaggctctttggcgcgacctgttgactaggtgtaaattttgtacactaggccatgctgaagattcgttaggttgagttttgcttgaaggccttggaaaatattatgtctgattgtctgccacgcttcaattgtcgaccaatacatcatgcacggtgaagcttatattacagttgattaccatgatattgctgtgtgggtaatatcttagccgaaggtcatcttgagtgaatgttacaggcatatgaaccacttagatctgatataggacccctgaacacctatatgttggaccctcctttgaagttcttgtttttatctcttattgagtggcccgaagcttgatcttctcattattgggaatatgtgctttgctggtggaactaagttgttgacgtctgagctttgggctcttcccttctactgagctggctatgttctcgtatgtggcgtttttgtggaggttgattatataacattggatcatattgtgatgggtctggtagttgggggttgtaagcttcccactgttgtgactgatgttgcacaattgggcttgaggacgaagaatgtgagttctgcccttgatgctggatgtatgacacatcatagttagtcgagcattaagatgatgtatggcacacattcttcggctggccttcctgcttcacggttgccaattccttatgcttttggatggtgatgctacaatattttgttgtatgctctttattctccccgcaaaatacacaatactagtcaatggcgcgcgccagcgcttgcataggatttccctttttttactgggaaggtagagcggcacaacaacagtcgtcgcccacgcgtgcggctagatgtaccaacggccaagatttttcgcgcgacatggatagtgcgaatgtcgaggaagttgcatcggtttaataagaagaaatagctttcttgattgaccgttgttggagtacctgcctccaaaggtgtggccccccttctgtccctttgtgttgagccaccccagaaactactttgctggctttgctaaggtccgttcgaaggttggcttgttgttggagtttgcggaaactacttttctccatcaaactagggtgtagtctgaattgttcgggcttcccttgcatccttgttgaaaaccctcatgatctctctgtgtttctgttgttcttgtcaacgctgtcgaaagtcattgtgtgctctaatatattcatccatcttctgaaacagcttcttcaaggtttgcggaggctttcaggtgaagtattatgagcatgggtcaactttgagctccttgattgttgacttaatgacaattttaactagtactccttgtgcatgtactttgacttagacaaaccttcacatataactttgaagggattcatctacttcttgaaaacatggaacaatgcatgtgccatgactaggtttgtttgaaagccttggaaacttgcaatcgattgtttcttaagttgttcccatgtggttatcgatctggacaaagggatgagtactaggtttgagctatgccttttgttgacggagggatgagtaccaggtttgagctatgccttttgcggccataatatgatttggctaacattgttgtgtttctgccgaattatgcaatggttgcttcgtaactcatgaggaattgctttgatttcgactgcccatcattcagaggaagcatggacagtttatatgcagcttgccatggggctacctgcaaatcccttgagaacgaagatgcactatcatagatgaaattacatttttacctttccctatttcatagtcaccctttgcaattaagggagtacaataatgtcattttactgcgtagacgtgtcgcacacatcttctcttcgtagaagcttcttatgtctcctctccttcgaagtcctctttatcgacgacaaagctttgctttcaatgccttcggcttcatgcacctttggctcattcagatctaccgaagctttttcaaggagagcggtgatcttcctttggccttcattagctttctggacctgaaaaaccatctaaatattgatttcatcattttggaccttcgactagagacctccccaacaacaaccaaatagaaacaattgctggtttacaaatgccattaaaccctggttagagaagtgcaaatataattctaatgcagtcttagacatacttcacgcgagtgtgaaatgtaacgttatatacttgtatactgaccttgttacttaatcattgtgatgttttataatttttttgttatgatttcatgtttaatagctctgtacagcatgtgtgatgataacattgttacttcctgtgatgttatatcctctctatgtgagtggtgatggcctcatggtaagtctacttctagttctatgtgtttacattattttaattttggcaatcttcacaatctaaaagtctgtcagaacaggtcatggaagtccctgaaatatctcctatgtcagaatacttgtccactcatgatgttattctttctgtggatggtctgaaaataaccagaactgatgattggatcaagattctgaaccaaggtactacagcgaaatctagggatcctgaattccttgaaggctctcatagatatgttgccactagttctaccaagggttattgcgtgcccgattcatggatagatgcaagcaaaaatctctggcagataagagacaagctgccttgcccagatgaactgatagccttcgaaaaagttatctgtaacgtctcaaccattttgacagagaagactagcataggtagtgaccagaaggaagttgagggaaaatattgtttgattgcgaaagatgtagtaaagcttagaagatgtggaaacggatggcacatgactgaagatgatgaaagtagctgtgcatgttttgaggcttttcatggattgaggtctcctatgccaggccatactctttgagatgtttacaaaaaggaggaaatttgttatcatcacatactgcaaatagtaactttggacagagtccttgtgaaggatcttttgtttatgtgggtgatctgtcatcagcagcacgttcggttaggttatcccgctaccgacctcgatgggcacttctacttttcattgcagacatcccatatatcttggaaaatggtttaagtagcttgcttcatgcatctgcagcattggctgtaatcaattgcctaccggtgtattttctggatggtgaagcgattctggagactaccttaagctatgtagcttggtttaccccaagactgcaacgcagaattctaaaagtatgcagcgtggtgtggacgggtttattagtcattactttctcaagtatttgttattccacagtgctacattatggcgtatagcaaataacccatgtaattttgtcttgaacaaagagaagatcattttaatggaacatgccaactgtactctgtccattgtaaattataagttgttttgacttttatatatacataacttttgttaggct

SEQ ID NO: 32533 - DNA, 2593 bp, Zea Mays
ctagtctgtcatatgtggacgctatgatgcatggacagtgggcttcttagggcctttatgggccaggaattcgtcgaagcctgaaggaaggaaaaaaaaaacctaaagatggtcgctgccaccaggtagtttccaggcttccacgtttcactccaccgcttgtttccagttaccaccactccacttctaggttccagccgtgccggcgccgccgcttgcgctactctgcgcgccctcgccgctgcttgcttgctcgcaacttagaaggtgacgccgcctgcccagtgcgagcacgcctccacttgcactgcgggctgcggccctgccgaatctggaaggtgtcgagaagaaatagatccttgcactccatgccgctatgatcagcgctggccgcagcaggcggcgggggcgggcaccggcgtccctgcccacgaccacgaccgctgcttcccgccggaccgagcactccatctcctgctgttattgtgactgcaagatatattccttaaacgacgccctcttcaatttggggtggaagtatgctagatatatgagagcatggttttctgtaggtgtttatctatctctcattgctttagtcagtatatccttgatgctattgtgggagtcaattggtgtgttttattttaggagtggattccttagtgcctggttacagaacctactgacttcaggtctcaacatatctattgtagacaccacaatcattataatgtcaacaatcctgtctattgtttttcatgagtttggacatgccattgcagctgcaaggtctttatgtcttaccttctcatttctatttttttctctcttacatgttgcgtgctttttgttcagttcacctggtactcaaaacatctgtaagcgaggaaaataggcggcaaatagtgggtttattatgagggaataaattactggattatataggcaaggatgttctagggttttagtttatagaaatgacaccaatcacagaggtccttgtgaccttgcctaccacaaaattgatatgtgtgtgtgcgcgcgcgcgtgtggtgtgtgtgtgtgtgtgggggggggggcacatgcacagcaataaggcccacagcctaaaccaattatctgtctaaaaactctcatgaattattttgtttcatattctgacacatcatttgctacttacacaacagtgagggactacagattgaatatgttgctatatttgtcgctgtactttttcctggggcatttgttgctctgaactatgacctactacaaaatatgcctctcttttccatgcttcggatttattgtgcagggatttggaataatgttatgctgtacagcatgtgtgatgataacattgttacttcctgtgatgttatatcctctctatgtgagtggtgatggcctcatggtaagtctacttctagttctatgtgtttacattattttaattttggcaatcttcacaatctaaaagtctgtcagaacaggtcatggaagtccctgaaatatctcctatgtcagaatacttgtccactcatgatgttattctttctgtggatggtctgaaaataaccagaactgatgattggatcaagattctgaaccaaggtactacagcgaaatctagggatcctgaattccttgaaggctctcatagatatgttgccactagttctaccaagggttattgcgtgcccgattcatggatagatgcaagcaaaaatctctggcagataagagacaagctgccttgcccagatgaactgatagccttcgaaaaagttatctgtaacgtctcaaccattttgacagagaagactagcataggtagtgaccagaaggaagttgagggaaaatattgtttgattgcgaaagatgtagtaaagcttagaagatgtggaaacggatggcacatgactgaagatgatgaaagtagctgtgcatgttttgaggatgagcactgtttggtacctgttctgaacccaggcttttcatggattgaggtctcctatgccaggccatactctttgagatgtttacaaaaaggaggaaatttgttatcatcacatactgcaaatagtaactttggacagagtccttgtgaaggatcttttgtttatgtgggtgatctgtcatcagcagcacgttcggttaggttatcccgctaccgacctcgatgggcacttctacttttcattgcagacatcccatatatcttggaaaatggtttaagtagcttgcttcatgcatctgcagcattggctgtaatcaattgcctaccggtgtattttctggatggtgaagcgattctggagactaccttaagctatgtagcttggtttaccccaagactgcaacgcagaattctaaaagtatgcagcgtggtgtggacgggtttattagtcattactttctcaagtatttgttattccacagtgctacattatggcgtatagcaaataacccatgtaattttgtcttgaacaaagagaagatcattttaatggaacatgccaactgtactctgtccattgtaaattataagttgttttgacttttatatatacataacttttgttaggct

SEQ ID NO: 32534 - DNA, 5298 bp, Zea Mays
ctagtctgtcatatgtggacgctatgatgcatggacagtgggcttcttagggcctttatgggccaggaattcgtcgaagcctgaaggaaggaaaaaaaaaacctaaagatggtcgctgccaccaggtagtttccaggcttccacgtttcactccaccgcttgtttccagttaccaccactccacttctaggttccagccgtgccggcgccgccgcttgcgctactctgcgcgccctcgccgctgcttgcttgctcgcaacttagaaggtgacgccgcctgcccagtgcgagcacgcctccacttgcactgcgggctgcggccctgccgaatctggaaggtgtcgagaagaaatagatccttgcactccatgccgctatgatcagcgctggccgcagcaggcggcgggggcgggcaccggcgtccctgcccacgaccacgaccgctgcttcccgccggaccgagcactccatctcctgctgttattgtgactgcaagatatattccttaaacgacgccctcttcaatttggggtggaagtatgctagatatatgagagcatggttttctgtaggtgtttatctatctctcattgctttagtcagtatatccttgatgctattgtgggagtcaattggtgtgttttattttaggagtggattccttagtgcctggttacagaacctactgacttcaggtctcaacatatctattgtagacaccacaatcattataatgtcaacaatcctgtctattgtttttcatgagtttggacatgccattgcagctgcaaggtctttatgtcttaccttctcatttctatttttttctctcttacatgttgcgtgctttttgttcagttcacctggtactcaaaacatctgtaagcgaggaaaataggcggcaaatagtgggtttattatgagggaataaattactggattatataggcaaggatgttctagggttttagtttatagaaatgacaccaatcacagaggtccttgtgaccttgcctaccacaaaattgatatgtgtgtgtgcgcgcgcgcgtgtggtgtgtgtgtgtgtgtgggggggggggcacatgcacagcaataaggcccacagcctaaaccaattatctgtctaaaaactctcatgaattattttgtttcatattctgacacatcatttgctacttacacaacagtgagggactacagattgaatatgttgctatatttgtcgctgtactttttcctggggcatttgttgctctgaactatgacctactacaaaatatgcctctcttttccatgcttcggatttattgtgcagggatttggaataatgttatgtcacaactgtagggaactgaatgagactggacctgaagacattgaactactgtgtaagcagtctcttagtcataatgtacgtgaactgattagttgaggccacatggagtaccctaaagccaccttctcacgaacaaagtggatgtcaattgtcaatgtctatatgcttcgtacgacgatggtgaaccgaattggcagtcatatagactgtggtgacattgtcacaatagacaatggtcgccaaaccgagtgatagtctgaaattgaccatcgactatgttaaagctatcgtgagggaggctacacttgaggcttcgtcgggcaaacgggagcccttgcccccatcggttgcggcaagtccagagcagcaaccttcttcagcgatggaggcggaaaagaacgccgctgaggaactatcttttctaaagcacgcaactttgggaaaatattgtctgattgtggcgaagaagaaagatgaaggctctttggcgcgacctgttgactaggtgtaaattttgtacactaggccatgctgaagattcgttaggttgagttttgcttgaaggccttggaaaatattatgtctgattgtctgccacgcttcaattgtcgaccaatacatcatgcacggtgaagcttatattacagttgattaccatgatattgctgtgtgggtaatatcttagccgaaggtcatcttgagtgaatgttacaggcatatgaaccacttagatctgatataggacccctgaacacctatatgttggaccctcctttgaagttcttgtttttatctcttattgagtggcccgaagcttgatcttctcattattgggaatatgtgctttgctggtggaactaagttgttgacgtctgagctttgggctcttcccttctactgagctggctatgttctcgtatgtggcgtttttgtggaggttgattatataacattggatcatattgtgatgggtctggtagttgggggttgtaagcttcccactgttgtgactgatgttgcacaattgggcttgaggacgaagaatgtgagttctgcccttgatgctggatgtatgacacatcatagttagtcgagcattaagatgatgtatggcacacattcttcggctggccttcctgcttcacggttgccaattccttatgcttttggatggtgatgctacaatattttgttgtatgctctttattctccccgcaaaatacacaatactagtcaatggcgcgcgccagcgcttgcataggatttccctttttttactgggaaggtagagcggcacaacaacagtcgtcgcccacgcgtgcggctagatgtaccaacggccaagatttttcgcgcgacatggatagtgcgaatgtcgaggaagttgcatcggtttaataagaagaaatagctttcttgattgaccgttgttggagtacctgcctccaaaggtgtggccccccttctgtccctttgtgttgagccaccccagaaactactttgctggctttgctaaggtccgttcgaaggttggcttgttgttggagtttgcggaaactacttttctccatcaaactagggtgtagtctgaattgttcgggcttcccttgcatccttgttgaaaaccctcatgatctctctgtgtttctgttgttcttgtcaacgctgtcgaaagtcattgtgtgctctaatatattcatccatcttctgaaacagcttcttcaaggtttgcggaggctttcaggtgaagtattatgagcatgggtcaactttgagctccttgattgttgacttaatgacaattttaactagtactccttgtgcatgtactttgacttagacaaaccttcacatataactttgaagggattcatctacttcttgaaaacatggaacaatgcatgtgccatgactaggtttgtttgaaagccttggaaacttgcaatcgattgtttcttaagttgttcccatgtggttatcgatctggacaaagggatgagtactaggtttgagctatgccttttgttgacggagggatgagtaccaggtttgagctatgccttttgcggccataatatgatttggctaacattgttgtgtttctgccgaattatgcaatggttgcttcgtaactcatgaggaattgctttgatttcgactgcccatcattcagaggaagcatggacagtttatatgcagcttgccatggggctacctgcaaatcccttgagaacgaagatgcactatcatagatgaaattacatttttacctttccctatttcatagtcaccctttgcaattaagggagtacaataatgtcattttactgcgtagacgtgtcgcacacatcttctcttcgtagaagcttcttatgtctcctctccttcgaagtcctctttatcgacgacaaagctttgctttcaatgccttcggcttcatgcacctttggctcattcagatctaccgaagctttttcaaggagagcggtgatcttcctttggccttcattagctttctggacctgaaaaaccatctaaatattgatttcatcattttggaccttcgactagagacctccccaacaacaaccaaatagaaacaattgctggtttacaaatgccattaaaccctggttagagaagtgcaaatataattctaatgcagtcttagacatacttcacgcgagtgtgaaatgtaacgttatatacttgtatactgaccttgttacttaatcattgtgatgttttataatttttttgttatgatttcatgtttaatagctctgtacagcatgtgtgatgataacattgttacttcctgtgatgttatatcctctctatgtgagtggtgatggcctcatggtcatggaagtccctgaaatatctcctatgtcagaatacttgtccactcatgatgttattctttctgtggatggtctgaaaataaccagaactgatgattggatcaagattctgaaccaaggtactacagcgaaatctagggatcctgaattccttgaaggctctcatagatatgttgccactagttctaccaagggttattgcgtgcccgattcatggatagatgcaagcaaaaatctctggcagataagagacaagctgccttgcccagatgaactgatagccttcgaaaaagttatctgtaacgtctcaaccattttgacagagaagactagcataggtagtgaccagaaggaagttgagggaaaatattgtttgattgcgaaagatgtagtaaagcttagaagatgtggaaacggatggcacatgactgaagatgatgaaagtagctgtgcatgttttgaggatgagcactgtttggtacctgttctgaacccaggcttttcatggattgaggtctcctatgccaggccatactctttgagatgtttacaaaaaggaggaaatttgttatcatcacatactgcaaatagtaactttggacagagtccttgtgaaggatcttttgtttatgtgggtgatctgtcatcagcagcacgttcggttaggttatcccgctaccgacctcgatgggcacttctacttttcattgcagacatcccatatatcttggaaaatggtttaagtagcttgcttcatgcatctgcagcattggctgtaatcaattgcctaccggtgtattttctggatggtgaagcgattctggagactaccttaagctatgtagcttggtttaccccaagactgcaacgcagaattctaaaagtatgcagcgtggtgtggacgggtttattagtcattactttctcaagtatttgttattccacagtgctacattatggcgtatagcaaataacccatgtaattttgtcttgaacaaagagaagatcattttaatggaacatgccaactgtactctgtccattgtaaattataagttgttttgacttttatatatacataacttttgttaggct

SEQ ID NO: 32535 - DNA, 2141 bp, Zea Mays
ctagtctgtcatatgtggacgctatgatgcatggacagtgggcttcttagggcctttatgggccaggaattcgtcgaagcctgaaggaaggaaaaaaaaaacctaaagatggtcgctgccaccaggtagtttccaggcttccacgtttcactccaccgcttgtttccagttaccaccactccacttctaggttccagccgtgccggcgccgccgcttgcgctactctgcgcgccctcgccgctgcttgcttgctcgcaacttagaaggtgacgccgcctgcccagtgcgagcacgcctccacttgcactgcgggctgcggccctgccgaatctggaaggtgtcgagaagaaatagatccttgcactccatgccgctatgatcagcgctggccgcagcaggcggcgggggcgggcaccggcgtccctgcccacgaccacgaccgctgcttcccgccggaccgagcactccatctcctgctgttattgtgactgcaagatatattccttaaacgacgccctcttcaatttggggtggaagtatgctagatatatgagagcatggttttctgtaggtgtttatctatctctcattgctttagtcagtatatccttggtcccatatcttcggatgtaatgtggatgaagttaagctttggttatattttcccccctaggagtggattccttagtgcctggttacagaacctactgacttcaggtctcaacatatctattgtagacaccacaatcattataatgtcaacaatcctgtctattgtttttcatgagtttggacatgccattgcagctgcaagtgagggactacagattgaatatgttgctatatttgtcgctgtactttttcctggggcatttgttgctctgaactatgacctactacaaaatatgcctctcttttccatgcttcggatttattgtgcagggatttggaataatgttatgctctgtacagcatgtgtgatgataacattgttacttcctgtgatgttatatcctctctatgtgagtggtgatggcctcatggtcatggaagtccctgaaatatctcctatgtcagaatacttgtccactcatgatgttattctttctgtggatggtctgaaaataaccagaactgatgattggatcaagattctgaaccaaggtactacagcgaaatctagggatcctgaattccttgaaggctctcatagatatgttgccactagttctaccaagggttattgcgtgcccgattcatggatagatgcaagcaaaaatctctggcagataagagacaagctgccttgcccagatgaactgatagccttcgaaaaagttatctgtaacgtctcaaccattttgacagagaagactagcataggtagtgaccagaaggaagttgagggaaaatattgtttgattgcgaaagatgtagtaaagcttagaagatgtggaaacggatggcacatgactgaagatgatgaaagtagctgtgcatgttttgaggatgagcactgtttggtacctgttctgaacccaggcttttcatggattgaggtctcctatgccaggccatactctttgagatgtttacaaaaaggaggaaatttgttatcatcacatactgcaaatagtaactttggacagagtccttgtgaaggatcttttgtttatgtgggtgatctgtcatcagcagcacgttcggttaggttatcccgctaccgacctcgatgggcacttctacttttcattgcagacatcccatatatcttggaaaatggtttaagtagcttgcttcatgcatctgcagcattggctgtaatcaattgcctaccggtgtattttctggatggtgaagcgattctggagactaccttaagctatgtagcttggtttaccccaagactgcaacgcagaattctaaaagtatgcagcgtggtgtggacgggtttattagtcattactttctcaagtatttgttattccacagtgctacattatggcgtatagcaaataacccatgtaattttgtcttgaacaaagagaagatcattttaatggaacatgccaactgtactctgtccattgtaaattataagttgttttgacttttatatatacataacttttgttaggct

SEQ ID NO: 32536 - DNA, 3660 bp, Zea Mays
ctagtctgtcatatgtggacgctatgatgcatggacagtgggcttcttagggcctttatgggccaggaattcgtcgaagcctgaaggaaggaaaaaaaaaacctaaagatggtcgctgccaccaggtagtttccaggcttccacgtttcactccaccgcttgtttccagttaccaccactccacttctaggttccagccgtgccggcgccgccgcttgcgctactctgcgcgccctcgccgctgcttgcttgctcgcaacttagaaggtgacgccgcctgcccagtgcgagcacgcctccacttgcactgcgggctgcggccctgccgaatctggaaggtgtcgagaagaaatagatccttgcactccatgccgctatgatcagcgctggccgcagcaggcggcgggggcgggcaccggcgtccctgcccacgaccacgaccgctgcttcccgccggaccgagcactccatctcctgctgttattgtgactgcaagatatattccttaaacgacgccctcttcaatttggggtggaagtatgctagatatatgagagcatggttttctgtaggtgtttatctatctctcattgctttagtcagtatatccttgatgctattgtgggagtcaattggtgtgttttattttaggagtggattccttagtgcctggttacagaacctactgacttcaggtctcaacatatctattgtagacaccacaatcattataatgtcaacaatcctgtctattgtttttcatgagtttggacatgccattgcagctgcaaggtctttatgtcttaccttctcatttctatttttttctctcttacatgttgcgtgctttttgttcagttcacctggtactcaaaacatctgtaagcgaggaaaataggcggcaaatagtgggtttattatgagggaataaattactggattatataggcaaggatgttctagggttttagtttatagaaatgacaccaatcacagaggtccttgtgaccttgcctaccacaaaattgatatgtgtgtgtgcgcgcgcgcgtgtggtgtgtgtgtgtgtgtgggggggggggcacatgcacagcaataaggcccacagcctaaaccaattatctgtctaaaaactctcatgaattattttgtttcatattctgacacatcatttgctacttacacaacagtgagggactacagattgaatatgttgctatatttgtcgctgtactttttcctggggcatttgttgctctgaactatgacctactacaaaatatgcctctcttttccatgcttcggatttattgtgcagggatttggaataatgttatgcttcttcaaggtttgcggaggctttcaggtgaagtattatgagcatgggtcaactttgagctccttgattgttgacttaatgacaattttaactagtactccttgtgcatgtactttgacttagacaaaccttcacatataactttgaagggattcatctacttcttgaaaacatggaacaatgcatgtgccatgactaggtttgtttgaaagccttggaaacttgcaatcgattgtttcttaagttgttcccatgtggttatcgatctggacaaagggatgagtactaggtttgagctatgccttttgttgacggagggatgagtaccaggtttgagctatgccttttgcggccataatatgatttggctaacattgttgtgtttctgccgaattatgcaatggttgcttcgtaactcatgaggaattgctttgatttcgactgcccatcattcagaggaagcatggacagtttatatgcagcttgccatggggctacctgcaaatcccttgagaacgaagatgcactatcatagatgaaattacatttttacctttccctatttcatagtcaccctttgcaattaagggagtacaataatgtcattttactgcgtagacgtgtcgcacacatcttctcttcgtagaagcttcttatgtctcctctccttcgaagtcctctttatcgacgacaaagctttgctttcaatgccttcggcttcatgcacctttggctcattcagatctaccgaagctttttcaaggagagcggtgatcttcctttggccttcattagctttctggacctgaaaaaccatctaaatattgatttcatcattttggaccttcgactagagacctccccaacaacaaccaaatagaaacaattgctggtttacaaatgccattaaaccctggttagagaagtgcaaatataattctaatgcagtcttagacatacttcacgcgagtgtgaaatgtaacgttatatacttgtatactgaccttgttacttaatcattgtgatgttttataatttttttgttatgatttcatgtttaatagctctgtacagcatgtgtgatgataacattgttacttcctgtgatgttatatcctctctatgtgagtggtgatggcctcatggtaagtctacttctagttctatgtgtttacattattttaattttggcaatcttcacaatctaaaagtctgtcagaacaggtcatggaagtccctgaaatatctcctatgtcagaatacttgtccactcatgatgttattctttctgtggatggtctgaaaataaccagaactgatgattggatcaagattctgaaccaaggtactacagcgaaatctagggatcctgaattccttgaaggctctcatagatatgttgccactagttctaccaagggttattgcgtgcccgattcatggatagatgcaagcaaaaatctctggcagataagagacaagctgccttgcccagatgaactgatagccttcgaaaaagttatctgtaacgtctcaaccattttgacagagaagactagcataggtagtgaccagaaggaagttgagggaaaatattgtttgattgcgaaagatgtagtaaagcttagaagatgtggaaacggatggcacatgactgaagatgatgaaagtagctgtgcatgttttgaggatgagcactgtttggtacctgttctgaacccaggcttttcatggattgaggtctcctatgccaggccatactctttgagatgtttacaaaaaggaggaaatttgttatcatcacatactgcaaatagtaactttggacagagtccttgtgaaggatcttttgtttatgtgggtgatctgtcatcagcagcacgttcggttaggttatcccgctaccgacctcgatgggcacttctacttttcattgcagacatcccatatatcttggaaaatggtttaagtagcttgcttcatgcatctgcagcattggctgtaatcaattgcctaccggtgtattttctggatggtgaagcgattctggagactaccttaagctatgtagcttggtttaccccaagactgcaacgcagaattctaaaagtatgcagcgtggtgtggacgggtttattagtcattactttctcaagtatttgttattccacagtgctacattatggcgtatagcaaataacccatgtaattttgtcttgaacaaagagaagatcattttaatggaacatgccaactgtactctgtccattgtaaattataagttgttttgacttttatatatacataacttttgttaggct

SEQ ID NO: 32537 - DNA, 5334 bp, Zea Mays
ctagtctgtcatatgtggacgctatgatgcatggacagtgggcttcttagggcctttatgggccaggaattcgtcgaagcctgaaggaaggaaaaaaaaaacctaaagatggtcgctgccaccaggtagtttccaggcttccacgtttcactccaccgcttgtttccagttaccaccactccacttctaggttccagccgtgccggcgccgccgcttgcgctactctgcgcgccctcgccgctgcttgcttgctcgcaacttagaaggtgacgccgcctgcccagtgcgagcacgcctccacttgcactgcgggctgcggccctgccgaatctggaaggtgtcgagaagaaatagatccttgcactccatgccgctatgatcagcgctggccgcagcaggcggcgggggcgggcaccggcgtccctgcccacgaccacgaccgctgcttcccgccggaccgagcactccatctcctgctgttattgtgactgcaagatatattccttaaacgacgccctcttcaatttggggtggaagtatgctagatatatgagagcatggttttctgtaggtgtttatctatctctcattgctttagtcagtatatccttggtcccatatcttcggatgtaatgtggatgaagttaagctttggttatattttcccccctaggagtggattccttagtgcctggttacagaacctactgacttcaggtctcaacatatctattgtagacaccacaatcattataatgtcaacaatcctgtctattgtttttcatgagtttggacatgccattgcagctgcaagtgagggactacagattgaatatgttgctatatttgtcgctgtactttttcctggggcatttgttgctctgaactatgacctactacaaaatatgcctctcttttccatgcttcggatttattgtgcagggatttggaataatgttatggtaagtcatgctgttatgcatttattatttccaaaagatagaaataagttcatttattgattgtgcctctttgtatcttcgtaatgcattgtcatatacttttgatatttgggtacttgatgctacctcatatagaagtagtttaatcattaaaaggaaaatgcataactatttgtttacttgcaataatgaaggcaacgagaagtaagaacaatatactctatgcagtctagcgtaagatgcaattggtctcactaaatatttgttcgaaataatgtgagcaaagttattgtagagaattagggaacacctcacacccaattagggggtggctttcatatatatgtagtcatgtacaacttggaatacaatatgtgttagactatacatacctctaatacctgcccacagtcacaactgtagggaactgaatgagactggacctgaagacattgaactactgtgtaagcagtctcttagtcataatgtacgtgaactgattagttgaggccacatggagtaccctaaagccaccttctcacgaacaaagtggatgtcaattgtcaatgtctatatgcttcgtacgacgatggtgaaccgaattggcagtcatatagactgtggtgacattgtcacaatagacaatggtcgccaaaccgagtgatagtctgaaattgaccatcgactatgttaaagctatcgtgagggaggctacacttgaggcttcgtcgggcaaacgggagcccttgcccccatcggttgcggcaagtccagagcagcaaccttcttcagcgatggaggcggaaaagaacgccgctgaggaactatcttttctaaagcacgcaactttgggaaaatattgtctgattgtggcgaagaagaaagatgaaggctctttggcgcgacctgttgactaggtgtaaattttgtacactaggccatgctgaagattcgttaggttgagttttgcttgaaggccttggaaaatattatgtctgattgtctgccacgcttcaattgtcgaccaatacatcatgcacggtgaagcttatattacagttgattaccatgatattgctgtgtgggtaatatcttagccgaaggtcatcttgagtgaatgttacaggcatatgaaccacttagatctgatataggacccctgaacacctatatgttggaccctcctttgaagttcttgtttttatctcttattgagtggcccgaagcttgatcttctcattattgggaatatgtgctttgctggtggaactaagttgttgacgtctgagctttgggctcttcccttctactgagctggctatgttctcgtatgtggcgtttttgtggaggttgattatataacattggatcatattgtgatgggtctggtagttgggggttgtaagcttcccactgttgtgactgatgttgcacaattgggcttgaggacgaagaatgtgagttctgcccttgatgctggatgtatgacacatcatagttagtcgagcattaagatgatgtatggcacacattcttcggctggccttcctgcttcacggttgccaattccttatgcttttggatggtgatgctacaatattttgttgtatgctctttattctccccgcaaaatacacaatactagtcaatggcgcgcgccagcgcttgcataggatttccctttttttactgggaaggtagagcggcacaacaacagtcgtcgcccacgcgtgcggctagatgtaccaacggccaagatttttcgcgcgacatggatagtgcgaatgtcgaggaagttgcatcggtttaataagaagaaatagctttcttgattgaccgttgttggagtacctgcctccaaaggtgtggccccccttctgtccctttgtgttgagccaccccagaaactactttgctggctttgctaaggtccgttcgaaggttggcttgttgttggagtttgcggaaactacttttctccatcaaactagggtgtagtctgaattgttcgggcttcccttgcatccttgttgaaaaccctcatgatctctctgtgtttctgttgttcttgtcaacgctgtcgaaagtcattgtgtgctctaatatattcatccatcttctgaaacagcttcttcaaggtttgcggaggctttcaggtgaagtattatgagcatgggtcaactttgagctccttgattgttgacttaatgacaattttaactagtactccttgtgcatgtactttgacttagacaaaccttcacatataactttgaagggattcatctacttcttgaaaacatggaacaatgcatgtgccatgactaggtttgtttgaaagccttggaaacttgcaatcgattgtttcttaagttgttcccatgtggttatcgatctggacaaagggatgagtactaggtttgagctatgccttttgttgacggagggatgagtaccaggtttgagctatgccttttgcggccataatatgatttggctaacattgttgtgtttctgccgaattatgcaatggttgcttcgtaactcatgaggaattgctttgatttcgactgcccatcattcagaggaagcatggacagtttatatgcagcttgccatggggctacctgcaaatcccttgagaacgaagatgcactatcatagatgaaattacatttttacctttccctatttcatagtcaccctttgcaattaagggagtacaataatgtcattttactgcgtagacgtgtcgcacacatcttctcttcgtagaagcttcttatgtctcctctccttcgaagtcctctttatcgacgacaaagctttgctttcaatgccttcggcttcatgcacctttggctcattcagatctaccgaagctttttcaaggagagcggtgatcttcctttggccttcattagctttctggacctgaaaaaccatctaaatattgatttcatcattttggaccttcgactagagacctccccaacaacaaccaaatagaaacaattgctggtttacaaatgccattaaaccctggttagagaagtgcaaatataattctaatgcagtcttagacatacttcacgcgagtgtgaaatgtaacgttatatacttgtatactgaccttgttacttaatcattgtgatgttttataatttttttgttatgatttcatgtttaatagctctgtacagcatgtgtgatgataacattgttacttcctgtgatgttatatcctctctatgtgagtggtgatggcctcatggtcatggaagtccctgaaatatctcctatgtcagaatacttgtccactcatgatgttattctttctgtggatggtctgaaaataaccagaactgatgattggatcaagattctgaaccaaggtactacagcgaaatctagggatcctgaattccttgaaggctctcatagatatgttgccactagttctaccaagggttattgcgtgcccgattcatggatagatgcaagcaaaaatctctggcagataagagacaagctgccttgcccagatgaactgatagccttcgaaaaagttatctgtaacgtctcaaccattttgacagagaagactagcataggtagtgaccagaaggaagttgagggaaaatattgtttgattgcgaaagatgtagtaaagcttagaagatgtggaaacggatggcacatgactgaagatgatgaaagtagctgtgcatgttttgaggatgagcactgtttggtacctgttctgaacccaggcttttcatggattgaggtctcctatgccaggccatactctttgagatgtttacaaaaaggaggaaatttgttatcatcacatactgcaaatagtaactttggacagagtccttgtgaaggatcttttgtttatgtgggtgatctgtcatcagcagcacgttcggttaggttatcccgctaccgacctcgatgggcacttctacttttcattgcagacatcccatatatcttggaaaatggtttaagtagcttgcttcatgcatctgcagcattggctgtaatcaattgcctaccggtgtattttctggatggtgaagcgattctggagactaccttaagctatgtagcttggtttaccccaagactgcaacgcagaattctaaaagtatgcagcgtggtgtggacgggtttattagtcattactttctcaagtatttgttattccacagtgctacattatggcgtatagcaaataacccatgtaattttgtcttgaacaaagagaagatcattttaatggaacatgccaactgtactctgtccattgtaaattataagttgttttgacttttatatatacataacttttgttaggct

SEQ ID NO: 32538 - DNA, 5047 bp, Zea Mays
ctcattcaatctttcttgagaagaaaaatgcatcaaaaaaactagatgggcatttggtagctttccaagttctaccccatgaaaagtggaagctaaaattatgttccagatcctcacatctaacctcaccttcaatgactttcaccaagcccaaaaaactttttctaggtttttttgctgcatttttagcaaacagagaagcatactcttgattcccttctcttccttgtccttcgcctcttgtccgactcagatctccccgacctgccaccacccgcgagccctgcacaacatcactgctaccttctctgtcgatccctcgatctccagacaaccccgctcgcctctctccctgctccggtccccgcccgcctctcgctcgcgacaactccgccgcagcacgcggcggccgcggcgagatgctccgcctgcgggcgttccggccgacgagcgacaaagtcgtgaagatccagctccaccctactcacccctggctcgtcaccgccgacgccaacgaccgcgtctccgtctgggactgggagcaccgccaggtgatctatgagctgaaggcaggtggcgttgatgagcgtcgcttggttggagcgaagcttgagaaacttgctgagggagatgattcaaaaggaaagcccaccgaggctattcgagggggaagtgtaaagcaggtttccttttatgatgatgatgttcgcttttggcaacattggcgtaattgctctgctgctgctgaggccccaactgcagtcagtcagcagtcttccacgttcattgcacctgcaccttcgacacgaggaaggcactttgttgtcatttgttgtgagaacaaagtcatatttttggacttggtgactatgcggggccgtgatgttcctaaacaggagcttgacaataggtcacttctttgtatggaattcctctctaggacatcttctagcgatgctcctcttgttgcctttgggtcatctgatggtgtcatcagggtcctttcgatgttgacatggaagcttgtgcgtaggtatacgggtggacataaaggagcaatagcttgcttaatgacgtacatgtctgcagctggtgaggtacatttagtttctggtggcagcgatggcctgctgatattatggagtgctgatcatatccatgactcacgtgagcttgtgcctaaaattagtatgaaggcccatgatggaggtgttgttgcagttgaactttctagggtgatggggagtgctccgcagctcattacaataggggctgataaaactttagccatatgggatactgttactttcaaggaaataagacgcattaaaccagtgcctaaacttgcttgtcatagtgttgcatcgtggtgtcatccccgtgcaccaaaccttgatattctaacttgtgtcaaggactcacatatttgggccatagagcacccaacttattctgctttaacaagaccgctctgcgagctgtcatcactagttcccccacaggtccttgcactgcataagaaactgagggtttactgcatggtggcacaccccttgcagccgcatcttgttgctactggaactaatattggtatcatattaagcgagtttgacccaagagcacttccagctattgctcctttaccaacaccaacaggcaacaaggaacattctgctgtttacatagttgaaagagaacttaagttactgaatttccaattgtcaaacacagcgaatccatcccttgggaatgctggtgttgcatctgatgcaggaaggtcaatgaacaattcaatagaacagttgatagtaaagcagaccaagaagcatatcagcactcctgctccccacgattcctattcggtcctttcagttagcagttctggaaagtatgttgcaattgtatggccagatatcccttcttttgctgtatacaaagcaaatgattggtcagttgttgattcaggcacagggaagctttttgcctgggacacttgtcgagacagatatgctctggtagagagtgcattggccccaagaatgccacttgttgttaaaggtggttcttctaaaaaggcaaaagaagcagcagcagctgcagctcaagcagcagctgcagcagctagtgctgcttctgctgccacagtgcaagtgcgtatcttattagatgatggaacagcacatgttttgcagagatcgattgatggtcgtaatgaaccagttattggattgcatggtggtgctttacttggtgtcacataccgtacatctcgtagaatcagtcctttgacagcaacagctatatcaactgttcaatcgatgcccttatcaggttttggtggaagtggatcatcttttgcatctgatgatccattttcctctaaggaagggcctccacaaaatttccaactgtacagctgggagacctatcagcctgttagtggcctacttgcacaacctgagtggactgtgtgggaccaaactgttgagtattgtgcatttgcttatcagcagtatatagtgatttcttccttgcggccccaatttaggtaccttggagatgtttcaattccctttgcaactggtgccgtttggcatcgaaggcagttatttgtgtctacaccaacaacaattgagtgtgtctttgttgatgctggagtggcagcgattgacattgaaacaaaaaggataaaacaagaaatgaaagcaagagaagctcagagtcgggcagctgaagagcatggagatttggctcttatcactgttgaagctccccaggttactgtgagtgaaaaagtatcattgaggccaccaatgttgcaggttgttcgtttagcctcctttcagtacgctccatcgataccaccatttatagtaccaaagcaatccaagttcgatggagatgattcagtgtttcagaaagaactggatgacagaaggtatgctgaagttgctgtcgctggaggaggtgtgtctgttgcagtaactcgcttccctcctgaacagaagagacctatcggacctcttgttgtggttggtgtaagagatggagttctctggcttgttgacaggtatatgtgtgcacatgccttatcactcagccatcctggtataagatgccgttgccttgcagcatatggggaccctgttagtgctgtgaaatgggcaacgagacttggcagagagcatcacgatgacctggctcagtttatgctgggtatgggctatgccactgaagctctccatttgcctggaatatctaagaggctggagttcgaccttgcaatgcagagcaatgacctgaaaagagcacttgcttgtctattaacaatgagcaatagccgagatgtgggacaagaaacagctgctgctgatgccactgacgttacccagattcttagtttggcagtagctaagcaagctaagcaggaaagtcttacagatgccgtgcagggaatagtgaaattcgtcaaggagttttttgaccttattgatgcagcagatgccactggtcaatctgacattgctcgtgaagttttaaagagattagcggctgcagcttctgtaaagggagcactccatggacaaatgctgcgaggcctggcactccgtcttggaaatcatggggagcttactagattgtcgggtctggtaagcaatttgattacagctggccatggacgcgaagcagcatttgctgccgcagttctgggagataatgccctaatggagaaagcatggcaggacacaggaatgttagctgaggctgttttacatgctcaggcccatggtcgtccatcattaaggaacttggttataacatggaacaagatgctacaaaaggaactggatcacacaccgactgtaaaaaccgatgccgccgccgcattcttggcttctctcgaggatccaaagctcacaagcttgggggaaactgagaaaaagcctcccatcgaaatacttcctcctgggatgcctcccctatctgcacctccgatcgtgattaaaaaggctggagcaaaacctggtctccctaatgcagcaaaggcgtcaaatgggcctataggtgctcctatggctcaaggtgctcccatggctcatggtactcctgggccacaaggagtccccatgaatcaagttactccatcacagggcagtcatgacgaggcaaggccatcagatgctacagtggctgatgcagctgccgcggttgcagaaggtacagcagctcccccggctgcagaaggtacatcagctcctccggctgcagaaggtacagcaactcccagcagtgaggaagctaaagcagcacctggtaatgaggaaggcacatcaaatccaatcaacgaggaagccacagcagctgcagtttcagttgctgcaggcagccctgactctgctgctgctcctgcagctgatactagctcggacgcacctgctgttaatcccacggaagataccgtctctgccccctcaacggaggcaccaccagagttgacggataagccatcttcagcagaggcatcgttgccacctccacccagtgtttctggtgtataaatatttctgattctcttttagcagtgtgccgaattttctgtattctggttcgttcgttccaccacgcgcgctggtataggtatttgttgcctgtggtatacagatttcgcagacgccaggcagtatgtgagtagctttgtacatctgctgtctgcgtctcacgagaacgtgctaccgttgtgtcactgacactgtgtggccatatcttatgttgttggtgaccacagttcaattcttgcttgatgagttgatcgagctgcaccaccaatatccctgtcttggacgaccgattcgtctcttgcggaatctaacgtaactgctgaggttcgcaaaatgtcttgttgggtcatctaacttgggaatctgtgcgtaccgaaagcgctatgtcggcccgtgctgcagtgcaagtaccacgttttggccagtcgcccgttggtttgccctctatccattaagtaatctgattggtcgaggcgtgtcaaaagcca

SEQ ID NO: 32539 - DNA, 4975 bp, Zea Mays
ccaagttctaccccatgaaaagtggaagctaaaattatgttccagatcctcacatctaacctcaccttcaatgactttcaccaagcccaaaaaactttttctaggtttttttgctgcatttttagcaaacagagaagcatactcttgattcccttctcttccttgtccttcgcctcttgtccgactcagatctccccgacctgccaccacccgcgagccctgcacaacatcactgctaccttctctgtcgatccctcgatctccagacaaccccgctcgcctctctccctgctccggtccccgcccgcctctcgctcgcgacaactccgccgcagcacgcggcggccgcggcgagatgctccgcctgcgggcgttccggccgacgagcgacaaagtcgtgaagatccagctccaccctactcacccctggctcgtcaccgccgacgccaacgaccgcgtctccgtctgggactgggagcaccgccaggtgatctatgagctgaaggcaggtggcgttgatgagcgtcgcttggttggagcgaagcttgagaaacttgctgagggagatgattcaaaaggaaagcccaccgaggctattcgagggggaagtgtaaagcaggtttccttttatgatgatgatgttcgcttttggcaacattggcgtaattgctctgctgctgctgaggccccaactgcagtcagtcagcagtcttccacgttcattgcacctgcaccttcgacacgaggaaggcactttgttgtcatttgttgtgagaacaaagtcatatttttggacttggtgactatgcggggccgtgatgttcctaaacaggagcttgacaataggtcacttctttgtatggaattcctctctaggacatcttctagcgatgctcctcttgttgcctttgggtcatctgatggtgtcatcagggtcctttcgatgttgacatggaagcttgtgcgtaggtatacgggtggacataaaggagcaatagcttgcttaatgacgtacatgtctgcagctggtgaggtacatttagtttctggtggcagcgatggcctgctgatattatggagtgctgatcatatccatgactcacgtgagcttgtgcctaaaattagtatgaaggcccatgatggaggtgttgttgcagttgaactttctagggtgatggggagtgctccgcagctcattacaataggggctgataaaactttagccatatgggatactgttactttcaagacgcattaaaccagtgcctaaacttgcttgtcatagtgttgcatcgtggtgtcatccccgtgcaccaaaccttgatattctaacttgtgtcaaggactcacatatttgggccatagagcacccaacttattctgctttaacaagaccgctctgcgagctgtcatcactagttcccccacaggtccttgcactgcataagaaactgagggtttactgcatggtggcacaccccttgcagccgcatcttgttgctactggaactaatattggtatcatattaagcgagtttgacccaagagcacttccagctattgctcctttaccaacaccaacaggcaacaaggaacattctgctgtttacatagttgaaagagaacttaagttactgaatttccaattgtcaaacacagcgaatccatcccttgggaatgctggtgttgcatctgatgcaggaaggtcaatgaacaattcaatagaacagttgatagtaaagcagaccaagaagcatatcagcactcctgctccccacgattcctattcggtcctttcagttagcagttctggaaagtatgttgcaattgtatggccagatatcccttcttttgctgtatacaaagcaaatgattggtcagttgttgattcaggcacagggaagctttttgcctgggacacttgtcgagacagatatgctctggtagagagtgcattggccccaagaatgccacttgttgttaaaggtggttcttctaaaaaggcaaaagaagcagcagcagctgcagctcaagcagcagctgcagcagctagtgctgcttctgctgccacagtgcaagtgcgtatcttattagatgatggaacagcacatgttttgcagagatcgattgatggtcgtaatgaaccagttattggattgcatggtggtgctttacttggtgtcacataccgtacatctcgtagaatcagtcctttgacagcaacagctatatcaactgttcaatcgatgcccttatcaggttttggtggaagtggatcatcttttgcatctgatgatccattttcctctaaggaagggcctccacaaaatttccaactgtacagctgggagacctatcagcctgttagtggcctacttgcacaacctgagtggactgtgtgggaccaaactgttgagtattgtgcatttgcttatcagcagtatatagtgatttcttccttgcggccccaatttaggtaccttggagatgtttcaattccctttgcaactggtgccgtttggcatcgaaggcagttatttgtgtctacaccaacaacaattgagtgtgtctttgttgatgctggagtggcagcgattgacattgaaacaaaaaggataaaacaagaaatgaaagcaagagaagctcagagtcgggcagctgaagagcatggagatttggctcttatcactgttgaagctccccaggttactgtgagtgaaaaagtatcattgaggccaccaatgttgcaggttgttcgtttagcctcctttcagtacgctccatcgataccaccatttatagtaccaaagcaatccaagttcgatggagatgattcagtgtttcagaaagaactggatgacagaaggtatgctgaagttgctgtcgctggaggaggtgtgtctgttgcagtaactcgcttccctcctgaacagaagagacctatcggacctcttgttgtggttggtgtaagagatggagttctctggcttgttgacaggtatatgtgtgcacatgccttatcactcagccatcctggtataagatgccgttgccttgcagcatatggggaccctgttagtgctgtgaaatgggcaacgagacttggcagagagcatcacgatgacctggctcagtttatgctgggtatgggctatgccactgaagctctccatttgcctggaatatctaagaggctggagttcgaccttgcaatgcagagcaatgacctgaaaagagcacttgcttgtctattaacaatgagcaatagccgagatgtgggacaagaaacagctgctgctgatgccactgacgttacccagattcttagtttggcagtagctaagcaagctaagcaggaaagtcttacagatgccgtgcagggaatagtgaaattcgtcaaggagttttttgaccttattgatgcagcagatgccactggtcaatctgacattgctcgtgaagttttaaagagattagcggctgcagcttctgtaaagggagcactccatggacaaatgctgcgaggcctggcactccgtcttggaaatcatggggagcttactagattgtcgggtctggtaagcaatttgattacagctggccatggacgcgaagcagcatttgctgccgcagttctgggagataatgccctaatggagaaagcatggcaggacacaggaatgttagctgaggctgttttacatgctcaggcccatggtcgtccatcattaaggaacttggttataacatggaacaagatgctacaaaaggaactggatcacacaccgactgtaaaaaccgatgccgccgccgcattcttggcttctctcgaggatccaaagctcacaagcttgggggaaactgagaaaaagcctcccatcgaaatacttcctcctgggatgcctcccctatctgcacctccgatcgtgattaaaaaggctggagcaaaacctggtctccctaatgcagcaaaggcgtcaaatgggcctataggtgctcctatggctcaaggtgctcccatggctcatggtactcctgggccacaaggagtccccatgaatcaagttactccatcacagggcagtcatgacgaggcaaggccatcagatgctacagtggctgatgcagctgccgcggttgcagaaggtacagcagctcccccggctgcagaaggtacatcagctcctccggctgcagaaggtacagcaactcccagcagtgaggaagctaaagcagcacctggtaatgaggaaggcacatcaaatccaatcaacgaggaagccacagcagctgcagtttcagttgctgcaggcagccctgactctgctgctgctcctgcagctgatactagctcggacgcacctgctgttaatcccacggaagataccgtctctgccccctcaacggaggcaccaccagagttgacggataagccatcttcagcagaggcatcgttgccacctccacccagtgtttctggtgtataaatatttctgattctcttttagcagtgtgccgaattttctgtattctggttcgttcgttccaccacgcgcgctggtataggtatttgttgcctgtggtatacagatttcgcagacgccaggcagtatgtgagtagctttgtacatctgctgtctgcgtctcacgagaacgtgctaccgttgtgtcactgacactgtgtggccatatcttatgttgttggtgaccacagttcaattcttgcttgatgagttgatcgagctgcaccaccaatatccctgtcttggacgaccgattcgtctcttgcggaatctaacgtaactgctgaggttcgcaaaatgtcttgttgggtcatctaacttgggaatctgtgcgtaccgaaagcgctatgtcggcccgtgctgcagtgcaagtaccacgttttggccagtcgcccgttggtttgccctctatccattaagtaatctgattggtcgaggcgtgtcaaaagcca

SEQ ID NO: 32540 - DNA, 4973 bp, Zea Mays
ccaagttctaccccatgaaaagtggaagctaaaattatgttccagatcctcacatctaacctcaccttcaatgactttcaccaagcccaaaaaactttttctaggtttttttgctgcatttttagcaaacagagaagcatactcttgattcccttctcttccttgtccttcgcctcttgtccgactcagatctccccgacctgccaccacccgcgagccctgcacaacatcactgctaccttctctgtcgatccctcgatctccagacaaccccgctcgcctctctccctgctccggtccccgcccgcctctcgctcgcgacaactccgccgcagcacgcggcggccgcggcgagatgctccgcctgcgggcgttccggccgacgagcgacaaagtcgtgaagatccagctccaccctactcacccctggctcgtcaccgccgacgccaacgaccgcgtctccgtctgggactgggagcaccgccaggtgatctatgagctgaaggcaggtggcgttgatgagcgtcgcttggttggagcgaagcttgagaaacttgctgagggagatgattcaaaaggaaagcccaccgaggctattcgagggggaaggtttccttttatgatgatgatgttcgcttttggcaacattggcgtaattgctctgctgctgctgaggccccaactgcagtcagtcagcagtcttccacgttcattgcacctgcaccttcgacacgaggaaggcactttgttgtcatttgttgtgagaacaaagtcatatttttggacttggtgactatgcggggccgtgatgttcctaaacaggagcttgacaataggtcacttctttgtatggaattcctctctaggacatcttctagcgatgctcctcttgttgcctttgggtcatctgatggtgtcatcagggtcctttcgatgttgacatggaagcttgtgcgtaggtatacgggtggacataaaggagcaatagcttgcttaatgacgtacatgtctgcagctggtgaggtacatttagtttctggtggcagcgatggcctgctgatattatggagtgctgatcatatccatgactcacgtgagcttgtgcctaaaattagtatgaaggcccatgatggaggtgttgttgcagttgaactttctagggtgatggggagtgctccgcagctcattacaataggggctgataaaactttagccatatgggatactgttactttcaaggaaataagacgcattaaaccagtgcctaaacttgcttgtcatagtgttgcatcgtggtgtcatccccgtgcaccaaaccttgatattctaacttgtgtcaaggactcacatatttgggccatagagcacccaacttattctgctttaacaagaccgctctgcgagctgtcatcactagttcccccacaggtccttgcactgcataagaaactgagggtttactgcatggtggcacaccccttgcagccgcatcttgttgctactggaactaatattggtatcatattaagcgagtttgacccaagagcacttccagctattgctcctttaccaacaccaacaggcaacaaggaacattctgctgtttacatagttgaaagagaacttaagttactgaatttccaattgtcaaacacagcgaatccatcccttgggaatgctggtgttgcatctgatgcaggaaggtcaatgaacaattcaatagaacagttgatagtaaagcagaccaagaagcatatcagcactcctgctccccacgattcctattcggtcctttcagttagcagttctggaaagtatgttgcaattgtatggccagatatcccttcttttgctgtatacaaagcaaatgattggtcagttgttgattcaggcacagggaagctttttgcctgggacacttgtcgagacagatatgctctggtagagagtgcattggccccaagaatgccacttgttgttaaaggtggttcttctaaaaaggcaaaagaagcagcagcagctgcagctcaagcagcagctgcagcagctagtgctgcttctgctgccacagtgcaagtgcgtatcttattagatgatggaacagcacatgttttgcagagatcgattgatggtcgtaatgaaccagttattggattgcatggtggtgctttacttggtgtcacataccgtacatctcgtagaatcagtcctttgacagcaacagctatatcaactgttcaatcgatgcccttatcaggttttggtggaagtggatcatcttttgcatctgatgatccattttcctctaaggaagggcctccacaaaatttccaactgtacagctgggagacctatcagcctgttagtggcctacttgcacaacctgagtggactgtgtgggaccaaactgttgagtattgtgcatttgcttatcagcagtatatagtgatttcttccttgcggccccaatttaggtaccttggagatgtttcaattccctttgcaactggtgccgtttggcatcgaaggcagttatttgtgtctacaccaacaacaattgagtgtgtctttgttgatgctggagtggcagcgattgacattgaaacaaaaaggataaaacaagaaatgaaagcaagagaagctcagagtcgggcagctgaagagcatggagatttggctcttatcactgttgaagctccccaggttactgtgagtgaaaaagtatcattgaggccaccaatgttgcaggttgttcgtttagcctcctttcagtacgctccatcgataccaccatttatagtaccaaagcaatccaagttcgatggagatgattcagtgtttcagaaagaactggatgacagaaggtatgctgaagttgctgtcgctggaggaggtgtgtctgttgcagtaactcgcttccctcctgaacagaagagacctatcggacctcttgttgtggttggtgtaagagatggagttctctggcttgttgacaggtatatgtgtgcacatgccttatcactcagccatcctggtataagatgccgttgccttgcagcatatggggaccctgttagtgctgtgaaatgggcaacgagacttggcagagagcatcacgatgacctggctcagtttatgctgggtatgggctatgccactgaagctctccatttgcctggaatatctaagaggctggagttcgaccttgcaatgcagagcaatgacctgaaaagagcacttgcttgtctattaacaatgagcaatagccgagatgtgggacaagaaacagctgctgctgatgccactgacgttacccagattcttagtttggcagtagctaagcaagctaagcaggaaagtcttacagatgccgtgcagggaatagtgaaattcgtcaaggagttttttgaccttattgatgcagcagatgccactggtcaatctgacattgctcgtgaagttttaaagagattagcggctgcagcttctgtaaagggagcactccatggacaaatgctgcgaggcctggcactccgtcttggaaatcatggggagcttactagattgtcgggtctggtaagcaatttgattacagctggccatggacgcgaagcagcatttgctgccgcagttctgggagataatgccctaatggagaaagcatggcaggacacaggaatgttagctgaggctgttttacatgctcaggcccatggtcgtccatcattaaggaacttggttataacatggaacaagatgctacaaaaggaactggatcacacaccgactgtaaaaaccgatgccgccgccgcattcttggcttctctcgaggatccaaagctcacaagcttgggggaaactgagaaaaagcctcccatcgaaatacttcctcctgggatgcctcccctatctgcacctccgatcgtgattaaaaaggctggagcaaaacctggtctccctaatgcagcaaaggcgtcaaatgggcctataggtgctcctatggctcaaggtgctcccatggctcatggtactcctgggccacaaggagtccccatgaatcaagttactccatcacagggcagtcatgacgaggcaaggccatcagatgctacagtggctgatgcagctgccgcggttgcagaaggtacagcagctcccccggctgcagaaggtacatcagctcctccggctgcagaaggtacagcaactcccagcagtgaggaagctaaagcagcacctggtaatgaggaaggcacatcaaatccaatcaacgaggaagccacagcagctgcagtttcagttgctgcaggcagccctgactctgctgctgctcctgcagctgatactagctcggacgcacctgctgttaatcccacggaagataccgtctctgccccctcaacggaggcaccaccagagttgacggataagccatcttcagcagaggcatcgttgccacctccacccagtgtttctggtgtataaatatttctgattctcttttagcagtgtgccgaattttctgtattctggttcgttcgttccaccacgcgcgctggtataggtatttgttgcctgtggtatacagatttcgcagacgccaggcagtatgtgagtagctttgtacatctgctgtctgcgtctcacgagaacgtgctaccgttgtgtcactgacactgtgtggccatatcttatgttgttggtgaccacagttcaattcttgcttgatgagttgatcgagctgcaccaccaatatccctgtcttggacgaccgattcgtctcttgcggaatctaacgtaactgctgaggttcgcaaaatgtcttgttgggtcatctaacttgggaatctgtgcgtaccgaaagcgctatgtcggcccgtgctgcagtgcaagtaccacgttttggccagtcgcccgttggtttgccctctatccattaagtaatctgattggtcgaggcgtgtcaaaagcca

SEQ ID NO: 32541 - DNA, 4900 bp, Zea Mays
tcttgattcccttctcttccttgtccttcgcctcttgtccgactcagatctccccgacctgccaccacccgcgagccctgcacaacatcactgctaccttctctgtcgatccctcgatctccagacaaccccgctcgcctctctccctgctccggtccccgcccgcctctcgctcgcgacaactccgccgcagcacgcggcggccgcggcgagatgctccgcctgcgggcgttccggccgacgagcgacaaagtcgtgaagatccagctccaccctactcacccctggctcgtcaccgccgacgccaacgaccgcgtctccgtctgggactgggagcaccgccaggtgatctatgagctgaaggcaggtggcgttgatgagcgtcgcttggttggagcgaagcttgagaaacttgctgagggagatgccagaccagtggaagtaatatgcgcttctcgttctacccatttgcaaccttttgtgcagattcaaaaggaaagcccaccgaggctattcgagggggaagtgtaaagcaggtttccttttatgatgatgatgttcgcttttggcaacattggcgtaattgctctgctgctgctgaggccccaactgcagtcagtcagcagtcttccacgttcattgcacctgcaccttcgacacgaggaaggcactttgttgtcatttgttgtgagaacaaagtcatatttttggacttggtgactatgcggggccgtgatgttcctaaacaggagcttgacaataggtcacttctttgtatggaattcctctctaggacatcttctagcgatgctcctcttgttgcctttgggtcatctgatggtgtcatcagggtcctttcgatgttgacatggaagcttgtgcgtaggtatacgggtggacataaaggagcaatagcttgcttaatgacgtacatgtctgcagctggtgaggtacatttagtttctggtggcagcgatggcctgctgatattatggagtgctgatcatatccatgactcacgtgagcttgtgcctaaaattagtatgaaggcccatgatggaggtgttgttgcagttgaactttctagggtgatggggagtgctccgcagctcattacaataggggctgataaaactttagccatatgggatactgttactttcaaggaaataagacgcattaaaccagtgcctaaacttgcttgtcatagtgttgcatcgtggtgtcatccccgtgcaccaaaccttgatattctaacttgtgtcaaggactcacatatttgggccatagagcacccaacttattctgctttaacaagaccgctctgcgagctgtcatcactagttcccccacaggtccttgcactgcataagaaactgagggtttactgcatggtggcacaccccttgcagccgcatcttgttgctactggaactaatattggtatcatattaagcgagtttgacccaagagcacttccagctattgctcctttaccaacaccaacaggcaacaaggaacattctgctgtttacatagttgaaagagaacttaagttactgaatttccaattgtcaaacacagcgaatccatcccttgggaatgctggtgttgcatctgatgcaggaaggtcaatgaacaattcaatagaacagttgatagtaaagcagaccaagaagcatatcagcactcctgctccccacgattcctattcggtcctttcagttagcagttctggaaagtatgttgcaattgtatggccagatatcccttcttttgctgtatacaaagcaaatgattggtcagttgttgattcaggcacagggaagctttttgcctgggacacttgtcgagacagatatgctctggtagagagtgcattggccccaagaatgccacttgttgttaaaggtggttcttctaaaaaggcaaaagaagcagcagcagctgcagctcaagcagcagctgcagcagctagtgctgcttctgctgccacagtgcaagtgcgtatcttattagatgatggaacagcacatgttttgcagagatcgattgatggtcgtaatgaaccagttattggattgcatggtggtgctttacttggtgtcacataccgtacatctcgtagaatcagtcctttgacagcaacagctatatcaactgttcaatcgatgcccttatcaggttttggtggaagtggatcatcttttgcatctgatgatccattttcctctaaggaagggcctccacaaaatttccaactgtacagctgggagacctatcagcctgttagtggcctacttgcacaacctgagtggactgtgtgggaccaaactgttgagtattgtgcatttgcttatcagcagtatatagtgatttcttccttgcggccccaatttaggtaccttggagatgtttcaattccctttgcaactggtgccgtttggcatcgaaggcagttatttgtgtctacaccaacaacaattgagtgtgtctttgttgatgctggagtggcagcgattgacattgaaacaaaaaggataaaacaagaaatgaaagcaagagaagctcagagtcgggcagctgaagagcatggagatttggctcttatcactgttgaagctccccaggttactgtgagtgaaaaagtatcattgaggccaccaatgttgcaggttgttcgtttagcctcctttcagtacgctccatcgataccaccatttatagtaccaaagcaatccaagttcgatggagatgattcagtgtttcagaaagaactggatgacagaaggtatgctgaagttgctgtcgctggaggaggtgtgtctgttgcagtaactcgcttccctcctgaacagaagagacctatcggacctcttgttgtggttggtgtaagagatggagttctctggcttgttgacaggtatatgtgtgcacatgccttatcactcagccatcctggtataagatgccgttgccttgcagcatatggggaccctgttagtgctgtgaaatgggcaacgagacttggcagagagcatcacgatgacctggctcagtttatgctgggtatgggctatgccactgaagctctccatttgcctggaatatctaagaggctggagttcgaccttgcaatgcagagcaatgacctgaaaagagcacttgcttgtctattaacaatgagcaatagccgagatgtgggacaagaaacagctgctgctgatgccactgacgttacccagattcttagtttggcagtagctaagcaagctaagcaggaaagtcttacagatgccgtgcagggaatagtgaaattcgtcaaggagttttttgaccttattgatgcagcagatgccactggtcaatctgacattgctcgtgaagttttaaagagattagcggctgcagcttctgtaaagggagcactccatggacaaatgctgcgaggcctggcactccgtcttggaaatcatggggagcttactagattgtcgggtctggtaagcaatttgattacagctggccatggacgcgaagcagcatttgctgccgcagttctgggagataatgccctaatggagaaagcatggcaggacacaggaatgttagctgaggctgttttacatgctcaggcccatggtcgtccatcattaaggaacttggttataacatggaacaagatgctacaaaaggaactggatcacacaccgactgtaaaaaccgatgccgccgccgcattcttggcttctctcgaggatccaaagctcacaagcttgggggaaactgagaaaaagcctcccatcgaaatacttcctcctgggatgcctcccctatctgcacctccgatcgtgattaaaaaggctggagcaaaacctggtctccctaatgcagcaaaggcgtcaaatgggcctataggtgctcctatggctcaaggtgctcccatggctcatggtactcctgggccacaaggagtccccatgaatcaagttactccatcacagggcagtcatgacgaggcaaggccatcagatgctacagtggctgatgcagctgccgcggttgcagaaggtacagcagctcccccggctgcagaaggtacatcagctcctccggctgcagaaggtacagcaactcccagcagtgaggaagctaaagcagcacctggtaatgaggaaggcacatcaaatccaatcaacgaggaagccacagcagctgcagtttcagttgctgcaggcagccctgactctgctgctgctcctgcagctgatactagctcggacgcacctgctgttaatcccacggaagataccgtctctgccccctcaacggaggcaccaccagagttgacggataagccatcttcagcagaggcatcgttgccacctccacccagtgtttctggtgtataaatatttctgattctcttttagcagtgtgccgaattttctgtattctggttcgttcgttccaccacgcgcgctggtataggtatttgttgcctgtggtatacagatttcgcagacgccaggcagtatgtgagtagctttgtacatctgctgtctgcgtctcacgagaacgtgctaccgttgtgtcactgacactgtgtggccatatcttatgttgttggtgaccacagttcaattcttgcttgatgagttgatcgagctgcaccaccaatatccctgtcttggacgaccgattcgtctcttgcggaatctaacgtaactgctgaggttcgcaaaatgtcttgttgggtcatctaacttgggaatctgtgcgtaccgaaagcgctatgtcggcccgtgctgcagtgcaagtaccacgttttggccagtcgcccgttggtttgccctctatccattaagtaatctgattggtcgaggcgtgtcaaaagcca

SEQ ID NO: 32542 - DNA, 4842 bp, Zea Mays
tcttgattcccttctcttccttgtccttcgcctcttgtccgactcagatctccccgacctgccaccacccgcgagccctgcacaacatcactgctaccttctctgtcgatccctcgatctccagacaaccccgctcgcctctctccctgctccggtccccgcccgcctctcgctcgcgacaactccgccgcagcacgcggcggccgcggcgagatgctccgcctgcgggcgttccggccgacgagcgacaaagtcgtgaagatccagctccaccctactcacccctggctcgtcaccgccgacgccaacgaccgcgtctccgtctgggactgggagcaccgccaggtgatctatgagctgaaggcaggtggcgttgatgagcgtcgcttggttggagcgaagcttgagaaacttgctgagggagatgattcaaaaggaaagcccaccgaggctattcgagggggaagtgtaaagcaggtttccttttatgatgatgatgttcgcttttggcaacattggcgtaattgctctgctgctgctgaggccccaactgcagtcagtcagcagtcttccacgttcattgcacctgcaccttcgacacgaggaaggcactttgttgtcatttgttgtgagaacaaagtcatatttttggacttggtgactatgcggggccgtgatgttcctaaacaggagcttgacaataggtcacttctttgtatggaattcctctctaggacatcttctagcgatgctcctcttgttgcctttgggtcatctgatggtgtcatcagggtcctttcgatgttgacatggaagcttgtgcgtaggtatacgggtggacataaaggagcaatagcttgcttaatgacgtacatgtctgcagctggtgaggtacatttagtttctggtggcagcgatggcctgctgatattatggagtgctgatcatatccatgactcacgtgagcttgtgcctaaaattagtatgaagggcccatgatggaggtgttgttgcagttgaactttctagggtgatggggagtgctccgcagctcattacaataggggctgataaaactttagccatatgggatactgttactttcaaggaaataagacgcattaaaccagtgcctaaacttgcttgtcatagtgttgcatcgtggtgtcatccccgtgcaccaaaccttgatattctaacttgtgtcaaggactcacatatttgggccatagagcacccaacttattctgctttaacaagaccgctctgcgagctgtcatcactagttcccccacaggtccttgcactgcataagaaactgagggtttactgcatggtggcacaccccttgcagccgcatcttgttgctactggaactaatattggtatcatattaagcgagtttgacccaagagcacttccagctattgctcctttaccaacaccaacaggcaacaaggaacattctgctgtttacatagttgaaagagaacttaagttactgaatttccaattgtcaaacacagcgaatccatcccttgggaatgctggtgttgcatctgatgcaggaaggtcaatgaacaattcaatagaacagttgatagtaaagcagaccaagaagcatatcagcactcctgctccccacgattcctattcggtcctttcagttagcagttctggaaagtatgttgcaattgtatggccagatatcccttcttttgctgtatacaaagcaaatgattggtcagttgttgattcaggcacagggaagctttttgcctgggacacttgtcgagacagatatgctctggtagagagtgcattggccccaagaatgccacttgttgttaaaggtggttcttctaaaaaggcaaaagaagcagcagcagctgcagctcaagcagcagctgcagcagctagtgctgcttctgctgccacagtgcaagtgcgtatcttattagatgatggaacagcacatgttttgcagagatcgattgatggtcgtaatgaaccagttattggattgcatggtggtgctttacttggtgtcacataccgtacatctcgtagaatcagtcctttgacagcaacagctatatcaactgttcaatcgatgcccttatcaggttttggtggaagtggatcatcttttgcatctgatgatccattttcctctaaggaagggcctccacaaaatttccaactgtacagctgggagacctatcagcctgttagtggcctacttgcacaacctgagtggactgtgtgggaccaaactgttgagtattgtgcatttgcttatcagcagtatatagtgatttcttccttgcggccccaatttaggtaccttggagatgtttcaattccctttgcaactggtgccgtttggcatcgaaggcagttatttgtgtctacaccaacaacaattgagtgtgtctttgttgatgctggagtggcagcgattgacattgaaacaaaaaggataaaacaagaaatgaaagcaagagaagctcagagtcgggcagctgaagagcatggagatttggctcttatcactgttgaagctccccaggttactgtgagtgaaaaagtatcattgaggccaccaatgttgcaggttgttcgtttagcctcctttcagtacgctccatcgataccaccatttatagtaccaaagcaatccaagttcgatggagatgattcagtgtttcagaaagaactggatgacagaaggtatgctgaagttgctgtcgctggaggaggtgtgtctgttgcagtaactcgcttccctcctgaacagaagagacctatcggacctcttgttgtggttggtgtaagagatggagttctctggcttgttgacaggtatatgtgtgcacatgccttatcactcagccatcctggtataagatgccgttgccttgcagcatatggggaccctgttagtgctgtgaaatgggcaacgagacttggcagagagcatcacgatgacctggctcagtttatgctgggtatgggctatgccactgaagctctccatttgcctggaatatctaagaggctggagttcgaccttgcaatgcagagcaatgacctgaaaagagcacttgcttgtctattaacaatgagcaatagccgagatgtgggacaagaaacagctgctgctgatgccactgacgttacccagattcttagtttggcagtagctaagcaagctaagcaggaaagtcttacagatgccgtgcagggaatagtgaaattcgtcaaggagttttttgaccttattgatgcagcagatgccactggtcaatctgacattgctcgtgaagttttaaagagattagcggctgcagcttctgtaaagggagcactccatggacaaatgctgcgaggcctggcactccgtcttggaaatcatggggagcttactagattgtcgggtctggtaagcaatttgattacagctggccatggacgcgaagcagcatttgctgccgcagttctgggagataatgccctaatggagaaagcatggcaggacacaggaatgttagctgaggctgttttacatgctcaggcccatggtcgtccatcattaaggaacttggttataacatggaacaagatgctacaaaaggaactggatcacacaccgactgtaaaaaccgatgccgccgccgcattcttggcttctctcgaggatccaaagctcacaagcttgggggaaactgagaaaaagcctcccatcgaaatacttcctcctgggatgcctcccctatctgcacctccgatcgtgattaaaaaggctggagcaaaacctggtctccctaatgcagcaaaggcgtcaaatgggcctataggtgctcctatggctcaaggtgctcccatggctcatggtactcctgggccacaaggagtccccatgaatcaagttactccatcacagggcagtcatgacgaggcaaggccatcagatgctacagtggctgatgcagctgccgcggttgcagaaggtacagcagctcccccggctgcagaaggtacatcagctcctccggctgcagaaggtacagcaactcccagcagtgaggaagctaaagcagcacctggtaatgaggaaggcacatcaaatccaatcaacgaggaagccacagcagctgcagtttcagttgctgcaggcagccctgactctgctgctgctcctgcagctgatactagctcggacgcacctgctgttaatcccacggaagataccgtctctgccccctcaacggaggcaccaccagagttgacggataagccatcttcagcagaggcatcgttgccacctccacccagtgtttctggtgtataaatatttctgattctcttttagcagtgtgccgaattttctgtattctggttcgttcgttccaccacgcgcgctggtataggtatttgttgcctgtggtatacagatttcgcagacgccaggcagtatgtgagtagctttgtacatctgctgtctgcgtctcacgagaacgtgctaccgttgtgtcactgacactgtgtggccatatcttatgttgttggtgaccacagttcaattcttgcttgatgagttgatcgagctgcaccaccaatatccctgtcttggacgaccgattcgtctcttgcggaatctaacgtaactgctgaggttcgcaaaatgtcttgttgggtcatctaacttgggaatctgtgcgtaccgaaagcgctatgtcggcccgtgctgcagtgcaagtaccacgttttggccagtcgcccgttggtttgccctctatccattaagtaatctgattggtcgaggcgtgtcaaaagcca

SEQ ID NO: 32543 - DNA, 727 bp, Zea Mays
ggcgagatgctccgcctgcgggcgttccggccgacgagcgacaaagtcgtgaagatccagctccaccctactcacccctggctcgtcaccgccgacgccaacgaccgcgtctccgtctgggactgggagcaccgccaggtgatctatgagctgaaggcaggtggcgttgatgagcgtcgcttggttggagcgaagcttgagaaacttgctgagggagatgattcaaaaggaaagcccaccgaggctattcgagggggaaggtttccttttatgatgatgatgttcgcttttggcaacattggcgtaattgctctgctgctgctgaggccccaactgcagtcagtcagcagtcttccacgttcattgcacctgcaccttcgacacgaggaaggcactttgttgtcatttgttgtgagaacaaagtcatatttttggacttggtgactatgcggggccgtgatgttcctaaacaggagcttgacaataggtcacttctttgtatggaattcctctctaggacatcttctagcgatgctcctcttgttgcctttgggtcatctgatggtgtcatcagggtcctttcgatgttgacatggaaggtatacgggtggacataaaggagcaatagcttgcttaatgacgtacatgtctgcagctggtgaggtacatttagtttctggtggcagcgatggcctgctgatattatggagtgctgatcatatccatg

SEQ ID NO: 32544 - DNA, 3670 bp, Zea Mays
ccgtgcaccaaaccttgatattctaacttgtgtcaaggactcacatatttgggccatagagcacccaacttattctgctttaacaagaccgctctgcgagctgtcatcactagttcccccacaggtccttgcactgcataagaaactgaggggtttactgcatggtggcacaccccttgcagccgcatcttgttgctactggaactaatattggtatcatattaagcgagtttgacccaagagcacttccagctattgctcctttaccaacaccaacaggcaacaaggaacattctgctgtttacatagttgaaagagaacttaagttactgaatttccaattgtcaaacacagcgaatccatcccttgggaatgctggtgttgcatctgatgcaggaaggtcaatgaacaattcaatagaacagttgatagtaaagcagaccaagaagcatatcagcactcctgctccccacgattcctattcggtcctttcagttagcagttctggaaagtatgttgcaattgtatggccagatatcccttcttttgctgtatacaaagcaaatgattggtcagttgttgattcaggcacagggaagctttttgcctgggacacttgtcgagacagatatgctctggtagagagtgcattggccccaagaatgccacttgttgttaaaggtggttcttctaaaaaggcaaaagaagcagcagcagctgcagctcaagcagcagctgcagcagctagtgctgcttctgctgccacagtgcaagtgcgtatcttattagatgatggaacagcacatgttttgcagagatcgattgatggtcgtaatgaaccagttattggattgcatggtggtgctttacttggtgtcacataccgtacatctcgtagaatcagtcctttgacagcaacagctatatcaactgttcaatcgatgcccttatcaggttttggtggaagtggatcatcttttgcatctgatgatccattttcctctaaggaagggcctccacaaaatttccaactgtacagctgggagacctatcagcctgttagtggcctacttgcacaacctgagtggactgtgtgggaccaaactgttgagtattgtgcatttgcttatcagcagtatatagtgatttcttccttgcggccccaatttaggtaccttggagatgtttcaattccctttgcaactggtgccgtttggcatcgaaggcagttatttgtgtctacaccaacaacaattgagtgtgtctttgttgatgctggagtggcagcgattgacattgaaacaaaaaggataaaacaagaaatgaaagcaagagaagctcagagtcgggcagctgaagagcatggagatttggctcttatcactgttgaagctccccaggttactgtgagtgaaaaagtatcattgaggccaccaatgttgcaggttgttcgtttagcctcctttcagtacgctccatcgataccaccatttatagtaccaaagcaatccaagttcgatggagatgattcagtgtttcagaaagaactggatgacagaaggtatgctgaagttgctgtcgctggaggaggtgtgtctgttgcagtaactcgcttccctcctgaacagaagagacctatcggacctcttgttgtggttggtgtaagagatggagttctctggcttgttgacaggtatatgtgtgcacatgccttatcactcagccatcctggtataagatgccgttgccttgcagcatatggggaccctgttagtgctgtgaaatgggcaacgagacttggcagagagcatcacgatgacctggctcagtttatgctgggtatgggctatgccactgaagctctccatttgcctggaatatctaagaggctggagttcgaccttgcaatgcagagcaatgacctgaaaagagcacttgcttgtctattaacaatgagcaatagccgagatgtgggacaagaaacagctgctgctgatgccactgacgttacccagattcttagtttggcagtagctaagcaagctaagcaggaaagtcttacagatgccgtgcagggaatagtgaaattcgtcaaggagttttttgaccttattgatgcagcagatgccactggtcaatctgacattgctcgtgaagttttaaagagattagcggctgcagcttctgtaaagggagcactccatggacaaatgctgcgaggcctggcactccgtcttggaaatcatggggagcttactagattgtcgggtctggtaagcaatttgattacagctggccatggacgcgaagcagcatttgctgccgcagttctgggagataatgccctaatggagaaagcatggcaggacacaggaatgttagctgaggctgttttacatgctcaggcccatggtcgtccatcattaaggaacttggttataacatggaacaagatgctacaaaaggaactggatcacacaccgactgtaaaaaccgatgccgccgccgcattcttggcttctctcgaggatccaaagctcacaagcttgggggaaactgagaaaaagcctcccatcgaaatacttcctcctgggatgcctcccctatctgcacctccgatcgtgattaaaaaggctggagcaaaacctggtctccctaatgcagcaaaggcgtcaaatgggcctataggtgctcctatggctcaaggtgctcccatggctcatggtactcctgggccacaaggagtccccatgaatcaagttactccatcacagggcagtcatgacgaggcaaggccatcagatgctacagtggctgatgcagctgccgcggttgcagaaggtacagcagctcccccggctgcagaaggtacatcagctcctccggctgcagaaggtacagcaactcccagcagtgaggaagctaaagcagcacctggtaatgaggaaggcacatcaaatccaatcaacgaggaagccacagcagctgcagtttcagttgctgcaggcagccctgactctgctgctgctcctgcagctgatactagctcggacgcacctgctgttaatcccacggaagataccgtctctgccccctcaacggaggcaccaccagagttgacggataagccatcttcagcagaggcatcgttgccacctccacccagtgtttctggtgtataaatatttctgattctcttttagcagtgtgccgaattttctgtattctggttcgttcgttccaccacgcgcgctggtataggtatttgttgcctgtggtatacagatttcgcagacgccaggcagtatgtgagtagctttgtacatctgctgtctgcgtctcacgagaacgtgctaccgttgtgtcactgacactgtgtggccatatcttatgttgttggtgaccacagttcaattcttgcttgatgagttgatcgagctgcaccaccaatatccctgtcttggacgaccgattcgtctcttgcggaatctaacgtaactgctgaggttcgcaaaatgtcttgttgggtcatctaacttgggaatctgtgcgtaccgaaagcgctatgtcggcccgtgctgcagtgcaagtaccacgttttggccagtcgcccgttggtttgccctctatccattaagtaatctgattggtcgaggcgtgtcaaaagcca

SEQ ID NO: 32545 - DNA, 3652 bp, Zea Mays
ttctaacttgtgtcaaggactcacatatttgggccatagagcacccaacttattctgctttaacaagaccgctctgcgagctgtcatcactagttcccccacaggtccttgcactgcataagaaactgaggtaggtttactgcatggtggcacaccccttgcagccgcatcttgttgctactggaactaatattggtatcatattaagcgagtttgacccaagagcacttccagctattgctcctttaccaacaccaacaggcaacaaggaacattctgctgtttacatagttgaaagagaacttaagttactgaatttccaattgtcaaacacagcgaatccatcccttgggaatgctggtgttgcatctgatgcaggaaggtcaatgaacaattcaatagaacagttgatagtaaagcagaccaagaagcatatcagcactcctgctccccacgattcctattcggtcctttcagttagcagttctggaaagtatgttgcaattgtatggccagatatcccttcttttgctgtatacaaagcaaatgattggtcagttgttgattcaggcacagggaagctttttgcctgggacacttgtcgagacagatatgctctggtagagagtgcattggccccaagaatgccacttgttgttaaaggtggttcttctaaaaaggcaaaagaagcagcagcagctgcagctcaagcagcagctgcagcagctagtgctgcttctgctgccacagtgcaagtgcgtatcttattagatgatggaacagcacatgttttgcagagatcgattgatggtcgtaatgaaccagttattggattgcatggtggtgctttacttggtgtcacataccgtacatctcgtagaatcagtcctttgacagcaacagctatatcaactgttcaatcgatgcccttatcaggttttggtggaagtggatcatcttttgcatctgatgatccattttcctctaaggaagggcctccacaaaatttccaactgtacagctgggagacctatcagcctgttagtggcctacttgcacaacctgagtggactgtgtgggaccaaactgttgagtattgtgcatttgcttatcagcagtatatagtgatttcttccttgcggccccaatttaggtaccttggagatgtttcaattccctttgcaactggtgccgtttggcatcgaaggcagttatttgtgtctacaccaacaacaattgagtgtgtctttgttgatgctggagtggcagcgattgacattgaaacaaaaaggataaaacaagaaatgaaagcaagagaagctcagagtcgggcagctgaagagcatggagatttggctcttatcactgttgaagctccccaggttactgtgagtgaaaaagtatcattgaggccaccaatgttgcaggttgttcgtttagcctcctttcagtacgctccatcgataccaccatttatagtaccaaagcaatccaagttcgatggagatgattcagtgtttcagaaagaactggatgacagaaggtatgctgaagttgctgtcgctggaggaggtgtgtctgttgcagtaactcgcttccctcctgaacagaagagacctatcggacctcttgttgtggttggtgtaagagatggagttctctggcttgttgacaggtatatgtgtgcacatgccttatcactcagccatcctggtataagatgccgttgccttgcagcatatggggaccctgttagtgctgtgaaatgggcaacgagacttggcagagagcatcacgatgacctggctcagtttatgctgggtatgggctatgccactgaagctctccatttgcctggaatatctaagaggctggagttcgaccttgcaatgcagagcaatgacctgaaaagagcacttgcttgtctattaacaatgagcaatagccgagatgtgggacaagaaacagctgctgctgatgccactgacgttacccagattcttagtttggcagtagctaagcaagctaagcaggaaagtcttacagatgccgtgcagggaatagtgaaattcgtcaaggagttttttgaccttattgatgcagcagatgccactggtcaatctgacattgctcgtgaagttttaaagagattagcggctgcagcttctgtaaagggagcactccatggacaaatgctgcgaggcctggcactccgtcttggaaatcatggggagcttactagattgtcgggtctggtaagcaatttgattacagctggccatggacgcgaagcagcatttgctgccgcagttctgggagataatgccctaatggagaaagcatggcaggacacaggaatgttagctgaggctgttttacatgctcaggcccatggtcgtccatcattaaggaacttggttataacatggaacaagatgctacaaaaggaactggatcacacaccgactgtaaaaaccgatgccgccgccgcattcttggcttctctcgaggatccaaagctcacaagcttgggggaaactgagaaaaagcctcccatcgaaatacttcctcctgggatgcctcccctatctgcacctccgatcgtgattaaaaaggctggagcaaaacctggtctccctaatgcagcaaaggcgtcaaatgggcctataggtgctcctatggctcaaggtgctcccatggctcatggtactcctgggccacaaggagtccccatgaatcaagttactccatcacagggcagtcatgacgaggcaaggccatcagatgctacagtggctgatgcagctgccgcggttgcagaaggtacagcagctcccccggctgcagaaggtacatcagctcctccggctgcagaaggtacagcaactcccagcagtgaggaagctaaagcagcacctggtaatgaggaaggcacatcaaatccaatcaacgaggaagccacagcagctgcagtttcagttgctgcaggcagccctgactctgctgctgctcctgcagctgatactagctcggacgcacctgctgttaatcccacggaagataccgtctctgccccctcaacggaggcaccaccagagttgacggataagccatcttcagcagaggcatcgttgccacctccacccagtgtttctggtgtataaatatttctgattctcttttagcagtgtgccgaattttctgtattctggttcgttcgttccaccacgcgcgctggtataggtatttgttgcctgtggtatacagatttcgcagacgccaggcagtatgtgagtagctttgtacatctgctgtctgcgtctcacgagaacgtgctaccgttgtgtcactgacactgtgtggccatatcttatgttgttggtgaccacagttcaattcttgcttgatgagttgatcgagctgcaccaccaatatccctgtcttggacgaccgattcgtctcttgcggaatctaacgtaactgctgaggttcgcaaaatgtcttgttgggtcatctaacttgggaatctgtgcgtaccgaaagcgctatgtcggcccgtgctgcagtgcaagtaccacgttttggccagtcgcccgttggtttgccctctatccattaagtaatctgattggtcgaggcgtgtcaaaagcca

SEQ ID NO: 32546 - DNA, 2860 bp, Zea Mays
ttcagcttaaagaacttaaattgcatttcatagttattggattgcatggtggtgctttacttggtgtcacataccgtacatctcgtagaatcagtcctttgacagcaacagctatatcaactgttcaatcgatgcccttatcaggttttggtggaagtggatcatcttttgcatctgatgatccattttcctctaaggaagggcctccacaaaatttccaactgtacagctgggagacctatcagcctgttagtggcctacttgcacaacctgagtggactgtgtgggaccaaactgttgagtattgtgcatttgcttatcagcagtatatagtgatttcttccttgcggccccaatttaggtaccttggagatgtttcaattccctttgcaactggtgccgtttggcatcgaaggcagttatttgtgtctacaccaacaacaattgagtgtgtctttgttgatgctggagtggcagcgattgacattgaaacaaaaaggataaaacaagaaatgaaagcaagagaagctcagagtcgggcagctgaagagcatggagatttggctcttatcactgttgaagctccccaggttactgtgagtgaaaaagtatcattgaggccaccaatgttgcaggttgttcgtttagcctcctttcagtacgctccatcgataccaccatttatagtaccaaagcaatccaagttcgatggagatgattcagtgtttcagaaagaactggatgacagaaggtatgctgaagttgctgtcgctggaggaggtgtgtctgttgcagtaactcgcttccctcctgaacagaagagacctatcggacctcttgttgtggttggtgtaagagatggagttctctggcttgttgacaggtatatgtgtgcacatgccttatcactcagccatcctggtataagatgccgttgccttgcagcatatggggaccctgttagtgctgtgaaatgggcaacgagacttggcagagagcatcacgatgacctggctcagtttatgctgggtatgggctatgccactgaagctctccatttgcctggaatatctaagaggctggagttcgaccttgcaatgcagagcaatgacctgaaaagagcacttgcttgtctattaacaatgagcaatagccgagatgtgggacaagaaacagctgctgctgatgccactgacgttacccagattcttagtttggcagtagctaagcaagctaagcaggaaagtcttacagatgccgtgcagggaatagtgaaattcgtcaaggagttttttgaccttattgatgcagcagatgccactggtcaatctgacattgctcgtgaagttttaaagagattagcggctgcagcttctgtaaagggagcactccatggacaaatgctgcgaggcctggcactccgtcttggaaatcatggggagcttactagattgtcgggtctggtaagcaatttgattacagctggccatggacgcgaagcagcatttgctgccgcagttctgggagataatgccctaatggagaaagcatggcaggacacaggaatgttagctgaggctgttttacatgctcaggcccatggtcgtccatcattaaggaacttggttataacatggaacaagatgctacaaaaggaactggatcacacaccgactgtaaaaaccgatgccgccgccgcattcttggcttctctcgaggatccaaagctcacaagcttgggggaaactgagaaaaagcctcccatcgaaatacttcctcctgggatgcctcccctatctgcacctccgatcgtgattaaaaaggctggagcaaaacctggtctccctaatgcagcaaaggcgtcaaatgggcctataggtgctcctatggctcaaggtgctcccatggctcatggtactcctgggccacaaggagtccccatgaatcaagttactccatcacagggcagtcatgacgaggcaaggccatcagatgctacagtggctgatgcagctgccgcggttgcagaaggtacagcagctcccccggctgcagaaggtacatcagctcctccggctgcagaaggtacagcaactcccagcagtgaggaagctaaagcagcacctggtaatgaggaaggcacatcaaatccaatcaacgaggaagccacagcagctgcagtttcagttgctgcaggcagccctgactctgctgctgctcctgcagctgatactagctcggacgcacctgctgttaatcccacggaagataccgtctctgccccctcaacggaggcaccaccagagttgacggataagccatcttcagcagaggcatcgttgccacctccacccagtgtttctggtgtataaatatttctgattctcttttagcagtgtgccgaattttctgtattctggttcgttcgttccaccacgcgcgctggtataggtatttgttgcctgtggtatacagatttcgcagacgccaggcagtatgtgagtagctttgtacatctgctgtctgcgtctcacgagaacgtgctaccgttgtgtcactgacactgtgtggccatatcttatgttgttggtgaccacagttcaattcttgcttgatgagttgatcgagctgcaccaccaatatccctgtcttggacgaccgattcgtctcttgcggaatctaacgtaactgctgaggttcgcaaaatgtcttgttgggtcatctaacttgggaatctgtgcgtaccgaaagcgctatgtcggcccgtgctgcagtgcaagtaccacgttttggccagtcgcccgttggtttgccctctatccattaagtaatctgattggtcgaggcgtgtcaaaagcca

SEQ ID NO: 32547 - DNA, 2097 bp, Zea Mays
gtcaatctcgccaagctcccaccggacaaacatcccgcctctgaaaccgagcatgatctgcaggggggcacgacccgggcactcgtcaaagacagctcaatttttacagctcggcagcagggcaagcagcgggcgatgaccccccccccccccccccccctctcccaaaacagaggtcaagcgggagggcattttcttaatgacgggggcttacgcgattaatattgacagggacagacatgttctcttgcgagacccacttggcagtattattgaaaccggccgcgcacctactccctgccttcacgcggccaccggcttattcaagagcaccaaaaggggtttcggcatggatggatagcacacagcgagcgagcgagagcggtgagcccggccaccagcgccggaggccgtcgtcgtcttactagccgacgctcgacttgggcatgaattgctagccgcgcgggtgagagattgctaggtagccagctaggtacggtgtggggagttgaatcggaggtctgccgctcgaggcggcggcggcagaaggccggtaggatgaagaagctccactggctggtgcggttcctgttcgggccggtgccggtctacttctcggcgctggccatcctcatcgtgctcaccaacgcgcagtacttcgggctggtgggcgtcggcgtggcgccgcgcaccgcgaagctggcctcctcggcgcccgtggtcagcgtcatgaagtactgcgacatcttccgcggcgagtgggtgccggacgcggaggcgccctactacaaccacaagacgtgccacatgatccaggagcaccagaactgcctcaagtacggccgccccgacctgggcttcctcaagtggcggtggcggccctccggatgcgagctgccgcgcttcgacccgctgcagttcctgcagttcgcccgcgggaagtcgctggccttcgtcggggactcgctggcgcggaaccacatgcagtcgctgctctgcctcctgtcccaggtggcgtatcccaaggacctgtcggcgaacccgtcggaccagaacaaggtgtaccactaccgggcgtacaacttcaccatcagcatgttctggtcgccgttcctggtgcgcgcccgggagcccgaccacgacggccccgcgcacacgggccactggagcctctacctggacgagcccgacgacaagtgggtgtcccagatgccccgcttcgactacgtgctggtgtcggcggccaactggttctcccgcccctccctcttctacgagcggcggcgcctcgtcgggtgcagcttctgcagccgccagtacggcgtgcccgacctgacgctctactactcgcagcgccgcgcgtggcgcgtggcgctgcgcgccatcaacgacctggagcgcctgcgagggcgcgtcatcgtgcgcatgctctccccgatgtcgcacttcgagaacgggacctgggaccacggcggcgactgcaggcgcacgcagccgctgcgggcgaaccagaccgccatggagggccgcgacctgcacttctacaccgcgcagatggaggagttccgcgccgcggagaaggccgccgccgagaaggggcggcgcctgatgctcatggacgccacggcggcgatgctgatgcggcccgacggccaccccagccgctacgggcactggcccaacgagaaggtgcagctctacaacgactgcatccactggtgcctcccgggacccatcgacatctggaacgacatgctcttccagatgctcctcgcctagcagcaagcagcaaagattaaaaaaaaaactcagcaattcggtcgccggtaaccgtgcacagattggccttcttttttttgccttgtttcgtttttttaaaaaaagaagaaaatggtgcaattttgacaagcaaggattcgaaattcgccggtaaccctccgagatcatccgttccctcctctgcttgttctgtggtgtcgaaattgctccctgtctgtcggtcggcgccgtggaaaggggcaaagcaaacaaccaaaagggggccgctcgcagtcgcagcggtggtgcctttgattctgttgtagagtagtatatgac

SEQ ID NO: 32548 - DNA, 216 bp, Zea Mays
ggtcatgtcggaggacaggtgtcggcgagaggaacaggggacgcgtgcggcccgtgcagcaccccgtcggcgatcaccttgtacaccgcctccgtcgggtgcgtcccgtcccaggacccgtacgtggacgggtccttgcagacggagcacccgggcctgccacacggcacggtctggttcccgcagcaagtccgcagagcgtttgtgaaccctgca

SEQ ID NO: 32549 - DNA, 1525 bp, Zea Mays
ggccgagatgatggcgaagttggcgccgttctggaagtcccctggcgccgtgcccgcctggatcgccgtcaccttcgccagcccgaactcttccgctgcattgcatgcaaccacaccagttactactcccaccggtttcctattagttgtcgtttaggacaacgacacggtctccaaaatataactttgaccaatgttttttgttaaaatacaaatgaactcttaatacatttagacttttataaaagtattttttatgacaaattggtgcatataaatattaggttccaaaactaaatatcaaaatagttatttgtagtcaaaattttataagtttgactcgaaccttatccaaaacgacaactaataggaaaccggagggagtatttggcttggcgtggagaagaagaccatcatgcatggattgcttttttacaagttattagtacagtacaaaatttgctttccgcgactacttactaggtgcttcgaaatgcgcgtcgcacgaactattagaaagtagcaacaataaaggcaggtcaactggagtagccttcacctggtgctgttgctgctgccgccaattttgtgcatgtctaggaaagcatgggccaatgatttgcatgtcgccagcctgcaacgcaacacctttgaactgtgtgatgggttccccgtctcggacggaacggaaccaagttcttcctcctcctgtagaggaagatgggtgcctggcttcttgctagtgcctctaaattcattgtgcatgcatagatcgaccctacctcataaattaaacacgcatttttttactcgaccatggttgccgctaatcccaatttaaagcgcgcagctgtaccacttctactactcacgcaacgcaagcgcgcactttttacgactcctgtacctggacaggacaggactcgctcgcgcaagtttgaggcgcaacagaaacgaactgaacgaactgaactggcactcagacaaaaccacgcatgtcgttctggggttctagctcataaatactagactagagggagaatcaaatcaaggaggaggcaaaaaggagctaataattagactttctatctacttttcacgttactgatacacagcgccacacagggcacgcgagagcagtctgtacgctgtactgcctgctagctaggtttgtacatacgttgaatcagtccgccgcggaacgaagaacgctacgcgtgagtgtgcacagctgtggaccaagttcagaagccactcccaattcaatcatgaatattgaatcacaaatgaagagcgaaagaacagcgcgatggaatttactcgtatggggtccagcaggcagcagcagttatgctcattttgcaaaccagcgtgtaacttggaaagaggctcgagcatgcaaaaggttcagagttcagacggaggcagctttagcctgctcaccgatgaagtcgatgacgaggcgtccgtcgctggcgcggccggtaggtttgccgaagaacgtcctcccgtacggcggcgcgcc

SEQ ID NO: 32550 - DNA, 558 bp, Zea Mays
ctgagtgagtctcaactctcaagtgcctgaagcaagcagcagaagcagggagagagagaaagatatatagtagtagaacagagaagttcacgtaggtggtggagagctactgctactaggagggcatggcatgtggcatgtgatgggcgaatggagtgaacagaagagaacagctagctagtgcgcagccggtatttttttcttgagccgagcgtctgtggcgacctccgcacaccatgaattggggcatggatgccaggtagccgtcgtcgtccagggattccaagcccaaggacgcaatctaatcgacaaggtagcgaaagacacagctagcactgtgcctctgcgccgtacgcatacacacacacacaaaaaaaaggagagagcgatgcatctgaaatgaatcatcacactacctgaacttctttctgagcattcctgacttctcctgtgcatcgtcgcacaacgacagtacaagtcatcccttcttcgtttttaacagcacgatgtccatgaccactgcgccaacagaacaatagcatgcagcgccgggagcgg

SEQ ID NO: 32551 - DNA, 1526 bp, Zea Mays
gagatctcttcctgtttgcacaatggtgctcgttcgagatctccccgcgcaatggtgctcgttcgagatctccctgtacgcgatgctggactcgctgccggactggctacgaagggcaccgcgtctgccacggctgcccccgcgtcggtccccgccgcccctgcgccgagcacggcccaaactctatctcaagctcgccgcagaacgacaggacccaaaccccaattccacaatgaggccgtcgctgatgagatccacctcccagctcctccgccgccggagctactcctccgcatccgggcagcccgagcggaaggtggccatcctcggggcggcggggggcatcgggcagccgctgtcgctgctcatgaagctcaacccactcgtctcctccctctcgctctacgatatcgccggcaccccaggtgtcgcggccgacgtctcccacatcaactcccccgccctggtgaagggtttcatgggtgatgagcagcttggggaagcgctagagggctcggacgtggtgatcataccggccggcgtcccgaggaagcccggcatgaccagggacgacctattcaatatcaacgctggcatcgttaagaacctcagcaccgccatcgccaagtactgccccaatgcccttgtcaacatgatcagcaaccctgtgaattcaactgtaccgattgctgctgaggttttcaagaaggctgggacatatgatgagaagaagttgtttggcgtgaccacccttgatgttgttcgtgctaagactttctatgctgggaaggctaatttaccagttaccgatgtgaatgtccctgttgttggtggtcatgcgggtatcactatcctgccgttgttctcacaggccacccctgcaaccaacgcattgtctgatgaagacatcaaggctctcaccaagaggacacaggatggtggaactgaagttgtcgaggcaaaggctgggaagggctctgcaaccttgtccatggcgtatgctggtgctgtttttgcagatgcatgcttgaagggtctcaatggagttccggatattgttgagtgctcttttgttcaatcaactgtaacagagcttccattctttgcatctaaggcttgggaagaatggagttgaggaagtgcttggattaggtgagctgtcggactttgagaaagaagggttggagaagctcaagagcgagctcaagtcttcgattgagaagggtatcaagtttgcaaatgataactagataaggccattttgcagattatagcagcaattgaaacctttagtagcaattgaaacctttagttgcgggatcttctgatttcattctacccttttctgtccctttttgtgagggagtggaaggtattacaataaaaaacctgatgggcaaagcttacaagagggatttattccagcaggcaggcacataacttatgtcaagttttgtactgaaccagtcgtatatgagctttctgctgccttttataatcgacggtgctgtcttgtgtgtgtattg

SEQ ID NO: 32552 - DNA, 958 bp, Zea Mays
tgctggtgcactggatgtttggaagttgctcagatatgatgaaccaatctctcttcttggttggagaaatcgggggcaatgactacaacggacctcttctttctggagttcccatggagaaaatccgtgccatcactccgagtgttgttgcaaaaatttcttctacaatcagcgaattgattcggctaggagccaagactcttgtggttccaggaaacctcccaattggatgcatcccagactatctgatgatattcaagagcaataaggaagaggattatgaaccacagacaggttgtcttaggtggatgaacgagttctcacagtatcacaacaaggttcttgtggagcagctcaagaagcttcgcaagcttcatcctggagcaaccatcatctatgctgattactatggagctgctatggaaattttcctttcccctgaacaatatgggatcgaatatcccctagtggcttgctgtggtggagaaggaccctacggtgtgtccccatctacaggctgtggattcggagaatataagctgtgcgataatccagagaagtatggatcatgggatggcttccatccatcagaatctgcatacagggccattgctatgggcctgctactaggttcctacacaaggccgtcgatcacttccaccaccacttcatgtccacagcttatggagctcggctcttctgctgaatacaaacccctctacgacctgtagtaattttgtaattatattttattgtgtgtactccctcgcccagttctatcagtaccattttgtaagtatttgtactttgtaacttgtaactaataacttatcaaactagctactacatatttgttagagtgcacggttactcggttagattcagattcgtttgaaactgaaaatgcggaagtataaacaaatagaagaaaatacataagtgagaccaataccgaggc

SEQ ID NO: 32553 - DNA, 1035 bp, Zea Mays
aaaagacctagcagcaggcaacagctagcattctgcagtctgcattccgcaaggcaaagcattcgtcccaccttgccaagggaacaagcactagtgcccaggttgctcagatatgatgaaccaatctctcttcttggttggagaaatcgggggcaatgactacaacggacctcttctttctggagttcccatggagaaaatccgtgccatcactccgagtgttgttgcaaaaatttcttctacaatcagcgaattgattcggctaggagccaagactcttgtggttccaggaaacctcccaattggatgcatcccagactatctgatgatattcaagagcaataaggaagaggattatgaaccacagacaggttgtcttaggtggatgaacgagttctcacagtatcacaacaaggttcttgtggagcagctcaagaagcttcgcaagcttcatcctggagcaaccatcatctatgctgattactatggagctgctatggaaattttcctttcccctgaacaatatgggatcgaatatcccctagtggcttgctgtggtggagaaggaccctacggtgtgtccccatctacaggctgtggattcggagaatataagctgtgcgataatccagagaagtatggatcatgggatggcttccatccatcagaatctgcatacagggccattgctatgggcctgctactaggttcctacacaaggccgtcgatcacttccaccaccacttcatgtccacagcttatggagctcggctcttctgctgaatacaaacccctctacgacctgtagtaattttgtaattatattttattgtgtgtactccctcgcccagttctatcagtaccattttgtaagtatttgtactttgtaacttgtaactaataacttatcaaactagctactacatatttgttagagtgcacggttactcggttagattcagattcgtttgaaactgaaaatgcggaagtataaacaaatagaagaaaatacataagtgagaccaataccgaggc

SEQ ID NO: 32554 - DNA, 1362 bp, Zea Mays
ggagtactatattcgaagaaattgatgttgcccttggacagatccagcaaccactttcgttggagttgagttagattggacagaccgtttcgattgggccccgccttatcaatcgccaaaagtcagacgccgattggctgccgcatttattatattggtttggtacttggtagtttggtgacgctgaggcctcgtccccgatcagacttgttcggcctcttcgacggcgtgcccgtctccccgggctcattcgccatgcattcctcagcctccgcgagaggaggacgagggctcctcttgccggcggctgcggcggcggttgtggtgctactgttgggtgcagtggcgccagcggcgggttgctatccgcgcgtgttcaacttcggggactctctggcggacacgggcaactacccgttcgtctatggcaacgactcagccaagctccggccaccctacggcgagaccttcttccaccgcgccaccgggcgcgcctccaacgggcgcctcgtggtcgacttcatcgcggacacgctcggcctcccgttcgtgcgaccgtatctgagcggacggagcgcggaggacttcgcgggcggggccaacttcgccgtgggcggcgccacggcgctcagcccggacttcttccgtgcaagggggttccacaacatgggaaaccgagtggacctcgacatggagatgaagtggttccgcggcctgctcgacctactctgccccggcaacctcgccggttgctcggatatgatgaaccaatctctcttcttagttggagaaatcgggggcaatgactacaacggacctcttctttctggagttcccttcgaggaaattcgcgccatcactccgagtgttgttgcgaaaatttcttctacaatcagcgaattgattcagctaggagccaagactcttgtggttccaggaaaccttcctattggatgtgtcccaaaatatctgatgatattcaagagcaataagaaagaggattatgatccacagacaggttgtcttagatggatgaacgagttctcacagtaccacaacaagcttcttgtggagcagctcaagaagcttcgcaggctccatcctggagtaaccatcatctatgctgattactatggagctgctatggaaatattcctttcccctgaacgatatgggatcgaatatcccctagtggcttgctgtggtgcagaaggaccctacggtgtgtccccaactacaagctgtggattgggagaatataagctgtgcgataatccagaaaggtatggatcatgggatggcctccatccaacagaatctgcatacaaggtcatcgctatgggcctgctactaggtcaaatt

SEQ ID NO: 32555 - DNA, 1438 bp, Zea Mays
tgacaatcagggaaatgtcatacaaccaaatgcgtctactttcacttggcacaattgctgtgcacaagcaatccactgctctgctaaggaagctattagtctattactatggttgctcagacatcatgagccaatccctcttcatagtcggagaaattgggggcaatgactacaacctacctatgctctccagagtgccgattgaaaagatccgctcattcacaccaaacgtcattgccaaaatttcttcaacaatcaccgagttgattgggctaggagccaagactctggtagttcctgggaacctcccaatcgggtgcgtcccgaaatatcttctgatattcaagagtgatgacaaagaagattatgagccagagacaggttgcctcagatggatgaacgaattttcagagtaccacaacaagcttctcttggaggagctggagaagctgcgtaagactaatcctaccgtgactattatctatgctgactattatggagctgcaatggaaattttccgttcccctgaacgatttggtatcgaggaacctttggtggcttgctgcggtggagaaggaccctatggtgtgtccctttctacagcctgtggatacggagattacaaggtgtgtgacaatccagacaagtatggctcgtgggatggtttccatccatcggaagctgcatacaaagccattgcaatgggccttttgcgcgggacatacacacaaccatctattgcttccaccaccagttcctgtccacagctcactgagctcggctcttctgttgaatacaagagctgcggtactgtactgcacttctcggctgtggcccaagcgattggttgggttttgttttaccttctctttttcagtcacagtgctagaattaggaattgaaaggtggtgcttttaccatccatagaacaagaggaaccacagaattatacttgggggtcccgaaactcatcggtacctctcaatgacttcaaaatggctgattaagaggagtggatgccaattctttgatcatattggctggtacagcgtagatgctatctacttcatttccatttcttgtaaatgtaaccatcagttcttccgatgcacgtgatacttagctgagcttctgcactatcaggaagtaagcagctttttagtatttcagagtcttcttgctgtcactgtctttcccttggcaactcccttattttgtgctcaatcgcacaatgagcaatttctattcactattatgatcctctcacaggtgtaacggtgggaaatcaaaaactcaaataggccaccctgaatcaactatcacacattaactcgactaagccagcgaaggaggggcttcccctttatattcccgtctgcattacactgcaactatcaacagattaccaacaaagagaagaacagatacaagaatgaag

SEQ ID NO: 32556 - DNA, 3548 bp, Zea Mays
cgccgccgctgcctgcggggtgcggccgtgcgggcctgcggggtgctggcgctgcgccgctgccaacctgcccccactgcccgtgactgctgactagtgactagtctctcagtagccgctccataaaatggggccgagcgcgctcccacacccagactagttccgctgaccgcttgaactctcctccctcgcccgcgcgtctccgccgccccaccggccaccgcccgcgcctccgccgcggcagctgtccaaaagctgaaaatagatagaatcacgagggggggattgcctagacaacgatccttagttaatcaaacacgggctgccagattcgggggggcgttcgcgttcctaccctctcatcactctccccgtaaaaccccggctgggtttatctcatcgccgccgggcggcgagcggtgggaggcaatggcagggtgggggccctccaggctgccgacgtgcgggccgtggggccgcggcgtggcgctggagagggagctgtcgcgggacggcagccactacagcatctccagcggcatcctgccgtcgctcggcgcgcgcagcaaccgccgcgccaagctcaggcccttcatcgtctcgccctacgaccgccgatacagatgctgggagacttttctcataattcttgtgatatactctgcatgggtttccccatttgagtttggcttcattcggaaaccggcgggcgccctagctgcagtggacaatgtcgtgaatgcgttcttcgcagtggacatcatcctgaccttctttgtagcttacttggatagaatgacatacttgcttgaagatgatccaaaaaggatagcttggcggtatactaccagttggtttattcttgacgtggcctctaccatcccaagtgaatttgctcggaagatactgccaccaaacctcagatcatatggatttttcaacatgcttcgtctatggcgtctccgtagagtcagctctctctttgctagattggagaaagatagacatttcaattacttctgggttcgatgtgcaaagctcatatgtgtcacactttttgccgtccactgttcggcatgcttctactatcttctcgctgacaggtatcctgacccaacggatacgtggattggcaattcgatgccagattttcatcagcggggtttgtggattcgatatgtagtatcagtgtattggtcaatcactactcttacaactgtgggttatggtgatttgcacgcggagaacacaagggagatgatattcaacattttctacatgctattcaaccttggattgactgcctatttgattggtaacatgaccaatctggttgtccatggcaccagccgtactcgaaaatatagggatacaattcaagcagcaaccagctttgcactaaggaatcagttaccaagtcggctccaagatcagatgatctcacatcttagcttgaagttcagaacagattcagaaggtcttcaacaacaagagacccttgatgcgcttcccaaggctataagatcaggcatttctcagtatctgtttttcaatcttgtccaaaaagtttacttgtttgaaggggtgtccaatgacctaatttttcaactggtttctgagatgaaagctgaatattttccacctagggaagatgtgatactgcagaatgaagcacccacagacttctatattttagttactggtagcgcggagttgatagagttgcgaaatggcggggaacagatggctggagtggctaaggcaggagatgttgtcggagaaattggggttctttgctataggccccaactattcacagttcgaacaaaatcattatgccagcttctgcgtatgaatcgcactgcctttctcagccttgttcaatccaatgttgcagatggaacaataataatgaacaaccttatgcagttactaaaacagcagaaagacaacagtgtaatggtgggtgttcttaaggagattgagaacatgctagcgcggggtcgtctggacttgccaattaccctctgttttgcggtaaataaaggagacgatttaatgttacatcaacttctgaagcgtggtttggatccaaatgaatcagataacaatgggcatacagcactgcatatagctgcttccaaaggagacgaacaatgtgtcaagcttcttctagactacggagctgatccaaatgctagagactctgaaggaaaagtgcctctatgggaggctttatgtgaaaagcacaatgcagtgatagagctgttagtagagagtggtgcagagctatcatctggagacacggccttgtatgcttgcatcgctgttgaggaaaatgatgctgagctgcttgagaacgttatccgttatggtggcaacataaacaacccaacgaaagacggaaccacaccgctgcatcgtgcggtctgtgatggaaatgttcagatggttgagttgttgctggaacacggagctgacgtcgacaagcaggacagtaatggctggtcgccaagagatctagctgatcagcaaggccatgatgacattcaggctctcttcaaatcacgaaaagcacacaggaagcatgcctcaaatggcagagtggcacctatgctgatagggagattcaacagtgagccctcgatgccagatatgagccatgaaaacgccagagtacgcagcgaagttgttccgcagaagctcctccgaaagagggtgagtttccagaattctcttttcggcgtcatctcttcgtcccacgcccaccaggacaccggccgtctgctctcgaaaggcctcgctggaacagagggtccaaattgccgtcacgactccctcatcagggtgacaatcagctgccccgagaagggggggaacgccgcagggaagctcgtgcgcctaccgcggtcgatggccgagcttctcgaactaggtgcaaagaagttcggcatcaagcctggcaaggtcctgacagttgggggtgctgagattgatgaggtggagcttatcagagacggtgatcatattcttctcgtcagtgatgaatgggtgccagatgttgagcaaattaggccttaacaataagtgagccagctgtggtgctcttattgcaatttgacatgatatggggaaacatgcccctgtgaccctgtgtgcatcagtgcatgtcccccatttaaactgaagtgtagcttatgatggttttgaagctgtaggatgtatccagcttggaaatgaatttgtagtcagctggtctgtatgtagtttcgtcatctctttccatgggaagggattcacaaaatgtaattacatgatttcttttttttcctgtctttagatcaagctttctctggaagtgagaaatattcgtgagtcatgaattttgagatattgatcctatcagttcattttagttgctatttcaattcttctttgtttgttatttcagtttttattgatttctgaacggcttcgtgcagtgcaaaatatgaaatacgatagagaatggaacaggagagctgctagagaagcggcctgcaagcttt

SEQ ID NO: 32557 - DNA, 3250 bp, Zea Mays
gccgccgctgcctgcggggtgcggccgtgcgggcctgcggggtgctggcgctgcgccgctgccaacctgcccccactgcccgtgactgctgactagtgactagtctctcagtagccgctccataaaatggggccgagcgcgctcccacacccagactagttccgctgaccgcttgaactctcctccctcgcccgcgcgtctccgccgccccaccggccaccgcccgcgcctccgccgcggcagctgtccaaaagctgaaaatagatagaatcacgagggggggattgcctagacaacgatccttagttaatcaaacacgggctgccagattcgggggggcgttcgcgttcctaccctctcatcactctccccgtaaaaccccggctgggtttatctcatcgccgccgggcggcgagcggtgggaggcaatggcagggtgggggccctccaggctgccgacgtgcgggccgtggggccgcggcgtggcgctggagagggagctgtcgcgggacggcagccactacagcatctccagcggcatcctgccgtcgctcggcgcgcgcagcaaccgccgcgccaagctcaggcccttcatcgtctcgccctacgaccgccgatacagatgctgggagacttttctcataattcttgtgatatactctgcatgggtttccccatttgagtttggcttcattcggaaaccggcgggcgccctagctgcagtggacaatgtcgtgaatgcgttcttcgcagtggacatcatcctgaccttctttgtagcttacttggatagaatgacatacttgcttgaagatgatccaaaaaggatagcttggcggtatactaccagttggtttattcttgacgtggcctctaccatcccaagtgaatttgctcggaagatactgccaccaaacctcagatcatatggatttttcaacatgcttcgtctatggcgtctccgtagagtcagctctctctttgctagattggagaaagatagacatttcaattacttctgggttcgatgtgcaaagctcatatgtgtcacactttttgccgtccactgttcggcatgcttctactatcttctcgctgacagggatacaattcaagcagcaaccagctttgcactaaggaatcagttaccaagtcggctccaagatcagatgatctcacatcttagcttgaagttcagaacagattcagaaggtcttcaacaacaagagacccttgatgcgcttcccaaggctataagatcaggcatttctcagtatctgtttttcaatcttgtccaaaaagtttacttgtttgaaggggtgtccaatgacctaatttttcaactggtttctgagatgaaagctgaatattttccacctagggaagatgtgatactgcagaatgaagcacccacagacttctatattttagttactggtagcgcgatggctggagtggctaaggcaggagatgttgtcggagaaattggggttctttgctataggccccaactattcacagttcgaacaaaatcattatgccagcttctgcgtatgaatcgcactgcctttctcagccttgttcaatccaatgttgcagatggaacaataataatgaacaaccttatgcagttactaaaacagcagaaagacaacagtgtaatggtgggtgttcttaaggagattgagaacatgctagcgcggggtcgtctggacttgccaattaccctctgttttgcggtaaataaaggagacgatttaatgttacatcaacttctgaagcgtggtttggatccaaatgaatcagataacaatgggcatacagcactgcatatagctgcttccaaaggagacgaacaatgtgtcaagcttcttctagactacggagctgatccaaatgctagagactctgaaggaaaagtgcctctatgggaggctttatgtgaaaagcacaatgcagtgatagagctgttagtagagagtggtgcagagctatcatctggagacacggccttgtatgcttgcatcgctgttgaggaaaatgatgctgagctgcttgagaacgttatccgttatggtggcaacataaacaacccaacgaaagacggaaccacaccgctgcatcgtgcggtctgtgatggaaatgttcagatggttgagttgttgctggaacacggagctgacgtcgacaagcaggacagtaatggctggtcgccaagagatctagctgatcagcaaggccatgatgacattcaggctctcttcaaatcacgaaaagcacacaggaagcatgcctcaaatggcagagtggcacctatgctgatagggagattcaacagtgagccctcgatgccagatatgagccatgaaaacgccagagtacgcagcgaagttgttccgcagaagctcctccgaaagagggtgagtttccagaattctcttttcggcgtcatctcttcgtcccacgcccaccaggacaccggccgtctgctctcgaaaggcctcgctggaacagagggtccaaattgccgtcacgactccctcatcagggtgacaatcagctgccccgagaagggggggaacgccgcagggaagctcgtgcgcctaccgcggtcgatggccgagcttctcgaactaggtgcaaagaagttcggcatcaagcctggcaaggtcctgacagttgggggtgctgagattgatgaggtggagcttatcagagacggtgatcatattcttctcgtcagtgatgaatgggtgccagatgttgagcaaattaggccttaacaataagtgagccagctgtggtgctcttattgcaatttgacatgatatggggaaacatgcccctgtgaccctgtgtgcatcagtgcatgtcccccatttaaactgaagtgtagcttatgatggttttgaagctgtaggatgtatccagcttggaaatgaatttgtagtcagctggtctgtatgtagtttcgtcatctctttccatgggaagggattcacaaaatgtaattacatgatttcttttttttcctgtctttagatcaagctttctctggaagtgagaaatattcgtgagtcatgaattttgagatattgatcctatcagttcattttagttgctatttcaattcttctttgtttgttatttcagtttttattgatttctgaacggcttcgtgcagtgcaaaatatgaaatacgatagagaatggaacaggagagctgctagagaagcggcctgcaagcttt

SEQ ID NO: 32558 - DNA, 3623 bp, Zea Mays
gccgccgctgcctgcggggtgcggccgtgcgggcctgcggggtgctggcgctgcgccgctgccaacctgcccccactgcccgtgactgctgactagtgactagtctctcagtagccgctccataaaatggggccgagcgcgctcccacacccagactagttccgctgaccgcttgaactctcctccctcgcccgcgcgtctccgccgccccaccggccaccgcccgcgcctccgccgcggcagctgtccaaaagctgaaaatagatagaatcacgagggggggattgcctagacaacgatccttagttaatcaaacacgggctgccagattcgggggggcgttcgcgttcctaccctctcatcactctccccgtaaaaccccggctgggtttatctcatcgccgccgggcggcgagcggtgggaggcaatggcagggtgggggccctccaggctgccgacgtgcgggccgtggggccgcggcgtggcgctggagagggagctgtcgcgggacggcagccactacagcatctccagcggcatcctgccgtcgctcggcgcgcgcagcaaccgccgcgccaagctcaggcccttcatcgtctcgccctacgaccgccgatacagatgctgggagacttttctcataattcttgtgatatactctgcatgggtttccccatttgagtttggcttcattcggaaaccggcgggcgccctagctgcagtggacaatgtcgtgaatgcgttcttcgcagtggacatcatcctgaccttctttgtagcttacttggatagaatgacatacttgcttgaagatgatccaaaaaggatagcttggcggtatactaccagttggtttattcttgacgtggcctctaccatcccaagtgaatttgctcggaagatactgccaccaaacctcagatcatatggatttttcaacatgcttcgtctatggcgtctccgtagagtcagctctctctttgctagattggagaaagatagacatttcaattacttctgggttcgatgtgcaaagctcatatgtgtcacactttttgccgtccactgttcggcatgcttctactatcttctcgctgacaggtatcctgacccaacggatacgtggattggcaattcgatgccagattttcatcagcggggtttgtggattcgatatgtagtatcagtgtattggtcaatcactactcttacaactgtgggttatggtgatttgcacgcggagaacacaagggagatgatattcaacattttctacatgctattcaaccttggattgactgcctatttgattggtaacatgaccaatctggttgtccatggcaccagccgtactcgaaaatatagggatacaattcaagcagcaaccagctttgcactaaggaatcagttaccaagtcggctccaagatcagatgatctcacatcttagcttgaagttcagaacagattcagaaggtcttcaacaacaagagacccttgatgcgcttcccaaggctataagatcaggcatttctcagtatctgtttttcaatcttgtccaaaaagtttacttgtttgaaggggtgtccaatgacctaatttttcaactgggaagatgtgatactgcagaatgaagcacccacagacttctatattttagttactggtagcgcggtaaggatgccattacacaaataaatttggggaagaaaagtagtagttttgctatcaatagcgcagaaaccaaatcacattgtcattctgatatacttgtcacttctacaggagttgatagagttgcgaaatggcggggaacagatggctggagtggctaaggcaggagatgttgtcggagaaattggggttctttgctataggccccaactattcacagttcgaacaaaatcattatgccagcttctgcgtatgaatcgcactgcctttctcagccttgttcaatccaatgttgcagatggaacaataataatgaacaaccttatgcagttactaaaacagcagaaagacaacagtgtaatggtgggtgttcttaaggagattgagaacatgctagcgcggggtcgtctggacttgccaattaccctctgttttgcggtaaataaaggagacgatttaatgttacatcaacttctgaagcgtggtttggatccaaatgaatcagataacaatgggcatacagcactgcatatagctgcttccaaaggagacgaacaatgtgtcaagcttcttctagactacggagctgatccaaatgctagagactctgaaggaaaagtgcctctatgggaggctttatgtgaaaagcacaatgcagtgatagagctgttagtagagagtggtgcagagctatcatctggagacacggccttgtatgcttgcatcgctgttgaggaaaatgatgctgagctgcttgagaacgttatccgttatggtggcaacataaacaacccaacgaaagacggaaccacaccgctgcatcgtgcggtctgtgatggaaatgttcagatggttgagttgttgctggaacacggagctgacgtcgacaagcaggacagtaatggctggtcgccaagagatctagctgatcagcaaggccatgatgacattcaggctctcttcaaatcacgaaaagcacacaggaagcatgcctcaaatggcagagtggcacctatgctgatagggagattcaacagtgagccctcgatgccagatatgagccatgaaaacgccagagtacgcagcgaagttgttccgcagaagctcctccgaaagagggtgagtttccagaattctcttttcggcgtcatctcttcgtcccacgcccaccaggacaccggccgtctgctctcgaaaggcctcgctggaacagagggtccaaattgccgtcacgactccctcatcagggtgacaatcagctgccccgagaagggggggaacgccgcagggaagctcgtgcgcctaccgcggtcgatggccgagcttctcgaactaggtgcaaagaagttcggcatcaagcctggcaaggtcctgacagttgggggtgctgagattgatgaggtggagcttatcagagacggtgatcatattcttctcgtcagtgatgaatgggtgccagatgttgagcaaattaggccttaacaataagtgagccagctgtggtgctcttattgcaatttgacatgatatggggaaacatgcccctgtgaccctgtgtgcatcagtgcatgtcccccatttaaactgaagtgtagcttatgatggttttgaagctgtaggatgtatccagcttggaaatgaatttgtagtcagctggtctgtatgtagtttcgtcatctctttccatgggaagggattcacaaaatgtaattacatgatttcttttttttcctgtctttagatcaagctttctctggaagtgagaaatattcgtgagtcatgaattttgagatattgatcctatcagttcattttagttgctatttcaattcttctttgtttgttatttcagtttttattgatttctgaacggcttcgtgcagtgcaaaatatgaaatacgatagagaatggaacaggagagctgctagagaagcggcctgcaagcttt

SEQ ID NO: 32559 - DNA, 3433 bp, Zea Mays
gccgccgctgcctgcggggtgcggccgtgcgggcctgcggggtgctggcgctgcgccgctgccaacctgcccccactgcccgtgactgctgactagtgactagtctctcagtagccgctccataaaatggggccgagcgcgctcccacacccagactagttccgctgaccgcttgaactctcctccctcgcccgcgcgtctccgccgccccaccggccaccgcccgcgcctccgccgcggcagctgtccaaaagctgaaaatagatagaatcacgagggggggattgcctagacaacgatccttagttaatcaaacacgggctgccagattcgggggggcgttcgcgttcctaccctctcatcactctccccgtaaaaccccggctgggtttatctcatcgccgccgggcggcgagcggtgggaggcaatggcagggtgggggccctccaggctgccgacgtgcgggccgtggggccgcggcgtggcgctggagagggagctgtcgcgggacggcagccactacagcatctccagcggcatcctgccgtcgctcggcgcgcgcagcaaccgccgcgccaagctcaggcccttcatcgtctcgccctacgaccgccgatacagatgctgggagacttttctcataattcttgtgatatactctgcatgggtttccccatttgagtttggcttcattcggaaaccggcgggcgccctagctgcagtggacaatgtcgtgaatgcgttcttcgcagtggacatcatcctgaccttctttgtagcttacttggatagaatgacatacttgcttgaagatgatccaaaaaggatagcttggcggtatactaccagttggtttattcttgacgtggcctctaccatcccaagtgaatttgctcggaagatactgccaccaaacctcagatcatatggatttttcaacatgcttcgtctatggcgtctccgtagagtcagctctctctttgctaggtatcctgacccaacggatacgtggattggcaattcgatgccagattttcatcagcggggtttgtggattcgatatgtagtatcagtgtattggtcaatcactactcttacaactgtgggttatggtgatttgcacgcggagaacacaagggagatgatattcaacattttctacatgctattcaaccttggattgactgcctatttgattggtaacatgaccaatctggttgtccatggcaccagccgtactcgaaaatatagggatacaattcaagcagcaaccagctttgcactaaggaatcagttaccaagtcggctccaagatcagatgatctcacatcttagcttgaagttcagaacagattcagaaggtcttcaacaacaagagacccttgatgcgcttcccaaggctataagatcaggcatttctcagtatctgtttttcaatcttgtccaaaaagtttacttgtttgaaggggtgtccaatgacctaatttttcaactggtttctgagatgaaagctgaatattttccacctagggaagatgtgatactgcagaatgaagcacccacagacttctatattttagttactggtagcgcggagttgatagagttgcgaaatggcggggaacagatggctggagtggctaaggcaggagatgttgtcggagaaattggggttctttgctataggccccaactattcacagttcgaacaaaatcattatgccagcttctgcgtatgaatcgcactgcctttctcagccttgttcaatccaatgttgcagatggaacaataataatgaacaaccttatgcagttactaaaacagcagaaagacaacagtgtaatggtgggtgttcttaaggagattgagaacatgctagcgcggggtcgtctggacttgccaattaccctctgttttgcggtaaataaaggagacgatttaatgttacatcaacttctgaagcgtggtttggatccaaatgaatcagataacaatgggcatacagcactgcatatagctgcttccaaaggagacgaacaatgtgtcaagcttcttctagactacggagctgatccaaatgctagagactctgaaggaaaagtgcctctatgggaggctttatgtgaaaagcacaatgcagtgatagagctgttagtagagagtggtgcagagctatcatctggagacacggccttgtatgcttgcatcgctgttgaggaaaatgatgctgagctgcttgagaacgttatccgttatggtggcaacataaacaacccaacgaaagacggaaccacaccgctgcatcgtgcggtctgtgatggaaatgttcagatggttgagttgttgctggaacacggagctgacgtcgacaagcaggacagtaatggctggtcgccaagagatctagctgatcagcaaggccatgatgacattcaggctctcttcaaatcacgaaaagcacacaggaagcatgcctcaaatggcagagtggcacctatgctgatagggagattcaacagtgagccctcgatgccagatatgagccatgaaaacgccagagtacgcagcgaagttgttccgcagaagctcctccgaaagagggtgagtttccagaattctcttttcggcgtcatctcttcgtcccacgcccaccaggacaccggccgtctgctctcgaaaggcctcgctggaacagagggtccaaattgccgtcacgactccctcatcagggtgacaatcagctgccccgagaagggggggaacgccgcagggaagctcgtgcgcctaccgcggtcgatggccgagcttctcgaactaggtgcaaagaagttcggcatcaagcctggcaaggtcctgacagttgggggtgctgagattgatgaggtggagcttatcagagacggtgatcatattcttctcgtcagtgatgaatgggtgccagatgttgagcaaattaggccttaacaataagtgagccagctgtggtgctcttattgcaatttgacatgatatggggaaacatgcccctgtgaccctgtgtgcatcagtgcatgtcccccatttaaactgaagtgtagcttatgatggttttgaagctgtaggatgtatccagcttggaaatgaatttgtagtcagctggtctgtatgtagtttcgtcatctctttccatgggaagggattcacaaaatgtaattacatgatttcttttttttcctgtctttagatcaagctttctctggaagtgagaaatattcgtgagtcatgaattttgagatattgatcctatcagttcattttagttgctatttcaattcttctttgtttgttatttcagtttttattgatttctgaacggcttcgtgcagtgcaaaatatgaaatacgatagagaatggaacaggagagctgctagagaagcggcctgcaagcttt

SEQ ID NO: 32560 - DNA, 3514 bp, Zea Mays
gccgccgctgcctgcggggtgcggccgtgcgggcctgcggggtgctggcgctgcgccgctgccaacctgcccccactgcccgtgactgctgactagtgactagtctctcagtagccgctccataaaatggggccgagcgcgctcccacacccagactagttccgctgaccgcttgaactctcctccctcgcccgcgcgtctccgccgccccaccggccaccgcccgcgcctccgccgcggcagctgtccaaaagctgaaaatagatagaatcacgagggggggattgcctagacaacgatccttagttaatcaaacacgggctgccagattcgggggggcgttcgcgttcctaccctctcatcactctccccgtaaaaccccggctgggtttatctcatcgccgccgggcggcgagcggtgggaggcaatggcagggtgggggccctccaggctgccgacgtgcgggccgtggggccgcggcgtggcgctggagagggagctgtcgcgggacggcagccactacagcatctccagcggcatcctgccgtcgctcggcgcgcgcagcaaccgccgcgccaagctcaggcccttcatcgtctcgccctacgaccgccgatacagatgctgggagacttttctcataattcttgtgatatactctgcatgggtttccccatttgagtttggcttcattcggaaaccggcgggcgccctagctgcagtggacaatgtcgtgaatgcgttcttcgcagtggacatcatcctgaccttctttgtagcttacttggatagaatgacatacttgcttgaagatgatccaaaaaggatagcttggcggtatactaccagttggtttattcttgacgtggcctctaccatcccaagtgaatttgctcggaagatactgccaccaaacctcagatcatatggatttttcaacatgcttcgtctatggcgtctccgtagagtcagctctctctttgctagattggagaaagatagacatttcaattacttctgggttcgatgtgcaaagctcatatgtgtcacactttttgccgtccactgttcggcatgcttctactatcttctcgctgacaggtatcctgacccaacggatacgtggattggcaattcgatgccagattttcatcagcggggtttgtggattcgatatgtagtatcagtgtattggtcaatcactactcttacaactgtgggttatggtgatttgcacgcggagaacacaagggagatgatattcaacattttctacatgctattcaaccttggattgactgcctatttgattggtaacatgaccaatctggttgtccatggcaccagccgtactcgaaaatatagggatacaattcaagcagcaaccagctttgcactaaggaatcagttaccaagtcggctccaagatcagatgatctcacatcttagcttgaagttcagaacagattcagaaggtcttcaacaacaagagacccttgatgcgcttcccaaggctataagatcaggcatttctcagtatctgtttttcaatcttgtccaaaaagtttacttgtttgaaggggtgtccaatgacctaatttttcaactggtttctgagatgaaagctgaatattttccacctagggaagatgtgatactgcagaatgaagcacccacagacttctatattttagttactggtagcgcgatggctggagtggctaaggcaggagatgttgtcggagaaattggggttctttgctataggccccaactattcacagttcgaacaaaatcattatgccagcttctgcgtatgaatcgcactgcctttctcagccttgttcaatccaatgttgcagatggaacaataataatgaacaaccttatgcagttactaaaacagcagaaagacaacagtgtaatggtgggtgttcttaaggagattgagaacatgctagcgcggggtcgtctggacttgccaattaccctctgttttgcggtaaataaaggagacgatttaatgttacatcaacttctgaagcgtggtttggatccaaatgaatcagataacaatgggcatacagcactgcatatagctgcttccaaaggagacgaacaatgtgtcaagcttcttctagactacggagctgatccaaatgctagagactctgaaggaaaagtgcctctatgggaggctttatgtgaaaagcacaatgcagtgatagagctgttagtagagagtggtgcagagctatcatctggagacacggccttgtatgcttgcatcgctgttgaggaaaatgatgctgagctgcttgagaacgttatccgttatggtggcaacataaacaacccaacgaaagacggaaccacaccgctgcatcgtgcggtctgtgatggaaatgttcagatggttgagttgttgctggaacacggagctgacgtcgacaagcaggacagtaatggctggtcgccaagagatctagctgatcagcaaggccatgatgacattcaggctctcttcaaatcacgaaaagcacacaggaagcatgcctcaaatggcagagtggcacctatgctgatagggagattcaacagtgagccctcgatgccagatatgagccatgaaaacgccagagtacgcagcgaagttgttccgcagaagctcctccgaaagagggtgagtttccagaattctcttttcggcgtcatctcttcgtcccacgcccaccaggacaccggccgtctgctctcgaaaggcctcgctggaacagagggtccaaattgccgtcacgactccctcatcagggtgacaatcagctgccccgagaagggggggaacgccgcagggaagctcgtgcgcctaccgcggtcgatggccgagcttctcgaactaggtgcaaagaagttcggcatcaagcctggcaaggtcctgacagttgggggtgctgagattgatgaggtggagcttatcagagacggtgatcatattcttctcgtcagtgatgaatgggtgccagatgttgagcaaattaggccttaacaataagtgagccagctgtggtgctcttattgcaatttgacatgatatggggaaacatgcccctgtgaccctgtgtgcatcagtgcatgtcccccatttaaactgaagtgtagcttatgatggttttgaagctgtaggatgtatccagcttggaaatgaatttgtagtcagctggtctgtatgtagtttcgtcatctctttccatgggaagggattcacaaaatgtaattacatgatttcttttttttcctgtctttagatcaagctttctctggaagtgagaaatattcgtgagtcatgaattttgagatattgatcctatcagttcattttagttgctatttcaattcttctttgtttgttatttcagtttttattgatttctgaacggcttcgtgcagtgcaaaatatgaaatacgatagagaatggaacaggagagctgctagagaagcggcctgcaagcttt

SEQ ID NO: 32561 - DNA, 3283 bp, Zea Mays
gccgccgctgcctgcggggtgcggccgtgcgggcctgcggggtgctggcgctgcgccgctgccaacctgcccccactgcccgtgactgctgactagtgactagtctctcagtagccgctccataaaatggggccgagcgcgctcccacacccagactagttccgctgaccgcttgaactctcctccctcgcccgcgcgtctccgccgccccaccggccaccgcccgcgcctccgccgcggcagctgtccaaaagctgaaaatagatagaatcacgagggggggattgcctagacaacgatccttagttaatcaaacacgggctgccagattcgggggggcgttcgcgttcctaccctctcatcactctccccgtaaaaccccggctgggtttatctcatcgccgccgggcggcgagcggtgggaggcaatggcagggtgggggccctccaggctgccgacgtgcgggccgtggggccgcggcgtggcgctggagagggagctgtcgcgggacggcagccactacagcatctccagcggcatcctgccgtcgctcggcgcgcgcagcaaccgccgcgccaagctcaggcccttcatcgtctcgccctacgaccgccgatacagatgctgggagacttttctcataattcttgtgatatactctgcatgggtttccccatttgagtttggcttcattcggaaaccggcgggcgccctagctgcagtggacaatgtcgtgaatgcgttcttcgcagtggacatcatcctgaccttctttgtagcttacttggatagaatgacatacttgcttgaagatgatccaaaaaggatagcttggcggtatactaccagttggtttattcttgacgtggcctctaccatcccaagtgaatttgctcggaagatactgccaccaaacctcagatcatatggatttttcaacatgcttcgtctatggcgtctccgtagagtcagctctctctttgctagattggagaaagatagacatttcaattacttctgggttcgatgtgcaaagctcatatgtgtcacactttttgccgtccactgttcggcatgcttctactatcttctcgctgacagggatacaattcaagcagcaaccagctttgcactaaggaatcagttaccaagtcggctccaagatcagatgatctcacatcttagcttgaagttcagaacagattcagaaggtcttcaacaacaagagacccttgatgcgcttcccaaggctataagatcaggcatttctcagtatctgtttttcaatcttgtccaaaaagtttacttgtttgaaggggtgtccaatgacctaatttttcaactggtttctgagatgaaagctgaatattttccacctagggaagatgtgatactgcagaatgaagcacccacagacttctatattttagttactggtagcgcggagttgatagagttgcgaaatggcggggaacagatggctggagtggctaaggcaggagatgttgtcggagaaattggggttctttgctataggccccaactattcacagttcgaacaaaatcattatgccagcttctgcgtatgaatcgcactgcctttctcagccttgttcaatccaatgttgcagatggaacaataataatgaacaaccttatgcagttactaaaacagcagaaagacaacagtgtaatggtgggtgttcttaaggagattgagaacatgctagcgcggggtcgtctggacttgccaattaccctctgttttgcggtaaataaaggagacgatttaatgttacatcaacttctgaagcgtggtttggatccaaatgaatcagataacaatgggcatacagcactgcatatagctgcttccaaaggagacgaacaatgtgtcaagcttcttctagactacggagctgatccaaatgctagagactctgaaggaaaagtgcctctatgggaggctttatgtgaaaagcacaatgcagtgatagagctgttagtagagagtggtgcagagctatcatctggagacacggccttgtatgcttgcatcgctgttgaggaaaatgatgctgagctgcttgagaacgttatccgttatggtggcaacataaacaacccaacgaaagacggaaccacaccgctgcatcgtgcggtctgtgatggaaatgttcagatggttgagttgttgctggaacacggagctgacgtcgacaagcaggacagtaatggctggtcgccaagagatctagctgatcagcaaggccatgatgacattcaggctctcttcaaatcacgaaaagcacacaggaagcatgcctcaaatggcagagtggcacctatgctgatagggagattcaacagtgagccctcgatgccagatatgagccatgaaaacgccagagtacgcagcgaagttgttccgcagaagctcctccgaaagagggtgagtttccagaattctcttttcggcgtcatctcttcgtcccacgcccaccaggacaccggccgtctgctctcgaaaggcctcgctggaacagagggtccaaattgccgtcacgactccctcatcagggtgacaatcagctgccccgagaagggggggaacgccgcagggaagctcgtgcgcctaccgcggtcgatggccgagcttctcgaactaggtgcaaagaagttcggcatcaagcctggcaaggtcctgacagttgggggtgctgagattgatgaggtggagcttatcagagacggtgatcatattcttctcgtcagtgatgaatgggtgccagatgttgagcaaattaggccttaacaataagtgagccagctgtggtgctcttattgcaatttgacatgatatggggaaacatgcccctgtgaccctgtgtgcatcagtgcatgtcccccatttaaactgaagtgtagcttatgatggttttgaagctgtaggatgtatccagcttggaaatgaatttgtagtcagctggtctgtatgtagtttcgtcatctctttccatgggaagggattcacaaaatgtaattacatgatttcttttttttcctgtctttagatcaagctttctctggaagtgagaaatattcgtgagtcatgaattttgagatattgatcctatcagttcattttagttgctatttcaattcttctttgtttgttatttcagtttttattgatttctgaacggcttcgtgcagtgcaaaatatgaaatacgatagagaatggaacaggagagctgctagagaagcggcctgcaagcttt

SEQ ID NO: 32562 - DNA, 2969 bp, Zea Mays
cggccgtccagccgagctttttcttcatgctgggagacttttctcataattcttgtgatatactctgcatgggtttccccatttgagtttggcttcattcggaaaccggcgggcgccctagctgcagtggacaatgtcgtgaatgcgttcttcgcagtggacatcatcctgaccttctttgtagcttacttggatagaatgacatacttgcttgaagatgatccaaaaaggatagcttggcggtatactaccagttggtttattcttgacgtggcctctaccatcccaagtgaatttgctcggaagatactgccaccaaacctcagatcatatggatttttcaacatgcttcgtctatggcgtctccgtagagtcagctctctctttgctagattggagaaagatagacatttcaattacttctgggttcgatgtgcaaagctcatatgtgtcacactttttgccgtccactgttcggcatgcttctactatcttctcgctgacaggtatcctgacccaacggatacgtggattggcaattcgatgccagattttcatcagcggggtttgtggattcgatatgtagtatcagtgtattggtcaatcactactcttacaactgtgggttatggtgatttgcacgcggagaacacaagggagatgatattcaacattttctacatgctattcaaccttggattgactgcctatttgattggtaacatgaccaatctggttgtccatggcaccagccgtactcgaaaatatagggatacaattcaagcagcaaccagctttgcactaaggaatcagttaccaagtcggctccaagatcagatgatctcacatcttagcttgaagttcagaacagattcagaaggtcttcaacaacaagagacccttgatgcgcttcccaaggctataagatcaggcatttctcagtatctgtttttcaatcttgtccaaaaagtttacttgtttgaaggggtgtccaatgacctaatttttcaactggtttctgagatgaaagctgaatattttccacctagggaagatgtgatactgcagaatgaagcacccacagacttctatattttagttactggtagcgcggagttgatagagttgcgaaatggcggggaacagatggctggagtggctaaggcaggagatgttgtcggagaaattggggttctttgctataggccccaactattcacagttcgaacaaaatcattatgccagcttctgcgtatgaatcgcactgcctttctcagccttgttcaatccaatgttgcagatggaacaataataatgaacaaccttatgcagagttttgacatagaaaagttactaaaacagcagaaagacaacagtgtaatggtgggtgttcttaaggagattgagaacatgctagcgcggggtcgtctggacttgccaattaccctctgttttgcggtaaataaaggagacgatttaatgttacatcaacttctgaagcgtggtttggatccaaatgaatcagataacaatgggcatacagcactgcatatagctgcttccaaaggagacgaacaatgtgtcaagcttcttctagactacggagctgatccaaatgctagagactctgaaggaaaagtgcctctatgggaggctttatgtgaaaagcacaatgcagtgatagagctgttagtagagagtggtgcagagctatcatctggagacacggccttgtatgcttgcatcgctgttgaggaaaatgatgctgagctgcttgagaacgttatccgttatggtggcaacataaacaacccaacgaaagacggaaccacaccgctgcatcgtgcggtctgtgatggaaatgttcagatggttgagttgttgctggaacacggagctgacgtcgacaagcaggacagtaatggctggtcgccaagagatctagctgatcagcaaggccatgatgacattcaggctctcttcaaatcacgaaaagcacacaggaagcatgcctcaaatggcagagtggcacctatgctgatagggagattcaacagtgagccctcgatgccagatatgagccatgaaaacgccagagtacgcagcgaagttgttccgcagaagctcctccgaaagagggtgagtttccagaattctcttttcggcgtcatctcttcgtcccacgcccaccaggacaccggccgtctgctctcgaaaggcctcgctggaacagagggtccaaattgccgtcacgactccctcatcagggtgacaatcagctgccccgagaagggggggaacgccgcagggaagctcgtgcgcctaccgcggtcgatggccgagcttctcgaactaggtgcaaagaagttcggcatcaagcctggcaaggtcctgacagttgggggtgctgagattgatgaggtggagcttatcagagacggtgatcatattcttctcgtcagtgatgaatgggtgccagatgttgagcaaattaggccttaacaataagtgagccagctgtggtgctcttattgcaatttgacatgatatggggaaacatgcccctgtgaccctgtgtgcatcagtgcatgtcccccatttaaactgaagtgtagcttatgatggttttgaagctgtaggatgtatccagcttggaaatgaatttgtagtcagctggtctgtatgtagtttcgtcatctctttccatgggaagggattcacaaaatgtaattacatgatttcttttttttcctgtctttagatcaagctttctctggaagtgagaaatattcgtgagtcatgaattttgagatattgatcctatcagttcattttagttgctatttcaattcttctttgtttgttatttcagtttttattgatttctgaacggcttcgtgcagtgcaaaatatgaaatacgatagagaatggaacaggagagctgctagagaagcggcctgcaagcttt

SEQ ID NO: 32563 - DNA, 2969 bp, Zea Mays
ggaaaaccttttctgaatcgttttataatttactgagttgtttaatgctgggagacttttctcataattcttgtgatatactctgcatgggtttccccatttgagtttggcttcattcggaaaccggcgggcgccctagctgcagtggacaatgtcgtgaatgcgttcttcgcagtggacatcatcctgaccttctttgtagcttacttggatagaatgacatacttgcttgaagatgatccaaaaaggatagcttggcggtatactaccagttggtttattcttgacgtggcctctaccatcccaagtgaatttgctcggaagatactgccaccaaacctcagatcatatggatttttcaacatgcttcgtctatggcgtctccgtagagtcagctctctctttgctagattggagaaagatagacatttcaattacttctgggttcgatgtgcaaagctcatatgtgtcacactttttgccgtccactgttcggcatgcttctactatcttctcgctgacaggtatcctgacccaacggatacgtggattggcaattcgatgccagattttcatcagcggggtttgtggattcgatatgtagtatcagtgtattggtcaatcactactcttacaactgtgggttatggtgatttgcacgcggagaacacaagggagatgatattcaacattttctacatgctattcaaccttggattgactgcctatttgattggtaacatgaccaatctggttgtccatggcaccagccgtactcgaaaatatagggatacaattcaagcagcaaccagctttgcactaaggaatcagttaccaagtcggctccaagatcagatgatctcacatcttagcttgaagttcagaacagattcagaaggtcttcaacaacaagagacccttgatgcgcttcccaaggctataagatcaggcatttctcagtatctgtttttcaatcttgtccaaaaagtttacttgtttgaaggggtgtccaatgacctaatttttcaactggtttctgagatgaaagctgaatattttccacctagggaagatgtgatactgcagaatgaagcacccacagacttctatattttagttactggtagcgcggagttgatagagttgcgaaatggcggggaacagatggctggagtggctaaggcaggagatgttgtcggagaaattggggttctttgctataggccccaactattcacagttcgaacaaaatcattatgccagcttctgcgtatgaatcgcactgcctttctcagccttgttcaatccaatgttgcagatggaacaataataatgaacaaccttatgcagttactaaaacagcagaaagacaacagtgtaatggtgggtgttcttaaggagattgagaacatgctagcgcggggtcgtctggacttgccaattaccctctgttttgcggtaaataaaggagacgatttaatgttacatcaacttctgaagcgtggtttggatccaaatgaatcagataacaatgggcatacagcactgcatatagctgcttccaaaggagacgaacaatgtgtcaagcttcttctagactacggagctgatccaaatgctagagactctgaaggaaaagtgcctctatgggaggctttatgtgaaaagcacaatgcagtgatagagctgttagtagagagtggtgcagagctatcatctggagacacggccttgtatgcttgcatcgctgttgaggaaaatgatgctgagctgcttgagaacgttatccgttatggtggcaacataaacaacccaacgaaagacggaaccacaccgctgcatcgtgcggtctgtgatggaaatgttcagatggttgagttgttgctggaacacggagctgacgtcgacaagcaggacagtaatggctggtcgccaagagatctagctgatcagcaaggccatgatgacattcaggctctcttcaaatcacgaaaagcacacaggaagcatgcctcaaatggcagagtggcacctatgctgatagggagattcaacagtgagccctcgatgccagatatgagccatgaaaacgccagagtacgcagcgaagttgttccgcagaagctcctccgaaagagggtgagtttccagaattctcttttcggcgtcatctcttcgtcccacgcccaccaggacaccggccgtctgctctcgaaaggcctcgctggaacagagggtccaaattgccgtcacgactccctcatcagggtgacaatcagctgccccgagaagggggggaacgccgcagggaagctcgtgcgcctaccgcggtcgatggccgagcttctcgaactaggtgcaaagaagttcggcatcaagcctggcaaggtcctgacagttgggggtgctgagattgatgaggtggagcttatcagagacggtgatcatattcttctcgtcagtgatgaatgggtgccagatgttgagcaaattaggccttaacaataagtgagccagctgtggtgctcttattgcaatttgacatgatatggggaaacatgcccctgtgaccctgtgtgcatcagtgcatgtcccccatttaaactgaagtgtagcttatgatggttttgaagctgtaggatgtatccagcttggaaatgaatttgtagtcagctggtctgtatgtagtttcgtcatctctttccatgggaagggattcacaaaatgtaattacatgatttcttttttttcctgtctttagatcaagctttctctggaagtgagaaatattcgtgagtcatgaattttgagatattgatcctatcagttcattttagttgctatttcaattcttctttgtttgttatttcagtttttattgatttctgaacggcttcgtgcagtgcaaaatatgaaatacgatagagaatggaacaggagagctgctagagaagcggcctgcaagcttt

SEQ ID NO: 32564 - DNA, 2222 bp, Zea Mays
gacgcaacctactcctccctcccctcctctgctttccccccatttcgcgtctcggggtttggaccagccacccggcggaggcggccgggcagactgggccgagcgaccggagcgccgccgccatcggcaaagccacgggacggcccatggagtcgcgagcgctcctgcacgcccggcccgccgccctccctcaccgcgccggcctgcgcctccatctcccgctcctgcgcccgcgtgcagtctcccgctcccccgccgccaagcccgcgctccagtccccgctcctcgcgtcgaggggccccttccttcaacggcacgatgcggttctgggcaacgggttcgtgaaacggagagcggccagcgctggcggtgatgtgtccttccgcgcccaggcggcggcctcggcggcggtgccggcgccgcagccggaggagtccacaaaaaagctccttggcatcgacgtgaagacgctcaagaagatcgtgccgttggggctcatgttcttctgcatcctcttcaactacaccatcctgcgggacaccaaggacgtgctggtggtcactgccaaggggagcagcgccgagatcatccctttcctcaagacctgggttaacctgcccatggccatcggtttcatgctcctgtacaccaagctttccaacgttctctcacgggatgcgctcttctacaccgtcatcttcccgttcatcgccttcttcggcgccttcgcctttgtgctctacccgctcagggacgtcatccatcccaccgcgctcgcggacaagcttctcgccgcgctcggtccgagcttccttggtccggtggcgatactgaggatttggagcttctgcttgttctatgttatggctgagctctggggcagcgtcgtcatctctgtgctcttctgggggttcgctaatcaggacattgggtcctggaattgatggctgggaagtatctttgaaaggaatgatgagcatagtggtactccttggacttgtcataacttccatctattggggagtgaacaagtttgttttgaatgatccttcacttccaaaggctgatcgtaagaagaaaaaggaaaagcctaaacttggcatgaaagagagtctgaaggttctgctctcctcgaggtatgtgagggatctagctaccctagtggttgcttatggcattagtatcaatcttgtcgaagtcacgtggaaatcaaaactcaaggcacagttccctagtccaaatgaatattcatctttcatgggtgatttctcgactgcaactggaattgcaactttcacaatgatgctgttaggccgtattatactacggaaatttggctggggtgtggctgcaaagatcacccccaccgttctgttgctgactggtgttggattcttctctctgattttgtttggacagccactgactcctatgcttgccactatgggtatgacccccctactggcagccgtttatgtgggtgccatgcagaacatatttagcaagagtgcaaagtacagtttatttgacccatgcaaggaaatggcatatatccctttggatgaagatatgaaggtaaaaggaaaggcagccattgatgttgtctgcaacccactgggcaagtcgggcggcgcacttatccaacagttcatgatcctgacgttcggatccctggcaaattcgactccataccttgggggcatactcctggtcatcgttctcgcgtggctaggcgcggcgagctcattggacaagcagttctcgagcctggctaagcaagacatggagagggagaaggctgcccaagaccaagggaaactagaacgctcgctactcagtaagcctgcagaaggcggcactggtgatgtactggtggagcagcagacaaatgggtcggcgacgagcaaagctactggaacagagagctcgccatcgaactcatccctccctccccccccccccccccccccccccccccccaattcaatagatcgtagttaggagagtgattacagcgagcagaaatagtcggcatttaaaataattcgtggctttcgagtttgtaacagcgtgcggcttcaagcctgcccgtaatcttcctttgtaataataacatgagcaaaatcttgacagccggcagcgaatgtcgctctggagatggcaaatgtgtgttttgaactgaatggtaaatgtgcggttatctcttgaatagtatcttggct

SEQ ID NO: 32565 - DNA, 2311 bp, Zea Mays
ccctcctctgctttccccccatttcgcgtctcggggtttggaccagccacccggcggaggcggccgggcagactgggccgagcgaccggagcgccgccgccatcggcaaagccacgggacggcccatggagtcgcgagcgctcctgcacgcccggcccgccgccctccctcaccgcgccggcctgcgcctccatctcccgctcctgcgcccgcgtgcagtctcccgctcccccgccgccaagcccgcgctccagtccccgctcctcgcgtcgaggggccccttccttcaacggcacgatgcggttctgggcaacgggttcgtgaaacggagagcggccagcgctggcggtgatgtgtccttccgcgcccaggcggcggcctcggcggcggtgccggcgccgcagccggaggagtccacaaaaaagctccttggcatcgacgtgaagacgctcaagaagatcgtgccgttggggctcatgttcttctgcatcctcttcaactacaccatcctgcgggacaccaaggacgtgctggtggtcactgccaaggggagcagcgccgagatcatccctttcctcaagacctgggttaacctgcccatggccatcggtttcatgctcctgtacaccaagctttccaacgttctctcacgggatgcgctcttctacaccgtcatcttcccgttcatcgccttcttcggcgccttcgcctttgtgctctacccgctcagggacgtcatccatcccaccgcgctcgcggacaagcttctcgccgcgctcggtccgagcttccttggtccggtggcgatactgaggatttggagcttctgcttgttctatgttatggctgagctctggggcagcgtcgtcatctctgtgctcttctgggggttcgctaatcagattaccacagttgatgaagcaaaggaattctacccgttatttggccttggggctaatattgctcttatcttttctgggcgtactgtgaagtatttctcaaatttgcgcaggacattgggtcctggaattgatggctgggaagtatctttgaaaggaatgatgagcatagtggtactccttggacttgtcataacttccatctattggggagtgaacaagtttgttttgaatgatccttcacttccaaaggctgatcgtaagaagaaaaaggaaaagcctaaacttggcatgaaagagagtctgaaggttctgctctcctcgaggtatgtgagggatctagctaccctagtggttgcttatggcattagtatcaatcttgtcgaagtcacgtggaaatcaaaactcaaggcacagttccctagtccaaatgaatattcatctttcatgggtgatttctcgactgcaactggaattgcaactttcacaatgatgctgttaggccgtattatactacggaaatttggctggggtgtggctgcaaagatcacccccaccgttctgttgctgactggtgttggattcttctctctgattttgtttggacagccactgactcctatgcttgccactatgggtatgacccccctactggcagccgtttatgtgggtgccatgcagaacatatttagcaagagtgcaaagtacagtttatttgacccatgcaaggaaatggcatatatccctttggatgaagatatgaaggtaaaaggaaaggcagccattgatgttgtctgcaacccactgggcaagtcgggcggcgcacttatccaacagttcatgatcctgacgttcggatccctggcaaattcgactccataccttgggggcatactcctggtcatcgttctcgcgtggctaggcgcggcgagctcattggacaagcagttctcgagcctggctaagcaagacatggagagggagaaggctgcccaagaccaagggaaactagaacgctcgctactcagtaagcctgcagaaggcggcactggtgatgtactggtggagcagcagacaaatgggtcggcgacgagcaaagctactggaacagagagctcgccatcgaactcatccctccctccccccccccccccccccccccccccccccaattcaatagatcgtagttaggagagtgattacagcgagcagaaatagtcggcatttaaaataattcgtggctttcgagtttgtaacagcgtgcggcttcaagcctgcccgtaatcttcctttgtaataataacatgagcaaaatcttgacagccggcagcgaatgtcgctctggagatggcaaatgtgtgttttgaactgaatggtaaatgtgcggttatctcttgaatagtatcttggct

SEQ ID NO: 32566 - DNA, 2178 bp, Zea Mays
ctctgctttccccccatttcgcgtctcggggtttggaccagccacccggcggaggcggccgggcagactgggccgagcgaccggagcgccgccgccatcggcaaagccacgggacggcccatggagtcgcgagcgctcctgcacgcccggcccgccgccctccctcaccgcgccggcctgcgcctccatctcccgctcctgcgcccgcgtgcagtctcccgctcccccgccgccaagcccgcgctccagtccccgctcctcgcgtcgaggggccccttccttcaacggcacgatgcggttctgggcaacgggttcgtgaaacggagagcggccagcgctggcggtgatgtgtccttccgcgcccaggcggcggcctcggcggcggtgccggcgccgcagccggaggagtccacaaaaaagctccttggcatcgacgtgaagacgctcaagaagatcgtgccgttggggctcatgttcttctgcatcctcttcaactacaccatcctgcgggacaccaaggacgtgctggtggtcactgccaaggggagcagcgccgagatcatccctttcctcaagacctgggttaacctgcccatggccatcggtttcatgctcctgtacaccaagctttccaacgttctctcacgggatgcgctcttctacaccgtcatcttcccgttcatcgccttcttcggcgccttcgcctttgtgctctacccgctcagggacgtcatccatcccaccgcgctcgcggacaagcttctcgccgcgctcggtccgagcttccttggtccggtggcgatactgaggatttggagcttctgcttgttctatgttatggctgagctctggggcagcgtcgtcatctctgtgctcttctgggggttcgctaatcagattaccacagttgatgaagcaaaggaattctacccgttatttggccttggggctaatattgctcttatcttttctgggcgtactgtgaagtatttctcaaatttgcgcaggacattgggtcctggaattgatggctgggaagtatctttgaaaggaatgatgagcatagtggtactccttggacttgtcataacttccatctattggggagtgaacaagtttgttttgaatgatccttcacttccaaaggctgatcgtaagaagaaaaaggaaaagcctaaacttggcatgaaagagagtctgaaggttctgctctcctcgaggtatgtgagggatctagctaccctagtggttgcttatggcattagtatcaatcttgtcgaagtcacgtggaaatcaaaactcaaggcacagttccctagtccaaatgaatattcatctttcatgggtgatttctcgactgcaactggaattgcaactttcacaatgatgctgttaggccgtattatactacggaaatttggctggggtgtggctgcaaagatcacccccaccgttctgttgctgactggtgttggattcttctctctgattttgtttggacagccactgactcctatgcttgccactatgggtaaaaggaaaggcagccattgatgttgtctgcaacccactgggcaagtcgggcggcgcacttatccaacagttcatgatcctgacgttcggatccctggcaaattcgactccataccttgggggcatactcctggtcatcgttctcgcgtggctaggcgcggcgagctcattggacaagcagttctcgagcctggctaagcaagacatggagagggagaaggctgcccaagaccaagggaaactagaacgctcgctactcagtaagcctgcagaaggcggcactggtgatgtactggtggagcagcagacaaatgggtcggcgacgagcaaagctactggaacagagagctcgccatcgaactcatccctccctccccccccccccccccccccccccccccccaattcaatagatcgtagttaggagagtgattacagcgagcagaaatagtcggcatttaaaataattcgtggctttcgagtttgtaacagcgtgcggcttcaagcctgcccgtaatcttcctttgtaataataacatgagcaaaatcttgacagccggcagcgaatgtcgctctggagatggcaaatgtgtgttttgaactgaatggtaaatgtgcggttatctcttgaatagtatcttggct

SEQ ID NO: 32567 - DNA, 1964 bp, Zea Mays
ctctgctttccccccatttcgcgtctcggggtttggaccagccacccggcggaggcggccgggcagactgggccgagcgaccggagcgccgccgccatcggcaaagccacgggacggcccatggagtcgcgagcgctcctgcacgcccggcccgccgccctccctcaccgcgccggcctgcgcctccatctcccgctcctgcgcccgcgtgcagtctcccgctcccccgccgccaagcccgcgctccagtccccgctcctcgcgtcgaggggccccttccttcaacggcacgatgcggttctgggcaacgggttcgtgaaacggagagcggccagcgctggcggtgatgtgtccttccgcgcccaggcggcggcctcggcggcggtgccggcgccgcagccggaggagtccacaaaaaagctccttggcatcgacgtgaagacgctcaagaagatcgtgccgttggggctcatgttcttctgcatcctcttcaactacaccatcctgcgggacaccaaggacgtgctggtggtcactgccaaggggagcagcgccgagatcatccctttcctcaagacctgggttaacctgcccatggccatcggtttcatgctcctgtacaccaagctttccaacgttctctcacgggatgcgctcttctacaccgtcatcttcccgttcatcgccttcttcggcgccttcgcctttgtgctctacccgctcagggacgtcatccatcccaccgcgctcgcggacaagcttctcgccgcgctcggtccgagcttccttggtccggtggcgatactgaggatttggagcttctgcttgttctatgttatggctgagctctggggcagcgtcgtcatctctgtgctcttctgggggttcgctaatcaggacattgggtcctggaattgatggctgggaagtatctttgaaaggaatgatgagcatagtggtactccttggacttgtcataacttccatctattggggagtgaacaagtttgttttgaatgatccttcacttccaaaggctgatcgtaagaagaaaaaggaaaagcctaaacttggcatgaaagagagtctgaaggttctgctctcctcgaggtatgtgagggatctagctaccctagtggttgcttatggcattagtatcaatcttgtcgaagtcacgtggaaatcaaaactcaaggcacagttccctagtccaaatgaatattcatctttcatgggtgatttctcgactgcaactggaattgcaactttcacaatgatgctgttaggccgtattatactacggaaatttggctggggtgtggctgcaaagatcacccccaccgttctgttgctgactggtgttggattcttctctctgattttgtttggacagccactgactcctatgcttgccactatgggtatgacccccctactggcagccgtttatgtgggtgccatgcagaacatatttagcaagagtgcaaagtacagtttatttgacccatgcaaggaaatggcatatatccctttggatgaagatatgaaggtaaaaggaaaggcagccattgatgttgtctgcaacccactgggcaagtcgggcggcgcacttatccaacagttcatgatcctgacgttcggatccctggcaaattcgactccataccttgggggcatactcctggtcatcgttctcgcgtggctaggcgcggcgagctcattggacaagcagttctcgagcctggctaagcaagacatggagagggagaaggctgcccaagaccaagggaaactagaacgctcgctactcacgtgcggcttcaagcctgcccgtaatcttcctttgtaataataacatgagcaaaatcttgacagccggcagcgaatgtcgctctggagatggcaaatgtgtgttttgaactgaatggtaaatgtgcggttatctcttgaatagtatcttggct

SEQ ID NO: 32568 - DNA, 1346 bp, Zea Mays
atagtttaggcaggaggtgttttgttcgtgccttcacgggataatgggacattgggtcctggaattgatggctgggaagtatctttgaaaggaatgatgagcatagtggtactccttggacttgtcataacttccatctattggggagtgaacaagtttgttttgaatgatccttcacttccaaaggctgatcgtaagaagaaaaaggaaaagcctaaacttggcatgaaagagagtctgaaggttctgctctcctcgaggtatgtgagggatctagctaccctagtggttgcttatggcattagtatcaatcttgtcgaagtcacgtggaaatcaaaactcaaggcacagttccctagtccaaatgaatattcatctttcatgggtgatttctcgactgcaactggaattgcaactttcacaatgatgctgttaggccgtattatactacggaaatttggctggggtgtggctgcaaagatcacccccaccgttctgttgctgactggtgttggattcttctctctgattttgtttggacagccactgactcctatgcttgccactatgggtatgacccccctactggcagccgtttatgtgggtgccatgcagaacatatttagcaagagtgcaaagtacagtttatttgacccatgcaaggaaatggcatatatccctttggatgaagatatgaaggtaaaaggaaaggcagccattgatgttgtctgcaacccactgggcaagtcgggcggcgcacttatccaacagttcatgatcctgacgttcggatccctggcaaattcgactccataccttgggggcatactcctggtcatcgttctcgcgtggctaggcgcggcgagctcattggacaagcagttctcgagcctggctaagcaagacatggagagggagaaggctgcccaagaccaagggaaactagaacgctcgctactcagtaagcctgcagaaggcggcactggtgatgtactggtggagcagcagacaaatgggtcggcgacgagcaaagctactggaacagagagctcgccatcgaactcatccctccctccccccccccccccccccccccccccccccaattcaatagatcgtagttaggagagtgattacagcgagcagaaatagtcggcatttaaaataattcgtggctttcgagtttgtaacagcgtgcggcttcaagcctgcccgtaatcttcctttgtaataataacatgagcaaaatcttgacagccggcagcgaatgtcgctctggagatggcaaatgtgtgttttgaactgaatggtaaatgtgcggttatctcttgaatagtatcttggct

SEQ ID NO: 32569 - DNA, 1496 bp, Zea Mays
agctaaatcatcaatgcaatcaagaatcaaaccgttcccaatgtgctgtaacctcagtcaaaggaagaagaaaaccaccatcatatatgtctccaacagtgtggctctaataatttccctgcagacaaagtacattacacctgctggcaggactactagtaccacgccacagtgtttccagcattattattattattattattattatttttacctatgggtactgccacactgtatccatctttctctgcccggcgcttatataacgcctccccatgcttctactcctttccaatctgtgtttgtctttgcttgccccccttctcccccctcatctccccccttttcttgttcctgtgcctgtgcattggctggcgatggggtccacttctccttcaggcctggagctcaccatggctgtcccgggcctcagctcctcctctggctcagaggggtttggatgcaacaacaacaacgggagcgggaacgggaacaacatgagggacctggacatgaaccagccggcgagcggcggcgaggaggaggagttcccaatggggagcgtggaggaggaggaggacgagcgcggcggcgccggcgggccgcaccgcgccaagaagctccggctgtccaaggagcagtcccgcctcctggaggagagcttccgcctcaaccacaccctcacaccgaagcaaaaggaggccttggctgtcaagctcaagctgcggcccaggcaggtggaggtctggttccagaaccgcagggctaggacgaagcttaagcagacggagctggagtgcgagtacctgaagcgctgcttcggctcgctgaccgaggagaaccggcgtccgcgctcaccatgtgcccgcgctgcgagcgcatcaccgccgcaacggccgcgcgcaccccacgcccgccgcccgccgcgagccccttccacccgcgccgcccgtccgcggcgttttagcctagtcccaccgcatgcgactccggccggtaggggaaggagccgagagagtttggttgttagggccaggggggcaaagtggttgtgctgtgtaaatttgatgatggatggagaaaaccagcgcgggcccgtgtagctttttaggtgtaggtgtagggtttggaccttggagtcccttcgcgtcaacgtccccgtgttccgttccatgccgtgcatggctgatggatcaaaagtttgtactagcttcctatcgttgtcactccattcatgaattgccttcggacccccgcttcgatctagatatctgatgatgggcccgtttctgtttctatatggctgttcgaagcctcttgttgtgtttccacgcttgcggtcccaccttgttgggccttgtggatcgtgcgacggttcaatcggtattctgtttgggcttctactccaagtgacgccaataatcctgatatatatattgtttcattggttcctctaccatttaaggtcttattcagttaatcctgttacccataga

SEQ ID NO: 32570 - DNA, 1380 bp, Zea Mays
taatattgtttaacacgtatatctctgctcgagagcttcggaagcggatgcgcgacgcgttttcctcgtcctggctatccacggttgccacggcggcgtacgactaccaacagatccgcggtgggcggagtaccttgcgagctccgccgtcctgccgcacctcttctcccacccctatgtccgcgcgcacctccagcaaaagttctaccgccgcttcgtcgattctgatttttctgttggaggaatgtcctcaaccacatctattcagccctcagcatcttcaggtggtgcatctacttcagctgatgagaatgcaaggcctcctgattcagcacgaagcatattgtctctacagttggaccagcggtcattacatttttctgttagtgcttgggttcttattgttgccttgattggcatctttccattggcaccacattcccttcagtataagggatatcggttgtcacttcttggcacaacatgtactacaggctatgctttgtttgctttgtacaggctaccccgagcagggaacatgcaggctgttcaggtgtggtgtcaccatgtaactgcatcaaaggattttataccattcatgtactgccttatgttttctacatccaaactgcacttgaagcttgttttggtacctgtaatttgttgggcacttgaacatgtcgctcgatttctacgtcgccattttactagctcatctttgtacaggacatacttggagcaaccttgtacatgggttgagacaaacacaaatgcagtccagtttctacgttcaaatgcagagattttgacgggctttcttttgatcctatccctgttctcgcgacagcgaaatcttatgcaaacattcatgtattggcagttgctgaagctcatgtaccattctcccttcactgccgcttatcatagagctatctggctaaaaattgggcggacaattaacccttatatccaccgttacaccccttttcttcatgacccgataaatgctggcatgagatggtggtttaggtaggttgaatgcagcactgtcagtcatgtaaagagatgcaagtatgtttatggtattattttactccaaagagaatctttgagaaaactgctgcttgggagtggtgtgattagtcccttgtgtggctttgagctgatgacaatttagtagttagcatgatcagtaactcttaactcttgtaggcttgtagctagagctagtcgagatcttagcctgtttggcatgaactgaagttaggtggggaggttattattgtgaccgaattgttttgatttttctgactattggctattgctgaccacatatcagtgttatcaaagggacgttactattctacgtgttatatggtt

SEQ ID NO: 32571 - DNA, 1339 bp, Zea Mays
ctccattgccaaggaaatttcagaggcggaattgagatagaggagggagtgggaagggagacagggaggggtcagtcgtcttcctttgtccccgtgctgctcctttgcttcggagtcttgccaagcctagattcgaggagagggctccctctctttccttgcttggcctgcatcggaaggattctgatttttctgttggaggaatgtcctcaaccacatctattcagccctcagcatcttcaggtggtgcatctacttcagctgatgagaatgcaaggcctcctgattcagcacgaagcatattgtctctacagttggaccagcggtcattacatttttctgttagtgcttgggttcttattgttgccttgattggcatctttccattggcaccacattcccttcagtataagggatatcggttgtcacttcttggcacaacatgtactacaggctatgctttgtttgctttgtacaggctaccccgagcagggaacatgcaggctgttcaggtgtggtgtcaccatgtaactgcatcaaaggattttataccattcatgtactgccttatgttttctacatccaaactgcacttgaagcttgttttggtacctgtaatttgttgggcacttgaacatgtcgctcgatttctacgtcgccattttactagctcatctttgtacaggacatacttggagcaaccttgtacatgggttgagacaaacacaaatgcagtccagtttctacgttcaaatgcagagattttgacgggctttcttttgatcctatccctgttctcgcgacagcgaaatcttatgcaaacattcatgtattggcagttgctgaagctcatgtaccattctcccttcactgccgcttatcatagagctatctggctaaaaattgggcggacaattaacccttatatccaccgttacaccccttttcttcatgacccgataaatgctggcatgagatggtggtttaggtaggttgaatgcagcactgtcagtcatgtaaagagatgcaagtatgtttatggtattattttactccaaagagaatctttgagaaaactgctgcttgggagtggtgtgattagtcccttgtgtggctttgagctgatgacaatttagtagttagcatgatcagtaactcttaactcttgtaggcttgtagctagagctagtcgagatcttagcctgtttggcatgaactgaagttaggtggggaggttattattgtgaccgaattgttttgatttttctgactattggctattgctgaccacatatcagtgttatcaaagggacgttactattctacgtgttatatggtt

SEQ ID NO: 32572 - DNA, 1680 bp, Zea Mays
gcctgtttgtttttggtgggtgcaaatccccaaatccgatttggctccccgcattgcgcacaagtgccgccgctgctcccactgccgccgcataagcctgagtttccttggccatattttttctgcaacaaagatgggatggtgatgcgtgagcggatcttcagcgagagagtaaagatcgagtgctacaaacctgcaaggccgaggcaggcttagtttcagagaaaattggtcgcggaggcctcatcatgctctcgttctgttgtggcctgtggcgatgccctgtcctccttggccggttccaagcttgtggcctggggagcccattcgtctttcacttgatatgaaggacggaagaaatagagctcccgttcgtttctttctttaagaaactcaccatattcttgcctcgttatgtgggtatctttcagagtcattctctctggagtctggccaagtttgttctgggacgtatttgatctcttctcaactgtagcaggattctgatttttctgttggaggaatgtcctcaaccacatctattcagccctcagcatcttcaggtggtgcatctacttcagctgatgagaatgcaaggcctcctgattcaggcactaattcttctggaccagcacgaagcatattgtctctacagttggaccagcggtcattacatttttctgttagtgcttgggttcttattgttgccttgattggcatctttccattggcaccacattcccttcagtataagggatatcggttgtcacttcttggcacaacatgtactacaggctatgctttgtttgctttgtacaggctaccccgagcagggaacatgcaggctgttcaggtgtggtgtcaccatgtaactgcatcaaaggattttataccattcatgtactgccttatgttttctacatccaaactgcacttgaagcttgttttggtacctgtaatttgttgggcacttgaacatgtcgctcgatttctacgtcgccattttactagctcatctttgtacaggacatacttggagcaaccttgtacatgggttgagacaaacacaaatgcagtccagtttctacgttcaaatgcagagattttgacgggctttcttttgatcctatccctgttctcgcgacagcgaaatcttatgcaaacattcatgtattggcagttgctgaagctcatgtaccattctcccttcactgccgcttatcatagagctatctggctaaaaattgggcggacaattaacccttatatccaccgttacaccccttttcttcatgacccgataaatgctggcatgagatggtggtttaggtaggttgaatgcagcactgtcagtcatgtaaagagatgcaagtatgtttatggtattattttactccaaagagaatctttgagaaaactgctgcttgggagtggtgtgattagtcccttgtgtggctttgagctgatgacaatttagtagttagcatgatcagtaactcttaactcttgtaggcttgtagctagagctagtcgagatcttagcctgtttggcatgaactgaagttaggtggggaggttattattgtgaccgaattgttttgatttttctgactattggctattgctgaccacatatcagtgttatcaaagggacgttactattctacgtgttatatggtt

SEQ ID NO: 32573 - DNA, 1302 bp, Zea Mays
gttcgtttctttctttaagaaactcaccatattcttgcctcgttatgtgggtatctttcagagtcattctctctggagtctggccaagtttgttctgggacgtatttgatctcttctcaactgtagcaggattctgatttttctgttggaggaatgtcctcaaccacatctattcagccctcagcatcttcaggtggtgcatctacttcagctgatgagaatgcaaggcctcctgattcagcacgaagcatattgtctctacagttggaccagcggtcattacatttttctgttagtgcttgggttcttattgttgccttgattggcatctttccattggcaccacattcccttcagtataagggatatcggttgtcacttcttggcacaacatgtactacaggctatgctttgtttgctttgtacaggctaccccgagcagggaacatgcaggctgttcaggtgtggtgtcaccatgtaactgcatcaaaggattttataccattcatgtactgccttatgttttctacatccaaactgcacttgaagctcttttctggcagttgttttggtacctgtaatttgttgggcacttgaacatgtcgctcgatttctacgtcgccattttactagctcatctttgtacaggacatacttggagcaaccttgtacatgggttgagacaaacacaaatgcagtccagtttctacgttcaaatgcagagattttgacgggctttcttttgatcctatccctgttctcgcgacagcgaaatcttatgcaaacattcatgtattggcagttgctgaagctcatgtaccattctcccttcactgccgcttatcatagagctatctggctaaaaattgggcggacaattaacccttatatccaccgttacaccccttttcttcatgacccgataaatgctggcatgagatggtggtttaggtaggttgaatgcagcactgtcagtcatgtaaagagatgcaagtatgtttatggtattattttactccaaagagaatctttgagaaaactgctgcttgggagtggtgtgattagtcccttgtgtggctttgagctgatgacaatttagtagttagcatgatcagtaactcttaactcttgtaggcttgtagctagagctagtcgagatcttagcctgtttggcatgaactgaagttaggtggggaggttattattgtgaccgaattgttttgatttttctgactattggctattgctgaccacatatcagtgttatcaaagggacgttactattctacgtgttatatggtt

SEQ ID NO: 32574 - DNA, 1216 bp, Zea Mays
cattggtctatcgacaacctgagattctgatttttctgttggaggaatgtcctcaaccacatctattcagccctcagcatcttcaggtggtgcatctacttcagctgatgagaatgcaaggcctcctgattcaggcactaattcttctggaccagcacgaagcatattgtctctacagttggaccagcggtcattacatttttctgttagtgcttgggttcttattgttgccttgattggcatctttccattggcaccacattcccttcagtataagggatatcggttgtcacttcttggcacaacatgtactacaggctatgctttgtttgctttgtacaggctaccccgagcagggaacatgcaggctgttcaggtgtggtgtcaccatgtaactgcatcaaaggattttataccattcatgtactgccttatgttttctacatccaaactgcacttgaagctcttttctggcagttgttttggtacctgtaatttgttgggcacttgaacatgtcgctcgatttctacgtcgccattttactagctcatctttgtacaggacatacttggagcaaccttgtacatgggttgagacaaacacaaatgcagtccagtttctacgttcaaatgcagagattttgacgggctttcttttgatcctatccctgttctcgcgacagcgaaatcttatgcaaacattcatgtattggcagttgctgaagctcatgtaccattctcccttcactgccgcttatcatagagctatctggctaaaaattgggcggacaattaacccttatatccaccgttacaccccttttcttcatgacccgataaatgctggcatgagatggtggtttaggtaggttgaatgcagcactgtcagtcatgtaaagagatgcaagtatgtttatggtattattttactccaaagagaatctttgagaaaactgctgcttgggagtggtgtgattagtcccttgtgtggctttgagctgatgacaatttagtagttagcatgatcagtaactcttaactcttgtaggcttgtagctagagctagtcgagatcttagcctgtttggcatgaactgaagttaggtggggaggttattattgtgaccgaattgttttgatttttctgactattggctattgctgaccacatatcagtgttatcaaagggacgttactattctacgtgttatatggtt

SEQ ID NO: 32575 - DNA, 532 bp, Zea Mays
ctgaactctgttacatccaccacatttagaacttgctgaagctcatgtaccattctcccttcactgccgcttatcatagagctatctggctaaaaattgggcggacaattaacccttatatccaccgttacaccccttttcttcatgacccgataaatgctggcatgagatggtggtttaggtaggttgaatgcagcactgtcagtcatgtaaagagatgcaagtatgtttatggtattattttactccaaagagaatctttgagaaaactgctgcttgggagtggtgtgattagtcccttgtgtggctttgagctgatgacaatttagtagttagcatgatcagtaactcttaactcttgtaggcttgtagctagagctagtcgagatcttagcctgtttggcatgaactgaagttaggtggggaggttattattgtgaccgaattgttttgatttttctgactattggctattgctgaccacatatcagtgttatcaaagggacgttactattctacgtgttatatggtt

SEQ ID NO: 32576 - DNA, 595 bp, Zea Mays
ttatctttttttttttgaaacattgacccggttcagatgctttccaatttccctggtcccctgaaaagtgcaacatcaatcgcatgttgcgactttttgcctaaatcgccagctttattctttaacctccttacttctagtggctcatcataagatgaacacatgaatcatgcctacgaaaaactttaactgttggttggctcgaatcacatgagcggttacataccaaaaagctgtaaggggacttatctaacagaagtcacggaatacaccaaggagccgagaaaaagcagaggtgtcaactttagcaaattgccggcaagaaaaggcacagatgacacgacaggcgaaaacaactcgccaaataaaccatttagaacaaccacctatagcaaatggcattgctatctaacgatcaattctgctcaccattctaagcagggaacagaaaatgaagaatgagtcacagagtcacagtttagtatggacttgcggagaaatcgatcagattagaaaaccaaattctagcgcacggcatgaaaagctaaagataactagcgtggcaatgtcgtcgaacagttcatgggcaatgaaa

SEQ ID NO: 32577 - DNA, 1456 bp, Zea Mays
caggaatcaggcggaaaccaaataccccgaacgtccacagcgagcgagaggccgcaaactcccgagaccgtacgaaccagacgattcaccaatcaccatggcggcgccggcgcggcgcaggtcctgcatctcctccggtggagccggagcgcctccttccgctgctgcttcgcctcttctccgccctccgccgcccgctgcgaggccggtccaaggccatgctcaaggggatggactactgactactccgaacccgagataaggacatgatttaagacatgtgtgtgtttcaagtagttcgttgattgggtgcaggcgcaggggtttcggccaggccaggccttgatgctgtggaaatgcctgtacgggaacaacgtttgggctcatttttacgacgagctggctggatgttacagatactggtttctattgaagatggttcagtgatttaaacagttatcattccttgcactaggggcaggacaactgtctgtgtttcaaatgaagttggttgggccatgaaatgtcagttttgcttcactagaaggttagaaactggataatgactataaacagaaaggagaaccttaacttgcttcttggcactttaagaggtgaacttaacctcagaaaaaaaaacaaatagtgctatctgaatatgccatgctttctggagtgaacggcagtggatgatgccaaaagtcttttgtagagctactccaagggatcccatgcaagcaagataaacctcatctctttgagttccctcgacggttcccaatccaagcccacatcagacgataaaatgattgagttcggcaaacttttaattcaaggtgggctcactgtctttgttcggtcagcagaggggatgatcagatcagatggctgcctgcgggcagctcagagagcctggagactaccagctgcctctgcaccgtgcacctgagaaaattttgaggtcgtcttgtgatgctagacagtgcattacagtaaactggtcctgaggcctgagaaaattttgaggtcgttttgtgatgctagacagtgcattacagtaaactttagcgtcgtcgagaccgaagtgggctgaaaagcgctgcatcgtgcagccgcgtgacagtgggcgtctttcgcatggttggttcgtcgctgcggtctgagtcgccaaagctgaattctgttgtcatcggggagtgattcgaaaagtttggaacgaacctatcggtggtcaggaatgaggtaagaatctgaaggactacaaggttggcttgcctgagcgagataccttaaccattaaggtgtgcatggcacttggcacctagtcaccagaccagatcaccctaaatggtggaaagaaaaaagcgaaagatctagcgcaagccccacccggatcaaagtttctctctctctcttttccccccaaaagcaagtccatcacgctgcacattatggg

SEQ ID NO: 32578 - DNA, 1561 bp, Zea Mays
caggaatcaggcggaaaccaaataccccgaacgtccacagcgagcgagaggccgcaaactcccgagaccgtacgaaccagacgattcaccaatcaccatggcggcgccggcgcggcgcaggtcctgcatctcctccggtggagccggagcgcctccttccgctgctgcttcgcctcttctccgccctccgccgcccgctgcgaggccggtccaaggccatgctcaaggggatggactactgactactccgaacccgagataaggacatgatttaagacatgtgtgtgtttcaagtagttcgttgattgggtgcaggcgcaggggtttcggccaggccaggccttgatgctgtggaaatgcctgtacgggaacaacgtttgggctcatttttacgacgagctggctggggcaggacaactgtctgtgtttcaaatgaagttggttgggccatgaaatgtcagttttgcttcactagaagggcatgggtcaaccatttcacaatatcgacaatgtaataaaagcctcagcaataatggttcatgagcaaggccattttagccctcgcaaggttactgtctccacaagtggttttgtccctcagttaggaacccaattgcttgctgccgccagtcttaatgcaaggacagatgaggttagaaactggataatgactataaacagaaaggagaaccttaacttgcttcttggcactttaagaggtgaacttaacctcagaaaaaaaaacaaatagtgctatctgaatatgccatgctttctggagtgaacggcagtggatgatgccaaaagtcttttgtagagctactccaagggatcccatgcaagcaagataaacctcatctctttgagttccctcgacggttcccaatccaagcccacatcagacgataaaatgattgagttcggcaaacttttaattcaaggtgggctcactgtctttgttcggtcagcagaggggatgatcagatcagatggctgcctgcgggcagctcagagagcctggagactaccagctgcctctgcaccgtgcacctgagaaaattttgaggtcgtcttgtgatgctagacagtgcattacagtaaactggtcctgaggcctgagaaaattttgaggtcgttttgtgatgctagacagtgcattacagtaaactttagcgtcgtcgagaccgaagtgggctgaaaagcgctgcatcgtgcagccgcgtgacagtgggcgtctttcgcatggttggttcgtcgctgcggtctgagtcgccaaagctgaattctgttgtcatcggggagtgattcgaaaagtttggaacgaacctatcggtggtcaggaatgaggtaagaatctgaaggactacaaggttggcttgcctgagcgagataccttaaccattaaggtgtgcatggcacttggcacctagtcaccagaccagatcaccctaaatggtggaaagaaaaaagcgaaagatctagcgcaagccccacccggatcaaagtttctctctctctcttttccccccaaaagcaagtccatcacgctgcacattatggg

SEQ ID NO: 32579 - DNA, 1317 bp, Zea Mays
caggaatcaggcggaaaccaaataccccgaacgtccacagcgagcgagaggccgcaaactcccgagaccgtacgaaccagacgattcaccaatcaccatggcggcgccggcgcggcgcaggtcctgcatctcctccggtggagccggagcgcctccttccgctgctgcttcgcctcttctccgccctccgccgcccgctgcgaggccggtccaaggccatgctcaaggggatggactactgactactccgaacccgagataaggacatgatttaagacatgtgtgtgtttcaagtagttcgttgattgggtgcaggcgcaggggtttcggccaggccaggccttgatgctgtggaaatgcctgtacgggaacaacgtttgggctcatttttacgacgagctggctggatgttacagatactggtttctattgaagatggttcagtgatttaaacagttatcattccttgcactaggggcaggacaactgtctgtgtttcaaatgaagttggttgggccatgaaatgtcagttttgcttcactagaagtggatgatgccaaaagtcttttgtagagctactccaagggatcccatgcaagcaagataaacctcatctctttgagttccctcgacggttcccaatccaagcccacatcagacgataaaatgattgagttcggcaaacttttaattcaaggtgggctcactgtctttgttcggtcagcagaggggatgatcagatcagatggctgcctgcgggcagctcagagagcctggagactaccagctgcctctgcaccgtgcacctgagaaaattttgaggtcgtcttgtgatgctagacagtgcattacagtaaactggtcctgaggcctgagaaaattttgaggtcgttttgtgatgctagacagtgcattacagtaaactttagcgtcgtcgagaccgaagtgggctgaaaagcgctgcatcgtgcagccgcgtgacagtgggcgtctttcgcatggttggttcgtcgctgcggtctgagtcgccaaagctgaattctgttgtcatcggggagtgattcgaaaagtttggaacgaacctatcggtggtcaggaatgaggtaagaatctgaaggactacaaggttggcttgcctgagcgagataccttaaccattaaggtgtgcatggcacttggcacctagtcaccagaccagatcaccctaaatggtggaaagaaaaaagcgaaagatctagcgcaagccccacccggatcaaagtttctctctctctcttttccccccaaaagcaagtccatcacgctgcacattatggg

SEQ ID NO: 32580 - DNA, 1702 bp, Zea Mays
caggaatcaggcggaaaccaaataccccgaacgtccacagcgagcgagaggccgcaaactcccgagaccgtacgaaccagacgattcaccaatcaccatggcggcgccggcgcggcgcaggtcctgcatctcctccggtggagccggagcgcctccttccgctgctgcttcgcctcttctccgccctccgccgcccgctgcgaggccggtccaaggccatgctcaaggggatggactactgactactccgaacccgagataaggacatgatttaagacatgtgtgtgtttcaagtagttcgttgattgggtgcaggcgcaggggtttcggccaggccaggccttgatgctgtggaaatgcctgtacgggaacaacgtttgggctcatttttacgacgagctggctggaagatgataactgagcatgctgatctcaaggcattaattgtgaaggacattcatcggatagaacccgtaaggatgttacagatactggtttctattgaagatggttcagtgatttaaacagttatcattccttgcactaggggcaggacaactgtctgtgtttcaaatgaagttggttgggccatgaaatgtcagttttgcttcactagaagggcatgggtcaaccatttcacaatatcgacaatgtaataaaagcctcagcaataatggttcatgagcaaggccattttagccctcgcaaggttactgtctccacaagtggttttgtccctcagttaggaacccaattgcttgctgccgccagtcttaatgcaaggacagatgaggttagaaactggataatgactataaacagaaaggagaaccttaacttgcttcttggcactttaagaggtgaacttaacctcagaaaaaaaaacaaatagtgctatctgaatatgccatgctttctggagtgaacggcagtggatgatgccaaaagtcttttgtagagctactccaagggatcccatgcaagcaagataaacctcatctctttgagttccctcgacggttcccaatccaagcccacatcagacgataaaatgattgagttcggcaaacttttaattcaaggtgggctcactgtctttgttcggtcagcagaggggatgatcagatcagatggctgcctgcgggcagctcagagagcctggagactaccagctgcctctgcaccgtgcacctgagaaaattttgaggtcgtcttgtgatgctagacagtgcattacagtaaactggtcctgaggcctgagaaaattttgaggtcgttttgtgatgctagacagtgcattacagtaaactttagcgtcgtcgagaccgaagtgggctgaaaagcgctgcatcgtgcagccgcgtgacagtgggcgtctttcgcatggttggttcgtcgctgcggtctgagtcgccaaagctgaattctgttgtcatcggggagtgattcgaaaagtttggaacgaacctatcggtggtcaggaatgaggtaagaatctgaaggactacaaggttggcttgcctgagcgagataccttaaccattaaggtgtgcatggcacttggcacctagtcaccagaccagatcaccctaaatggtggaaagaaaaaagcgaaagatctagcgcaagccccacccggatcaaagtttctctctctctcttttccccccaaaagcaagtccatcacgctgcacattatggg

SEQ ID NO: 32581 - DNA, 1711 bp, Zea Mays
caggaatcaggcggaaaccaaataccccgaacgtccacagcgagcgagaggccgcaaactcccgagaccgtacgaaccagacgattcaccaatcaccatggcggcgccggcgcggcgcaggtcctgcatctcctccggtggagccggagcgcctccttccgctgctgcttcgcctcttctccgccctccgccgcccgctgcgaggccggtccaaggccatgctcaaggggatggactactgactactccgaacccgagataaggacatgatttaagacatgtgtgtgtttcaagtagttcgttgattgggtgcaggcgcaggggtttcggccaggccaggccttgatgctgtggaaatgcctgtacgggaacaacgtttgggctcatttttacgacgagctggctggtttaaacaaggatttcaggaagatgataactgagcatgctgatctcaaggcattaattgtgaaggacattcatcggatagaacccgtaagatactggtttctattgaagatggttcagtgatttaaacagttatcattccttgcactaggggcaggacaactgtctgtgtttcaaatgaagttggttgggccatgaaatgtcagttttgcttcactagaagggcatgggtcaaccatttcacaatatcgacaatgtaataaaagcctcagcaataatggttcatgagcaaggccattttagccctcgcaaggttactgtctccacaagtggttttgtccctcagttaggaacccaattgcttgctgccgccagtcttaatgcaaggacagatgaggttagaaactggataatgactataaacagaaaggagaaccttaacttgcttcttggcactttaagaggtgaacttaacctcagaaaaaaaaacaaatagtgctatctgaatatgccatgctttctggagtgaacggcagtggatgatgccaaaagtcttttgtagagctactccaagggatcccatgcaagcaagataaacctcatctctttgagttccctcgacggttcccaatccaagcccacatcagacgataaaatgattgagttcggcaaacttttaattcaaggtgggctcactgtctttgttcggtcagcagaggggatgatcagatcagatggctgcctgcgggcagctcagagagcctggagactaccagctgcctctgcaccgtgcacctgagaaaattttgaggtcgtcttgtgatgctagacagtgcattacagtaaactggtcctgaggcctgagaaaattttgaggtcgttttgtgatgctagacagtgcattacagtaaactttagcgtcgtcgagaccgaagtgggctgaaaagcgctgcatcgtgcagccgcgtgacagtgggcgtctttcgcatggttggttcgtcgctgcggtctgagtcgccaaagctgaattctgttgtcatcggggagtgattcgaaaagtttggaacgaacctatcggtggtcaggaatgaggtaagaatctgaaggactacaaggttggcttgcctgagcgagataccttaaccattaaggtgtgcatggcacttggcacctagtcaccagaccagatcaccctaaatggtggaaagaaaaaagcgaaagatctagcgcaagccccacccggatcaaagtttctctctctctcttttccccccaaaagcaagtccatcacgctgcacattatggg

SEQ ID NO: 32582 - DNA, 1489 bp, Zea Mays
caggaatcaggcggaaaccaaataccccgaacgtccacagcgagcgagaggccgcaaactcccgagaccgtacgaaccagacgattcaccaatcaccatggcggcgccggcgcggcgcaggtcctgcatctcctccggtggagccggagcgcctccttccgctgctgcttcgcctcttctccgccctccgccgcccgctgcgaggccggtccaaggccatgctcaaggggatggactactgactactccgaacccgagataaggacatgatttaagacatgtgtgtgtttcaagtagttcgttgattgggtgcaggcgcaggggtttcggccaggccaggccttgatgctgtggaaatgcctgtacgggaacaacgtttgggctcatttttacgacgagctggctggggcaggacaactgtctgtgtttcaaatgaagttggttgggccatgaaatgtcagttttgcttcactagaagggcatgggtcaaccatttcacaatatcgacaatgtaataaaagcctcagcaataatggttcatgagcaaggccattttagccctcgcaaggttactgtctccacaagtggttttgtccctcagttaggaacccaattgcttgctgccgccagtcttaatgcaaggacagatgaggttagaaactggataatgactataaacagaaaggagaaccttaacttgcttcttggcactttaagagtggatgatgccaaaagtcttttgtagagctactccaagggatcccatgcaagcaagataaacctcatctctttgagttccctcgacggttcccaatccaagcccacatcagacgataaaatgattgagttcggcaaacttttaattcaaggtgggctcactgtctttgttcggtcagcagaggggatgatcagatcagatggctgcctgcgggcagctcagagagcctggagactaccagctgcctctgcaccgtgcacctgagaaaattttgaggtcgtcttgtgatgctagacagtgcattacagtaaactggtcctgaggcctgagaaaattttgaggtcgttttgtgatgctagacagtgcattacagtaaactttagcgtcgtcgagaccgaagtgggctgaaaagcgctgcatcgtgcagccgcgtgacagtgggcgtctttcgcatggttggttcgtcgctgcggtctgagtcgccaaagctgaattctgttgtcatcggggagtgattcgaaaagtttggaacgaacctatcggtggtcaggaatgaggtaagaatctgaaggactacaaggttggcttgcctgagcgagataccttaaccattaaggtgtgcatggcacttggcacctagtcaccagaccagatcaccctaaatggtggaaagaaaaaagcgaaagatctagcgcaagccccacccggatcaaagtttctctctctctcttttccccccaaaagcaagtccatcacgctgcacattatggg

SEQ ID NO: 32583 - DNA, 1333 bp, Zea Mays
caggaatcaggcggaaaccaaataccccgaacgtccacagcgagcgagaggccgcaaactcccgagaccgtacgaaccagacgattcaccaatcaccatggcggcgccggcgcggcgcaggtcctgcatctcctccggtggagccggagcgcctccttccgctgctgcttcgcctcttctccgccctccgccgcccgctgcgaggccggtccaaggccatgctcaaggggatggactactgactactccgaacccgagataaggacatgatttaagacatgtgtgtgtttcaagtagttcgttgattgggtgcaggcgcaggggtttcggccaggccaggccttgatgctgtggaaatgcctgtacgggaacaacgtttgggctcatttttacgacgagctggctggtttaaacaaggatttcaggaagatgataactgagcatgctgatctcaaggcattaattgtgaaggacattcatcggatagaacccgtaaggacaactgtctgtgtttcaaatgaagttggttgggccatgaaatgtcagttttgcttcactagaagtggatgatgccaaaagtcttttgtagagctactccaagggatcccatgcaagcaagataaacctcatctctttgagttccctcgacggttcccaatccaagcccacatcagacgataaaatgattgagttcggcaaacttttaattcaaggtgggctcactgtctttgttcggtcagcagaggggatgatcagatcagatggctgcctgcgggcagctcagagagcctggagactaccagctgcctctgcaccgtgcacctgagaaaattttgaggtcgtcttgtgatgctagacagtgcattacagtaaactggtcctgaggcctgagaaaattttgaggtcgttttgtgatgctagacagtgcattacagtaaactttagcgtcgtcgagaccgaagtgggctgaaaagcgctgcatcgtgcagccgcgtgacagtgggcgtctttcgcatggttggttcgtcgctgcggtctgagtcgccaaagctgaattctgttgtcatcggggagtgattcgaaaagtttggaacgaacctatcggtggtcaggaatgaggtaagaatctgaaggactacaaggttggcttgcctgagcgagataccttaaccattaaggtgtgcatggcacttggcacctagtcaccagaccagatcaccctaaatggtggaaagaaaaaagcgaaagatctagcgcaagccccacccggatcaaagtttctctctctctcttttccccccaaaagcaagtccatcacgctgcacattatggg

SEQ ID NO: 32584 - DNA, 1491 bp, Zea Mays
caggaatcaggcggaaaccaaataccccgaacgtccacagcgagcgagaggccgcaaactcccgagaccgtacgaaccagacgattcaccaatcaccatggcggcgccggcgcggcgcaggtcctgcatctcctccggtggagccggagcgcctccttccgctgctgcttcgcctcttctccgccctccgccgcccgctgcgaggccggtccaaggccatgctcaaggggatggactactgactactccgaacccgagataaggacatgatttaagacatgtgtgtgtttcaagtagttcgttgattgggtgcaggcgcaggggtttcggccaggccaggccttgatgctgtggaaatgcctgtacgggaacaacgtttgggctcatttttacgacgagctggctggatgttacagatactggtttctattgaagatggttcagtgatttaaacagttatcattccttgcactaggggcaggacaactgtctgtgtttcaaatgaagttggttgggccatgaaatgtcagttttgcttcactagaagggcatgggtcaaccatttcacaatatcgacaatgtaataaaagcctcagcaataatggttcatgagcaaggccattttagccctcgcaaggttactgtctccacaagtggttttgtccctcagttaggaacccaattgcttgctgccgccagtcttaatgcaaggacagatgagtggatgatgccaaaagtcttttgtagagctactccaagggatcccatgcaagcaagataaacctcatctctttgagttccctcgacggttcccaatccaagcccacatcagacgataaaatgattgagttcggcaaacttttaattcaaggtgggctcactgtctttgttcggtcagcagaggggatgatcagatcagatggctgcctgcgggcagctcagagagcctggagactaccagctgcctctgcaccgtgcacctgagaaaattttgaggtcgtcttgtgatgctagacagtgcattacagtaaactggtcctgaggcctgagaaaattttgaggtcgttttgtgatgctagacagtgcattacagtaaactttagcgtcgtcgagaccgaagtgggctgaaaagcgctgcatcgtgcagccgcgtgacagtgggcgtctttcgcatggttggttcgtcgctgcggtctgagtcgccaaagctgaattctgttgtcatcggggagtgattcgaaaagtttggaacgaacctatcggtggtcaggaatgaggtaagaatctgaaggactacaaggttggcttgcctgagcgagataccttaaccattaaggtgtgcatggcacttggcacctagtcaccagaccagatcaccctaaatggtggaaagaaaaaagcgaaagatctagcgcaagccccacccggatcaaagtttctctctctctcttttccccccaaaagcaagtccatcacgctgcacattatggg

SEQ ID NO: 32585 - DNA, 1339 bp, Zea Mays
caggaatcaggcggaaaccaaataccccgaacgtccacagcgagcgagaggccgcaaactcccgagaccgtacgaaccagacgattcaccaatcaccatggcggcgccggcgcggcgcaggtcctgcatctcctccggtggagccggagcgcctccttccgctgctgcttcgcctcttctccgccctccgccgcccgctgcgaggccggtccaaggccatgctcaaggggatggactactgactactccgaacccgagataaggacatgatttaagacatgtgtgtgtttcaagtagttcgttgattgggtgcaggcgcaggggtttcggccaggccaggccttgatgctgtggaaatgcctgtacgggaacaacgtttgggctcatttttacgacgagctggctggtttaaacaaggatttcaggaagatgataactgagcatgctgatctcaaggcattaattgtgaaggacattcatcggatagaacccgtaaggggcaggacaactgtctgtgtttcaaatgaagttggttgggccatgaaatgtcagttttgcttcactagaagtggatgatgccaaaagtcttttgtagagctactccaagggatcccatgcaagcaagataaacctcatctctttgagttccctcgacggttcccaatccaagcccacatcagacgataaaatgattgagttcggcaaacttttaattcaaggtgggctcactgtctttgttcggtcagcagaggggatgatcagatcagatggctgcctgcgggcagctcagagagcctggagactaccagctgcctctgcaccgtgcacctgagaaaattttgaggtcgtcttgtgatgctagacagtgcattacagtaaactggtcctgaggcctgagaaaattttgaggtcgttttgtgatgctagacagtgcattacagtaaactttagcgtcgtcgagaccgaagtgggctgaaaagcgctgcatcgtgcagccgcgtgacagtgggcgtctttcgcatggttggttcgtcgctgcggtctgagtcgccaaagctgaattctgttgtcatcggggagtgattcgaaaagtttggaacgaacctatcggtggtcaggaatgaggtaagaatctgaaggactacaaggttggcttgcctgagcgagataccttaaccattaaggtgtgcatggcacttggcacctagtcaccagaccagatcaccctaaatggtggaaagaaaaaagcgaaagatctagcgcaagccccacccggatcaaagtttctctctctctcttttccccccaaaagcaagtccatcacgctgcacattatggg

SEQ ID NO: 32586 - DNA, 1647 bp, Zea Mays
caggaatcaggcggaaaccaaataccccgaacgtccacagcgagcgagaggccgcaaactcccgagaccgtacgaaccagacgattcaccaatcaccatggcggcgccggcgcggcgcaggtcctgcatctcctccggtggagccggagcgcctccttccgctgctgcttcgcctcttctccgccctccgccgcccgctgcgaggccggtccaaggccatgctcaaggggatggactactgactactccgaacccgagataaggacatgatttaagacatgtgtgtgtttcaagtagttcgttgattgggtgcaggcgcaggggtttcggccaggccaggccttgatgctgtggaaatgcctgtacgggaacaacgtttgggctcatttttacgacgagctggctggtttaaacaaggatttcaggaagatgataactgagcatgctgatctcaaggcattaattgtgaaggacattcatcggatagaacccgggcaggacaactgtctgtgtttcaaatgaagttggttgggccatgaaatgtcagttttgcttcactagaagggcatgggtcaaccatttcacaatatcgacaatgtaataaaagcctcagcaataatggttcatgagcaaggccattttagccctcgcaaggttactgtctccacaagtggttttgtccctcagttaggaacccaattgcttgctgccgccagtcttaatgcaaggacagatgaggttagaaactggataatgactataaacagaaaggagaaccttaacttgcttcttggcactttaagaggtgaacttaacctcagaaaaaaaaacaaatagtgctatctgaatatgccatgctttctggagtgaacggcagtggatgatgccaaaagtcttttgtagagctactccaagggatcccatgcaagcaagataaacctcatctctttgagttccctcgacggttcccaatccaagcccacatcagacgataaaatgattgagttcggcaaacttttaattcaaggtgggctcactgtctttgttcggtcagcagaggggatgatcagatcagatggctgcctgcgggcagctcagagagcctggagactaccagctgcctctgcaccgtgcacctgagaaaattttgaggtcgtcttgtgatgctagacagtgcattacagtaaactggtcctgaggcctgagaaaattttgaggtcgttttgtgatgctagacagtgcattacagtaaactttagcgtcgtcgagaccgaagtgggctgaaaagcgctgcatcgtgcagccgcgtgacagtgggcgtctttcgcatggttggttcgtcgctgcggtctgagtcgccaaagctgaattctgttgtcatcggggagtgattcgaaaagtttggaacgaacctatcggtggtcaggaatgaggtaagaatctgaaggactacaaggttggcttgcctgagcgagataccttaaccattaaggtgtgcatggcacttggcacctagtcaccagaccagatcaccctaaatggtggaaagaaaaaagcgaaagatctagcgcaagccccacccggatcaaagtttctctctctctcttttccccccaaaagcaagtccatcacgctgcacattatggg

SEQ ID NO: 32587 - DNA, 1706 bp, Zea Mays
caggaatcaggcggaaaccaaataccccgaacgtccacagcgagcgagaggccgcaaactcccgagaccgtacgaaccagacgattcaccaatcaccatggcggcgccggcgcggcgcaggtcctgcatctcctccggtggagccggagcgcctccttccgctgctgcttcgcctcttctccgccctccgccgcccgctgcgaggccggtccaaggccatgctcaaggggatggactactgactactccgaacccgagataaggacatgatttaagacatgtgtgtgtttcaagtagttcgttgattgggtgcaggcgcaggggtttcggccaggccaggccttgatgctgtggaaatgcctgtacgggaacaacgtttgggctcatttttacgacgagctggctggtttaaacaaggatttcaggaagatgataactgagcatgctgatctcaaggcattaattgtgaaggacattcatcggatagaacccatactggtttctattgaagatggttcagtgatttaaacagttatcattccttgcactaggggcaggacaactgtctgtgtttcaaatgaagttggttgggccatgaaatgtcagttttgcttcactagaagggcatgggtcaaccatttcacaatatcgacaatgtaataaaagcctcagcaataatggttcatgagcaaggccattttagccctcgcaaggttactgtctccacaagtggttttgtccctcagttaggaacccaattgcttgctgccgccagtcttaatgcaaggacagatgaggttagaaactggataatgactataaacagaaaggagaaccttaacttgcttcttggcactttaagaggtgaacttaacctcagaaaaaaaaacaaatagtgctatctgaatatgccatgctttctggagtgaacggcagtggatgatgccaaaagtcttttgtagagctactccaagggatcccatgcaagcaagataaacctcatctctttgagttccctcgacggttcccaatccaagcccacatcagacgataaaatgattgagttcggcaaacttttaattcaaggtgggctcactgtctttgttcggtcagcagaggggatgatcagatcagatggctgcctgcgggcagctcagagagcctggagactaccagctgcctctgcaccgtgcacctgagaaaattttgaggtcgtcttgtgatgctagacagtgcattacagtaaactggtcctgaggcctgagaaaattttgaggtcgttttgtgatgctagacagtgcattacagtaaactttagcgtcgtcgagaccgaagtgggctgaaaagcgctgcatcgtgcagccgcgtgacagtgggcgtctttcgcatggttggttcgtcgctgcggtctgagtcgccaaagctgaattctgttgtcatcggggagtgattcgaaaagtttggaacgaacctatcggtggtcaggaatgaggtaagaatctgaaggactacaaggttggcttgcctgagcgagataccttaaccattaaggtgtgcatggcacttggcacctagtcaccagaccagatcaccctaaatggtggaaagaaaaaagcgaaagatctagcgcaagccccacccggatcaaagtttctctctctctcttttccccccaaaagcaagtccatcacgctgcacattatggg

SEQ ID NO: 32588 - DNA, 1652 bp, Zea Mays
caggaatcaggcggaaaccaaataccccgaacgtccacagcgagcgagaggccgcaaactcccgagaccgtacgaaccagacgattcaccaatcaccatggcggcgccggcgcggcgcaggtcctgcatctcctccggtggagccggagcgcctccttccgctgctgcttcgcctcttctccgccctccgccgcccgctgcgaggccggtccaaggccatgctcaaggggatggactactgactactccgaacccgagataaggacatgatttaagacatgtgtgtgtttcaagtagttcgttgattgggtgcaggcgcaggggtttcggccaggccaggccttgatgctgtggaaatgcctgtacgggaacaacgtttgggctcatttttacgacgagctggctggtttaaacaaggatttcaggaagatgataactgagcatgctgatctcaaggcattaattgtgaaggacattcatcggatagaacccgtaaggggcaggacaactgtctgtgtttcaaatgaagttggttgggccatgaaatgtcagttttgcttcactagaagggcatgggtcaaccatttcacaatatcgacaatgtaataaaagcctcagcaataatggttcatgagcaaggccattttagccctcgcaaggttactgtctccacaagtggttttgtccctcagttaggaacccaattgcttgctgccgccagtcttaatgcaaggacagatgaggttagaaactggataatgactataaacagaaaggagaaccttaacttgcttcttggcactttaagaggtgaacttaacctcagaaaaaaaaacaaatagtgctatctgaatatgccatgctttctggagtgaacggcagtggatgatgccaaaagtcttttgtagagctactccaagggatcccatgcaagcaagataaacctcatctctttgagttccctcgacggttcccaatccaagcccacatcagacgataaaatgattgagttcggcaaacttttaattcaaggtgggctcactgtctttgttcggtcagcagaggggatgatcagatcagatggctgcctgcgggcagctcagagagcctggagactaccagctgcctctgcaccgtgcacctgagaaaattttgaggtcgtcttgtgatgctagacagtgcattacagtaaactggtcctgaggcctgagaaaattttgaggtcgttttgtgatgctagacagtgcattacagtaaactttagcgtcgtcgagaccgaagtgggctgaaaagcgctgcatcgtgcagccgcgtgacagtgggcgtctttcgcatggttggttcgtcgctgcggtctgagtcgccaaagctgaattctgttgtcatcggggagtgattcgaaaagtttggaacgaacctatcggtggtcaggaatgaggtaagaatctgaaggactacaaggttggcttgcctgagcgagataccttaaccattaaggtgtgcatggcacttggcacctagtcaccagaccagatcaccctaaatggtggaaagaaaaaagcgaaagatctagcgcaagccccacccggatcaaagtttctctctctctcttttccccccaaaagcaagtccatcacgctgcacattatggg

SEQ ID NO: 32589 - DNA, 1473 bp, Zea Mays
caggaatcaggcggaaaccaaataccccgaacgtccacagcgagcgagaggccgcaaactcccgagaccgtacgaaccagacgattcaccaatcaccatggcggcgccggcgcggcgcaggtcctgcatctcctccggtggagccggagcgcctccttccgctgctgcttcgcctcttctccgccctccgccgcccgctgcgaggccggtccaaggccatgctcaaggggatggactactgactactccgaacccgagataaggacatgatttaagacatgtgtgtgtttcaagtagttcgttgattgggtgcaggcgcaggggtttcggccaggccaggccttgatgctgtggaaatgcctgtacgggaacaacgtttgggctcatttttacgacgagctggctggtttaaacaaggatttcaggaagatgataactgagcatgctgatctcaaggcattaattgtgaaggacattcatcggatagaacccgggcaggacaactgtctgtgtttcaaatgaagttggttgggccatgaaatgtcagttttgcttcactagaaggttagaaactggataatgactataaacagaaaggagaaccttaacttgcttcttggcactttaagaggtgaacttaacctcagaaaaaaaaacaaatagtgctatctgaatatgccatgctttctggagtgaacggcagtggatgatgccaaaagtcttttgtagagctactccaagggatcccatgcaagcaagataaacctcatctctttgagttccctcgacggttcccaatccaagcccacatcagacgataaaatgattgagttcggcaaacttttaattcaaggtgggctcactgtctttgttcggtcagcagaggggatgatcagatcagatggctgcctgcgggcagctcagagagcctggagactaccagctgcctctgcaccgtgcacctgagaaaattttgaggtcgtcttgtgatgctagacagtgcattacagtaaactggtcctgaggcctgagaaaattttgaggtcgttttgtgatgctagacagtgcattacagtaaactttagcgtcgtcgagaccgaagtgggctgaaaagcgctgcatcgtgcagccgcgtgacagtgggcgtctttcgcatggttggttcgtcgctgcggtctgagtcgccaaagctgaattctgttgtcatcggggagtgattcgaaaagtttggaacgaacctatcggtggtcaggaatgaggtaagaatctgaaggactacaaggttggcttgcctgagcgagataccttaaccattaaggtgtgcatggcacttggcacctagtcaccagaccagatcaccctaaatggtggaaagaaaaaagcgaaagatctagcgcaagccccacccggatcaaagtttctctctctctcttttccccccaaaagcaagtccatcacgctgcacattatggg

SEQ ID NO: 32590 - DNA, 1633 bp, Zea Mays
caggaatcaggcggaaaccaaataccccgaacgtccacagcgagcgagaggccgcaaactcccgagaccgtacgaaccagacgattcaccaatcaccatggcggcgccggcgcggcgcaggtcctgcatctcctccggtggagccggagcgcctccttccgctgctgcttcgcctcttctccgccctccgccgcccgctgcgaggccggtccaaggccatgctcaaggggatggactactgactactccgaacccgagataaggacatgatttaagacatgtgtgtgtttcaagtagttcgttgattgggtgcaggcgcaggggtttcggccaggccaggccttgatgctgtggaaatgcctgtacgggaacaacgtttgggctcatttttacgacgagctggctggaagatgataactgagcatgctgatctcaaggcattaattgtgaaggacattcatcggatagaacccgtaaggggcaggacaactgtctgtgtttcaaatgaagttggttgggccatgaaatgtcagttttgcttcactagaagggcatgggtcaaccatttcacaatatcgacaatgtaataaaagcctcagcaataatggttcatgagcaaggccattttagccctcgcaaggttactgtctccacaagtggttttgtccctcagttaggaacccaattgcttgctgccgccagtcttaatgcaaggacagatgaggttagaaactggataatgactataaacagaaaggagaaccttaacttgcttcttggcactttaagaggtgaacttaacctcagaaaaaaaaacaaatagtgctatctgaatatgccatgctttctggagtgaacggcagtggatgatgccaaaagtcttttgtagagctactccaagggatcccatgcaagcaagataaacctcatctctttgagttccctcgacggttcccaatccaagcccacatcagacgataaaatgattgagttcggcaaacttttaattcaaggtgggctcactgtctttgttcggtcagcagaggggatgatcagatcagatggctgcctgcgggcagctcagagagcctggagactaccagctgcctctgcaccgtgcacctgagaaaattttgaggtcgtcttgtgatgctagacagtgcattacagtaaactggtcctgaggcctgagaaaattttgaggtcgttttgtgatgctagacagtgcattacagtaaactttagcgtcgtcgagaccgaagtgggctgaaaagcgctgcatcgtgcagccgcgtgacagtgggcgtctttcgcatggttggttcgtcgctgcggtctgagtcgccaaagctgaattctgttgtcatcggggagtgattcgaaaagtttggaacgaacctatcggtggtcaggaatgaggtaagaatctgaaggactacaaggttggcttgcctgagcgagataccttaaccattaaggtgtgcatggcacttggcacctagtcaccagaccagatcaccctaaatggtggaaagaaaaaagcgaaagatctagcgcaagccccacccggatcaaagtttctctctctctcttttccccccaaaagcaagtccatcacgctgcacattatggg

SEQ ID NO: 32591 - DNA, 1630 bp, Zea Mays
caggaatcaggcggaaaccaaataccccgaacgtccacagcgagcgagaggccgcaaactcccgagaccgtacgaaccagacgattcaccaatcaccatggcggcgccggcgcggcgcaggtcctgcatctcctccggtggagccggagcgcctccttccgctgctgcttcgcctcttctccgccctccgccgcccgctgcgaggccggtccaaggccatgctcaaggggatggactactgactactccgaacccgagataaggacatgatttaagacatgtgtgtgtttcaagtagttcgttgattgggtgcaggcgcaggggtttcggccaggccaggccttgatgctgtggaaatgcctgtacgggaacaacgtttgggctcatttttacgacgagctggctggatgttacagatactggtttctattgaagatggttcagtgatttaaacagttatcattccttgcactaggggcaggacaactgtctgtgtttcaaatgaagttggttgggccatgaaatgtcagttttgcttcactagaagggcatgggtcaaccatttcacaatatcgacaatgtaataaaagcctcagcaataatggttcatgagcaaggccattttagccctcgcaaggttactgtctccacaagtggttttgtccctcagttaggaacccaattgcttgctgccgccagtcttaatgcaaggacagatgaggttagaaactggataatgactataaacagaaaggagaaccttaacttgcttcttggcactttaagaggtgaacttaacctcagaaaaaaaaacaaatagtgctatctgaatatgccatgctttctggagtgaacggcagtggatgatgccaaaagtcttttgtagagctactccaagggatcccatgcaagcaagataaacctcatctctttgagttccctcgacggttcccaatccaagcccacatcagacgataaaatgattgagttcggcaaacttttaattcaaggtgggctcactgtctttgttcggtcagcagaggggatgatcagatcagatggctgcctgcgggcagctcagagagcctggagactaccagctgcctctgcaccgtgcacctgagaaaattttgaggtcgtcttgtgatgctagacagtgcattacagtaaactggtcctgaggcctgagaaaattttgaggtcgttttgtgatgctagacagtgcattacagtaaactttagcgtcgtcgagaccgaagtgggctgaaaagcgctgcatcgtgcagccgcgtgacagtgggcgtctttcgcatggttggttcgtcgctgcggtctgagtcgccaaagctgaattctgttgtcatcggggagtgattcgaaaagtttggaacgaacctatcggtggtcaggaatgaggtaagaatctgaaggactacaaggttggcttgcctgagcgagataccttaaccattaaggtgtgcatggcacttggcacctagtcaccagaccagatcaccctaaatggtggaaagaaaaaagcgaaagatctagcgcaagccccacccggatcaaagtttctctctctctcttttccccccaaaagcaagtccatcacgctgcacattatggg

SEQ ID NO: 32592 - DNA, 1716 bp, Zea Mays
caggaatcaggcggaaaccaaataccccgaacgtccacagcgagcgagaggccgcaaactcccgagaccgtacgaaccagacgattcaccaatcaccatggcggcgccggcgcggcgcaggtcctgcatctcctccggtggagccggagcgcctccttccgctgctgcttcgcctcttctccgccctccgccgcccgctgcgaggccggtccaaggccatgctcaaggggatggactactgactactccgaacccgagataaggacatgatttaagacatgtgtgtgtttcaagtagttcgttgattgggtgcaggcgcaggggtttcggccaggccaggccttgatgctgtggaaatgcctgtacgggaacaacgtttgggctcatttttacgacgagctggctggtttaaacaaggatttcaggaagatgataactgagcatgctgatctcaaggcattaattgtgaaggacattcatcggatagaacccgatgttacagatactggtttctattgaagatggttcagtgatttaaacagttatcattccttgcactaggggcaggacaactgtctgtgtttcaaatgaagttggttgggccatgaaatgtcagttttgcttcactagaagggcatgggtcaaccatttcacaatatcgacaatgtaataaaagcctcagcaataatggttcatgagcaaggccattttagccctcgcaaggttactgtctccacaagtggttttgtccctcagttaggaacccaattgcttgctgccgccagtcttaatgcaaggacagatgaggttagaaactggataatgactataaacagaaaggagaaccttaacttgcttcttggcactttaagaggtgaacttaacctcagaaaaaaaaacaaatagtgctatctgaatatgccatgctttctggagtgaacggcagtggatgatgccaaaagtcttttgtagagctactccaagggatcccatgcaagcaagataaacctcatctctttgagttccctcgacggttcccaatccaagcccacatcagacgataaaatgattgagttcggcaaacttttaattcaaggtgggctcactgtctttgttcggtcagcagaggggatgatcagatcagatggctgcctgcgggcagctcagagagcctggagactaccagctgcctctgcaccgtgcacctgagaaaattttgaggtcgtcttgtgatgctagacagtgcattacagtaaactggtcctgaggcctgagaaaattttgaggtcgttttgtgatgctagacagtgcattacagtaaactttagcgtcgtcgagaccgaagtgggctgaaaagcgctgcatcgtgcagccgcgtgacagtgggcgtctttcgcatggttggttcgtcgctgcggtctgagtcgccaaagctgaattctgttgtcatcggggagtgattcgaaaagtttggaacgaacctatcggtggtcaggaatgaggtaagaatctgaaggactacaaggttggcttgcctgagcgagataccttaaccattaaggtgtgcatggcacttggcacctagtcaccagaccagatcaccctaaatggtggaaagaaaaaagcgaaagatctagcgcaagccccacccggatcaaagtttctctctctctcttttccccccaaaagcaagtccatcacgctgcacattatggg

SEQ ID NO: 32593 - DNA, 1513 bp, Zea Mays
caggaatcaggcggaaaccaaataccccgaacgtccacagcgagcgagaggccgcaaactcccgagaccgtacgaaccagacgattcaccaatcaccatggcggcgccggcgcggcgcaggtcctgcatctcctccggtggagccggagcgcctccttccgctgctgcttcgcctcttctccgccctccgccgcccgctgcgaggccggtccaaggccatgctcaaggggatggactactgactactccgaacccgagataaggacatgatttaagacatgtgtgtgtttcaagtagttcgttgattgggtgcaggcgcaggggtttcggccaggccaggccttgatgctgtggaaatgcctgtacgggaacaacgtttgggctcatttttacgacgagctggctggtttaaacaaggatttcaggaagatgataactgagcatgctgatctcaaggcattaattgtgaaggacattcatcggatagaacccgtaaggggcaggacaactgtctgtgtttcaaatgaagttggttgggccatgaaatgtcagttttgcttcactagaagggcatgggtcaaccatttcacaatatcgacaatgtaataaaagcctcagcaataatggttcatgagcaaggccattttagccctcgcaaggttactgtctccacaagtggttttgtccctcagttaggaacccaattgcttgctgccgccagtcttaatgcaaggacagatgagtggatgatgccaaaagtcttttgtagagctactccaagggatcccatgcaagcaagataaacctcatctctttgagttccctcgacggttcccaatccaagcccacatcagacgataaaatgattgagttcggcaaacttttaattcaaggtgggctcactgtctttgttcggtcagcagaggggatgatcagatcagatggctgcctgcgggcagctcagagagcctggagactaccagctgcctctgcaccgtgcacctgagaaaattttgaggtcgtcttgtgatgctagacagtgcattacagtaaactggtcctgaggcctgagaaaattttgaggtcgttttgtgatgctagacagtgcattacagtaaactttagcgtcgtcgagaccgaagtgggctgaaaagcgctgcatcgtgcagccgcgtgacagtgggcgtctttcgcatggttggttcgtcgctgcggtctgagtcgccaaagctgaattctgttgtcatcggggagtgattcgaaaagtttggaacgaacctatcggtggtcaggaatgaggtaagaatctgaaggactacaaggttggcttgcctgagcgagataccttaaccattaaggtgtgcatggcacttggcacctagtcaccagaccagatcaccctaaatggtggaaagaaaaaagcgaaagatctagcgcaagccccacccggatcaaagtttctctctctctcttttccccccaaaagcaagtccatcacgctgcacattatggg

SEQ ID NO: 32594 - DNA, 1697 bp, Zea Mays
caggaatcaggcggaaaccaaataccccgaacgtccacagcgagcgagaggccgcaaactcccgagaccgtacgaaccagacgattcaccaatcaccatggcggcgccggcgcggcgcaggtcctgcatctcctccggtggagccggagcgcctccttccgctgctgcttcgcctcttctccgccctccgccgcccgctgcgaggccggtccaaggccatgctcaaggggatggactactgactactccgaacccgagataaggacatgatttaagacatgtgtgtgtttcaagtagttcgttgattgggtgcaggcgcaggggtttcggccaggccaggccttgatgctgtggaaatgcctgtacgggaacaacgtttgggctcatttttacgacgagctggctggaagatgataactgagcatgctgatctcaaggcattaattgtgaaggacattcatcggatagaacccgatgttacagatactggtttctattgaagatggttcagtgatttaaacagttatcattccttgcactaggggcaggacaactgtctgtgtttcaaatgaagttggttgggccatgaaatgtcagttttgcttcactagaagggcatgggtcaaccatttcacaatatcgacaatgtaataaaagcctcagcaataatggttcatgagcaaggccattttagccctcgcaaggttactgtctccacaagtggttttgtccctcagttaggaacccaattgcttgctgccgccagtcttaatgcaaggacagatgaggttagaaactggataatgactataaacagaaaggagaaccttaacttgcttcttggcactttaagaggtgaacttaacctcagaaaaaaaaacaaatagtgctatctgaatatgccatgctttctggagtgaacggcagtggatgatgccaaaagtcttttgtagagctactccaagggatcccatgcaagcaagataaacctcatctctttgagttccctcgacggttcccaatccaagcccacatcagacgataaaatgattgagttcggcaaacttttaattcaaggtgggctcactgtctttgttcggtcagcagaggggatgatcagatcagatggctgcctgcgggcagctcagagagcctggagactaccagctgcctctgcaccgtgcacctgagaaaattttgaggtcgtcttgtgatgctagacagtgcattacagtaaactggtcctgaggcctgagaaaattttgaggtcgttttgtgatgctagacagtgcattacagtaaactttagcgtcgtcgagaccgaagtgggctgaaaagcgctgcatcgtgcagccgcgtgacagtgggcgtctttcgcatggttggttcgtcgctgcggtctgagtcgccaaagctgaattctgttgtcatcggggagtgattcgaaaagtttggaacgaacctatcggtggtcaggaatgaggtaagaatctgaaggactacaaggttggcttgcctgagcgagataccttaaccattaaggtgtgcatggcacttggcacctagtcaccagaccagatcaccctaaatggtggaaagaaaaaagcgaaagatctagcgcaagccccacccggatcaaagtttctctctctctcttttccccccaaaagcaagtccatcacgctgcacattatggg

SEQ ID NO: 32595 - DNA, 1721 bp, Zea Mays
caggaatcaggcggaaaccaaataccccgaacgtccacagcgagcgagaggccgcaaactcccgagaccgtacgaaccagacgattcaccaatcaccatggcggcgccggcgcggcgcaggtcctgcatctcctccggtggagccggagcgcctccttccgctgctgcttcgcctcttctccgccctccgccgcccgctgcgaggccggtccaaggccatgctcaaggggatggactactgactactccgaacccgagataaggacatgatttaagacatgtgtgtgtttcaagtagttcgttgattgggtgcaggcgcaggggtttcggccaggccaggccttgatgctgtggaaatgcctgtacgggaacaacgtttgggctcatttttacgacgagctggctggtttaaacaaggatttcaggaagatgataactgagcatgctgatctcaaggcattaattgtgaaggacattcatcggatagaacccgtaaggatgttacagatactggtttctattgaagatggttcagtgatttaaacagttatcattccttgcactaggggcaggacaactgtctgtgtttcaaatgaagttggttgggccatgaaatgtcagttttgcttcactagaagggcatgggtcaaccatttcacaatatcgacaatgtaataaaagcctcagcaataatggttcatgagcaaggccattttagccctcgcaaggttactgtctccacaagtggttttgtccctcagttaggaacccaattgcttgctgccgccagtcttaatgcaaggacagatgaggttagaaactggataatgactataaacagaaaggagaaccttaacttgcttcttggcactttaagaggtgaacttaacctcagaaaaaaaaacaaatagtgctatctgaatatgccatgctttctggagtgaacggcagtggatgatgccaaaagtcttttgtagagctactccaagggatcccatgcaagcaagataaacctcatctctttgagttccctcgacggttcccaatccaagcccacatcagacgataaaatgattgagttcggcaaacttttaattcaaggtgggctcactgtctttgttcggtcagcagaggggatgatcagatcagatggctgcctgcgggcagctcagagagcctggagactaccagctgcctctgcaccgtgcacctgagaaaattttgaggtcgtcttgtgatgctagacagtgcattacagtaaactggtcctgaggcctgagaaaattttgaggtcgttttgtgatgctagacagtgcattacagtaaactttagcgtcgtcgagaccgaagtgggctgaaaagcgctgcatcgtgcagccgcgtgacagtgggcgtctttcgcatggttggttcgtcgctgcggtctgagtcgccaaagctgaattctgttgtcatcggggagtgattcgaaaagtttggaacgaacctatcggtggtcaggaatgaggtaagaatctgaaggactacaaggttggcttgcctgagcgagataccttaaccattaaggtgtgcatggcacttggcacctagtcaccagaccagatcaccctaaatggtggaaagaaaaaagcgaaagatctagcgcaagccccacccggatcaaagtttctctctctctcttttccccccaaaagcaagtccatcacgctgcacattatggg

SEQ ID NO: 32596 - DNA, 1478 bp, Zea Mays
caggaatcaggcggaaaccaaataccccgaacgtccacagcgagcgagaggccgcaaactcccgagaccgtacgaaccagacgattcaccaatcaccatggcggcgccggcgcggcgcaggtcctgcatctcctccggtggagccggagcgcctccttccgctgctgcttcgcctcttctccgccctccgccgcccgctgcgaggccggtccaaggccatgctcaaggggatggactactgactactccgaacccgagataaggacatgatttaagacatgtgtgtgtttcaagtagttcgttgattgggtgcaggcgcaggggtttcggccaggccaggccttgatgctgtggaaatgcctgtacgggaacaacgtttgggctcatttttacgacgagctggctggtttaaacaaggatttcaggaagatgataactgagcatgctgatctcaaggcattaattgtgaaggacattcatcggatagaacccgtaaggggcaggacaactgtctgtgtttcaaatgaagttggttgggccatgaaatgtcagttttgcttcactagaaggttagaaactggataatgactataaacagaaaggagaaccttaacttgcttcttggcactttaagaggtgaacttaacctcagaaaaaaaaacaaatagtgctatctgaatatgccatgctttctggagtgaacggcagtggatgatgccaaaagtcttttgtagagctactccaagggatcccatgcaagcaagataaacctcatctctttgagttccctcgacggttcccaatccaagcccacatcagacgataaaatgattgagttcggcaaacttttaattcaaggtgggctcactgtctttgttcggtcagcagaggggatgatcagatcagatggctgcctgcgggcagctcagagagcctggagactaccagctgcctctgcaccgtgcacctgagaaaattttgaggtcgtcttgtgatgctagacagtgcattacagtaaactggtcctgaggcctgagaaaattttgaggtcgttttgtgatgctagacagtgcattacagtaaactttagcgtcgtcgagaccgaagtgggctgaaaagcgctgcatcgtgcagccgcgtgacagtgggcgtctttcgcatggttggttcgtcgctgcggtctgagtcgccaaagctgaattctgttgtcatcggggagtgattcgaaaagtttggaacgaacctatcggtggtcaggaatgaggtaagaatctgaaggactacaaggttggcttgcctgagcgagataccttaaccattaaggtgtgcatggcacttggcacctagtcaccagaccagatcaccctaaatggtggaaagaaaaaagcgaaagatctagcgcaagccccacccggatcaaagtttctctctctctcttttccccccaaaagcaagtccatcacgctgcacattatggg

SEQ ID NO: 32597 - DNA, 2090 bp, Zea Mays
tcaaggagattccatctatttagtattggtatatgctattaactattaacatctacgcctgtgtttcaaatcacacttcggtttagctttgtcctaactcaaacgtctctaactgaaaactattaacatctaccagttacgtacaacaaattcactagcaagacatctaatgaaaaaaataatgaactggtttcatgttgtacatgttgatacatttttttttctctggtaagaattagttgcgtggcctgtttctctcattaagtttacaacattttctattgtccaatggggtctattgcttttcagttggagaacctacaatatacctatgattcttctcaatgtatgtcatttgatgtgttgttaagatgttagttaattagacgtcacctatgtgtatctctaaaatccttcagccccgtttgtttcctttcatttcgaggaattggaatcttactaatggaataggctatttttttagaatatgacattccaccgctttccaaagttatcatataagcctacctcaaattcatgggagtgagagatggaaatttattctatagatttacatgctatttttccgatgtagaacttatatcacattcttctacttgcgcctctataacataaatgtagtatataactatctctctcataagatttaggatagtatacaaatatattacatatataaatatataaacttaattagttttgtctaaattataattattaaaatggaattcaattccaacgaaacaaacgggccctcaggtttaaacaaggatttcaggaagatgataactgagcatgctgatctcaaggcattaattgtgaaggacattcatcggatagaacccgatgttacagatactggtttctattgaagatggttcagtgatttaaacagttatcattccttgcactaggggcaggacaactgtctgtgtttcaaatgaagttggttgggccatgaaatgtcagttttgcttcactagaagggcatgggtcaaccatttcacaatatcgacaatgtaataaaagcctcagcaataatggttcatgagcaaggccattttagccctcgcaaggttactgtctccacaagtggttttgtccctcagttaggaacccaattgcttgctgccgccagtcttaatgcaaggacagatgaggttagaaactggataatgactataaacagaaaggagaaccttaacttgcttcttggcactttaagaggtgaacttaacctcagaaaaaaaaacaaatagtgctatctgaatatgccatgctttctggagtgaacggcagtggatgatgccaaaagtcttttgtagagctactccaagggatcccatgcaagcaagataaacctcatctctttgagttccctcgacggttcccaatccaagcccacatcagacgataaaatgattgagttcggcaaacttttaattcaaggtgggctcactgtctttgttcggtcagcagaggggatgatcagatcagatggctgcctgcgggcagctcagagagcctggagactaccagctgcctctgcaccgtgcacctgagaaaattttgaggtcgtcttgtgatgctagacagtgcattacagtaaactggtcctgaggcctgagaaaattttgaggtcgttttgtgatgctagacagtgcattacagtaaactttagcgtcgtcgagaccgaagtgggctgaaaagcgctgcatcgtgcagccgcgtgacagtgggcgtctttcgcatggttggttcgtcgctgcggtctgagtcgccaaagctgaattctgttgtcatcggggagtgattcgaaaagtttggaacgaacctatcggtggtcaggaatgaggtaagaatctgaaggactacaaggttggcttgcctgagcgagataccttaaccattaaggtgtgcatggcacttggcacctagtcaccagaccagatcaccctaaatggtggaaagaaaaaagcgaaagatctagcgcaagccccacccggatcaaagtttctctctctctcttttccccccaaaagcaagtccatcacgctgcacattatggg

SEQ ID NO: 32598 - DNA, 2026 bp, Zea Mays
tcaaggagattccatctatttagtattggtatatgctattaactattaacatctacgcctgtgtttcaaatcacacttcggtttagctttgtcctaactcaaacgtctctaactgaaaactattaacatctaccagttacgtacaacaaattcactagcaagacatctaatgaaaaaaataatgaactggtttcatgttgtacatgttgatacatttttttttctctggtaagaattagttgcgtggcctgtttctctcattaagtttacaacattttctattgtccaatggggtctattgcttttcagttggagaacctacaatatacctatgattcttctcaatgtatgtcatttgatgtgttgttaagatgttagttaattagacgtcacctatgtgtatctctaaaatccttcagccccgtttgtttcctttcatttcgaggaattggaatcttactaatggaataggctatttttttagaatatgacattccaccgctttccaaagttatcatataagcctacctcaaattcatgggagtgagagatggaaatttattctatagatttacatgctatttttccgatgtagaacttatatcacattcttctacttgcgcctctataacataaatgtagtatataactatctctctcataagatttaggatagtatacaaatatattacatatataaatatataaacttaattagttttgtctaaattataattattaaaatggaattcaattccaacgaaacaaacgggccctcaggtttaaacaaggatttcaggaagatgataactgagcatgctgatctcaaggcattaattgtgaaggacattcatcggatagaacccgtaaggggcaggacaactgtctgtgtttcaaatgaagttggttgggccatgaaatgtcagttttgcttcactagaagggcatgggtcaaccatttcacaatatcgacaatgtaataaaagcctcagcaataatggttcatgagcaaggccattttagccctcgcaaggttactgtctccacaagtggttttgtccctcagttaggaacccaattgcttgctgccgccagtcttaatgcaaggacagatgaggttagaaactggataatgactataaacagaaaggagaaccttaacttgcttcttggcactttaagaggtgaacttaacctcagaaaaaaaaacaaatagtgctatctgaatatgccatgctttctggagtgaacggcagtggatgatgccaaaagtcttttgtagagctactccaagggatcccatgcaagcaagataaacctcatctctttgagttccctcgacggttcccaatccaagcccacatcagacgataaaatgattgagttcggcaaacttttaattcaaggtgggctcactgtctttgttcggtcagcagaggggatgatcagatcagatggctgcctgcgggcagctcagagagcctggagactaccagctgcctctgcaccgtgcacctgagaaaattttgaggtcgtcttgtgatgctagacagtgcattacagtaaactggtcctgaggcctgagaaaattttgaggtcgttttgtgatgctagacagtgcattacagtaaactttagcgtcgtcgagaccgaagtgggctgaaaagcgctgcatcgtgcagccgcgtgacagtgggcgtctttcgcatggttggttcgtcgctgcggtctgagtcgccaaagctgaattctgttgtcatcggggagtgattcgaaaagtttggaacgaacctatcggtggtcaggaatgaggtaagaatctgaaggactacaaggttggcttgcctgagcgagataccttaaccattaaggtgtgcatggcacttggcacctagtcaccagaccagatcaccctaaatggtggaaagaaaaaagcgaaagatctagcgcaagccccacccggatcaaagtttctctctctctcttttccccccaaaagcaagtccatcacgctgcacattatggg

SEQ ID NO: 32599 - DNA, 1713 bp, Zea Mays
tcaaggagattccatctatttagtattggtatatgctattaactattaacatctacgcctgtgtttcaaatcacacttcggtttagctttgtcctaactcaaacgtctctaactgaaaactattaacatctaccagttacgtacaacaaattcactagcaagacatctaatgaaaaaaataatgaactggtttcatgttgtacatgttgatacatttttttttctctggtaagaattagttgcgtggcctgtttctctcattaagtttacaacattttctattgtccaatggggtctattgcttttcagttggagaacctacaatatacctatgattcttctcaatgtatgtcatttgatgtgttgttaagatgttagttaattagacgtcacctatgtgtatctctaaaatccttcagccccgtttgtttcctttcatttcgaggaattggaatcttactaatggaataggctatttttttagaatatgacattccaccgctttccaaagttatcatataagcctacctcaaattcatgggagtgagagatggaaatttattctatagatttacatgctatttttccgatgtagaacttatatcacattcttctacttgcgcctctataacataaatgtagtatataactatctctctcataagatttaggatagtatacaaatatattacatatataaatatataaacttaattagttttgtctaaattataattattaaaatggaattcaattccaacgaaacaaacgggccctcaggtttaaacaaggatttcaggaagatgataactgagcatgctgatctcaaggcattaattgtgaaggacattcatcggatagaacccgtaaggggcaggacaactgtctgtgtttcaaatgaagttggttgggccatgaaatgtcagttttgcttcactagaagtggatgatgccaaaagtcttttgtagagctactccaagggatcccatgcaagcaagataaacctcatctctttgagttccctcgacggttcccaatccaagcccacatcagacgataaaatgattgagttcggcaaacttttaattcaaggtgggctcactgtctttgttcggtcagcagaggggatgatcagatcagatggctgcctgcgggcagctcagagagcctggagactaccagctgcctctgcaccgtgcacctgagaaaattttgaggtcgtcttgtgatgctagacagtgcattacagtaaactggtcctgaggcctgagaaaattttgaggtcgttttgtgatgctagacagtgcattacagtaaactttagcgtcgtcgagaccgaagtgggctgaaaagcgctgcatcgtgcagccgcgtgacagtgggcgtctttcgcatggttggttcgtcgctgcggtctgagtcgccaaagctgaattctgttgtcatcggggagtgattcgaaaagtttggaacgaacctatcggtggtcaggaatgaggtaagaatctgaaggactacaaggttggcttgcctgagcgagataccttaaccattaaggtgtgcatggcacttggcacctagtcaccagaccagatcaccctaaatggtggaaagaaaaaagcgaaagatctagcgcaagccccacccggatcaaagtttctctctctctcttttccccccaaaagcaagtccatcacgctgcacattatggg

SEQ ID NO: 32600 - DNA, 330 bp, Zea Mays
cacaggagatgtggacatggaaggagaacgcgagcagaagaaaacgagggggcttgcctgccgtaacgcccagacaagggcggagaaagcgagctgtgtagactgttgttcttggctacgagagagacgtgcttactctactgcgcgtgtaatctgtgatgccagcccggtggtaaaagaaaagaaaagaaaaaggattctgaatcctctttgcggcatcaccgttgccccggcctcatctgcggtctccctgaccctgctatggactggtggttggcacttggcatgcaatgcagggacgccgagcgttacagacacagttgggtgggc

SEQ ID NO: 32601 - DNA, 1691 bp, Zea Mays
cacgaggccaacaacagctggcttgtttaaggaaaagatattgtctacttcattaggtttatggattcagatttgttactgaatgacgatttgcttttcagtagacaacatttaagtgggaaatgtaaatgatgttgttagtatagggagaatgaggtgactgctagttttggcgacgtttctcatcctcaaatggcttattatcacacaagcatgctattcctttccattctcaaattgaaaagggtgggagggacagagaaagaattcctagaataagattctccaatacgcagctggtagtaatccaaagacttttccccatagatgtcgcagacgaatggaacaaaccctaaaaccacgaagctgagcaaaggttgaagaaaataatcgttgacaggctaatgcaagcaatggaaagcatttttattgcagttaactaaataggacaagcattagagtaataaagtataagagtggacggtcttgtacatataaatacaaagaaactactatgtaaggaaataaacataaatctaaaaaaagattgagatacttgccttagagcttttttcggatttctccgcataaataacagaacaataaaatgtacatgtgacagagaggctagggaatattagtttttagtcaattgcagttaactaaataggataaacattagagtaataaaatgtttatgtgatgagagaaaaaggtagaatgcaaggaaaaacataaatcaagaagtaagattgggatacgtatttgtttttgagcttttccagatttaccagcacacatgtgatagagaggttggagaatttagttttcagtcaattacaatggagaaaattataggggcagtggccggtcaagaaactggtagtaagaacagcaatgcacttcatttgccttcctcaacatgtgcggtacgaccaactctgtgaatatatcctgaaagtgaatttgcaaacaataattatagcaagcaacatgtagaaaatttcacaggctgtgtttagaatcgccaacctttggttcatctcaatggtcatattgcaaaatttctatattataatactaaagaagggatcggatactactaattgtagccaacgcggtcagttgcccagcagaatccaggaaaaaaacaagacgcgtcagttggaatcttgatgtgcacgcacagaaacctcccaaatctaggcatcgatagatgataacacactgcgcagggaggagcggagcgtgctggcggtgctcggccgcgcaagcctcttcgcgatggcacagttccccacggcgtcgtcgcccgtggtccgggagaaggttgccatggccgtgtgccagggagagagaggggagggagggcgggctcacctgacggcacgacatcatttgcgggggagcaggggaagggggctgaggatcttggcagtgtggagccgtgcctctttgtgatggcgcagctccccacgacatcgtcacccatggtctgggagaaggccgccaggggggcacctggtggcgcgacgtcgtttgaggcagagcagaggagtcatctggaagcgtcatgtacaatggagaccgggtcgctccgcgacggcgatgccgtcagttttgggatcgaaatgccagaaaaaaaagatatttacgtggagagctttgatgcgtctgttggaagtttctaa

SEQ ID NO: 32602 - DNA, 1152 bp, Zea Mays
gcgatctgcgcgcgagccgaccgtcgtggacgcgaatccgaatgagacacaggcaggctgattgaggacatggacaagctgcgggagatggagatgttcggcgacgacggcagggacggagtgtggacggtgatggcgaacgtgatggacccggagagcctgcaccgcgccttcgacggatgcgctggcgtgttccacacctccgccttcgtggaccccggcggcatgtccggctacacgaaacacatggcaacgttagaagcccaggcagcggagcgggtgatcgaagcctgcgtcaggacagggtccgtcaggaaatgtgtcttcacctcttccttgctggcatgtgtgtggaggcagaacaaccctcatggccggcggtgccctaccatcatcgacgagagctgctggagcgacgagagcttttgccgcgacaacaagctgtggtttgcgctcggcaagacggcagcggaaaaggctgcctggagggcggcgcggggacgagacctgaagctggtcaccatctgccccgcgctcgtcaccggcccggggttccgccgccgcaactccaccgcgtccatcgcgtatctcaaaggggctcgtgcaatgctcgccgacggcctgctcgccacggcgaacgtggagacggtggccgaggcgcacgtactcgcgtacgaggcgatgggcgacaacaccgccggaggcaggtacatctgctacgaccacgtcgtcaagcggccggaggagttcgccgagctggagcgacagctggggctgccgggaggggccgcggccgcgcagggctctgacgaccggccggccaggttcgagctctgcaagcggaagctgtccaggctcatgtcctccaggaggcggtgcacgtacgacacctactactccgtcgcgtttgactagcaagctcaggcggaattgccatgaagggttgaccaccagtctgcaatccctgtcccattgacaagtggacaccggaagcgaagcggagaaatagcaaaactccgcttgattgtccttgtggacgagaaagagcaggaggggagccaagtatgtgtgcaatgatgtaccgggtgcaattttgtacagagttttgatgcagcaataaaggtgagtcgcccataggcagcgcgcgtcaca

SEQ ID NO: 32603 - DNA, 844 bp, Zea Mays
caagtacatatactcttgctgtatgaccatttcatatgaatatatttatgtttactttgatgaaaagattaaaatgttgtgatatgatgacctcaaaataactgtatatgtgcacatcaacaagcaatggtgcaaatggggtcgcatgtatcacaacgaccactcatggataagcaccaatgaacagacaaaggcactttcagtttctcaacatatgtcgtcatatgactgtaagttattgccagcaggttttccaatctgcaagcaagctatgggagggacggttggagtgtagagctccccaaaagcttgccagcagaatgggttattcaggtggtagtggggtacttgcactggcctgagttgcacaccagtaagagagattcctgaacaaggtaagctgtcactgcatgcaaaatggacaggcttgattgtaaatgttcctctgatattctcgtattgaacccctgatactgccactgctgatgtttgattcctgcaagtgcttctgtcacaataaaactgatctatgataatgggtgtttgaacctctgagacttgtatatttgagaaccttatgtcttgaaccaatcctacgccaccctgcgagaaatgagagtttactttgtttagctcagtaggaattgttgttttggctgccatcatcactttccttcttgggactttccaaggttattggttgtatagatatcaaattgataacatatacatatccattccttttttttagttttttttttcttttgtgacattattctgtactaatgtctgatgttgaattagaattttgtttgtacatatgttctcaagcttacctgccagg

SEQ ID NO: 32604 - DNA, 5324 bp, Zea Mays
caccacaccagtcgtccttccttctcattccccaagccaaacccccgggctccatcgaaccaaacctatttgaatcgccaaagccggtggcggtgggtctcactctcacagccctccgctcctcgtcctcacccctgcttcgcttgcctagccttccgtcgtcccctgctgtcagtccccgaagacggcggcgccgccggccatggaggaccccctcgccacggcgccgccaccgcgccggccccaccgggagcggcggcaccggcggaaggcgtcggacgccgccgcggccgcgctggcggcgcaggcggcgtcctcctacggcgacgtcttcggcgggcccccgcggttcgcgccgcctcctgcggcgttcgccgcgggggcggggactgcgccggcggactacgccgaggtgttcggcggagtcgcggcctcctgctccatcccctacctcgacctgccgcccgccgttgccagcggagtcggcgccggcgggtacggcgagatcttcggccgcttcgacttcggggagtttgcggtgccgtacgaggacatgctttctggtgcagagtctctggtggaggagatcgcgtcaccaagtgggagctcaagatcatcaactagaaaagaatcggtccgattggatactgagccatctgtaccctatcaacaagttccagatgctggttctggcaggcactctgatgacgagcaatttcatgcagtctcctttcctccagatggcgagcaaacgttcactatgtcatataacaagatcacccggggaaggccagatgatcttgttgaaatgaccgcttgcatagtagaaccttcaattagctatgtggttgactcttgcaatttgtcaaatgatttagaaatggattatgtcccagtaatggacagtggcacaaatgctaatgttgtgaaagaaaagatgaacctaccaaacattgcagattccggcctggagtgtgctgatagtgcttatgtggttgatcatcagcaacatatcccaacatgccctcccatctctgaaaatatttgccaggatgaaaactacaacaagaggtctagcacacattcagtgtcaagcgaggaagcaccttcccctgactatccattcttaagggtatccaacatcaaccttccagcagcacccatcaaagtacaaccaccaccgatgcccccatctaaattgcttaataaaaagggaagcaacgaaaatggagattctgatgtcaatcctaactcagttgctgctgctgctgctatgaaggaagcaatgcaatttgctgaagccagattaaaagctgcaaaagaattgatggagataaaaggtgtcagctctaaattccgtaagcggccagttcatcacaaaagcacaaaatcaactgaaattaaggaatacaatgcacctgaaaaagcacatctatttgaagaaaagctggatatgagaagattggtaaaagaggaaaatcaaagcaatgatatagctttgctggataaaaacacgggcagtgttgcacttgagcacagtgatcatgacaaaaaagggattatatcaccagggaagcctaaggagatgatgcaaaacgacagtgaactagaacaattaggagagtggacatcagatgctgatttttatgaattggttagcaatgatcagaaatgcagaactaatggagctgaatgcagagacaatggtctgatgacaaattccttagccaagcttgaccggtctgagaatgaaaaattaggaggctttgcaggtgagtcaaaaaggtctaggaaattgtgggattgtaacaacagaacatgtctgcggactgaacatgtaaatcagggaaaagatggtataggttcattggaggttgaacaaaagaatactaggtctccagaagttacagaacatgtaaatcagcaaaaagatgctatagattctgtggaaactgaacaaaagactcctaggtcacctgaagtttctccttgtaatgaaagggtgacgtatgaagagccaaccaaaggaaataatgatctgatgacaaattcttccaccaagctcgaccagtctgtgaaagtaaaggaagggggttttgcaggtgagccaaaaaggtttagaaaattgtggggcagtaacagtacaacagttctgagaacagtgcatgtaaatcaggaaaaagatgctatagctttcgtggaggctgaagaaaaggcacctaggttttcggaagttcctccttgtgatgaaagggtggcatcccaagaggcaactgattcccgtttagaacaatgtctaggggtggggaattctctaggtcacgaaaatggtgcacaatttgagacttcatgcgtgaataatttaccttcagaggtccatgcagacccagaaatctccagttcattttcggaatgttgttcatcaggaagtcatgccaatggtaatgaaaatcattctgaaagcacagctcaggaaactgcatttgtagggaactctagccaaaatgtcaacaataaagaggaacttgagcttccgtgcattgatgggttgccttgtacttcagcaaggaatcagattttgcaggaacattttaatgttattaatgctgatgaaaacaaggaaattgaagtgaaaatatcaaaattagaagggtcttccaaatcttatttgaattttgaggaagaaaagttacccagttttgttgatgaatcatgcctacagaacaaaaatgaaagagaaaatgaagtaaattcagaatcacccatccatgaaaagatgacaaagttcgggtttgaggacaaaggtgatgcatatgaagattttcaagagggagatatggatcaggttgctggatctgctgaagaggaaggttatgttacttcaggaagtggtattgctaatgaaagcgaatatgaagaagcagaagatgatatatttgtaggagacatggaatcaaatgtaagaacatgtggtagttttgacaaagatccatatcagcgccaagaatcacaaggatcatggggaccccaagatttggataatagaatggacaaaatcagtgatacaatatctcatggaaaggaaagggagactaaagaatccttgctggagaatgttgaaaagacagcggcagaagaagtactaaaccatgactgcagggaagggcagaaatccatggaaaccgttgactacatatggcccaaatatgtatgtgcagaatttaatgtaagtagtgacaaagatggtaatgtgtttgattctgctgatgaacttatcagcgacaatggcagtgattatgccatgaacatgagcacaatgtcaaataatctgcaagcttcattttcagaagcatgcagtagcattcaacatctttctcaaaaacctcagtctatttctgctgagaaggctgatgaaagcactcctgttcttggaaatcttgaagtggactgcggagaagcaggtagaaaaattccaagtgaaaattgtgaagtctcagaagaagggcaaaatattggaatcgaaatggaagaaagaaaaagagaagacaatatatcaaatataaggttcatggatcagcaaccattttacttggacagtgacattagacctaaggctgcagaaggtactgcatcagaaactattctaaaatccagagaagaggatcttaatgttcagagaactaaagtgaggaatgacataaaagaggctgaaggagaactcgagaaggaggtaaaagttgttgaagagaaagaaaaagaatgcaaaatgggaaaagagaaggaacaagataaagagagacaaagaagagagttggaagaacagaaggaacgggaaatggagcgagcaaaagataggcttgctgttcagagagctacaagagaagcacatgaaagggcattcgccgaggttcgagctaaggctgaaagaatagcattagaaaggatcacctcagcacgtcaaagagcatccgcagaagcccacgagaaagaagagaaggcaaccgctcaagcagctctggagcaggcttcaagggaagctagaatgaaagcagaacgtgcagccgttgagagagcaactgctgaagctcgggagagggcaattgaaaaggcaaaagctgctgcagatgcaaaggagcgaattgggaagttcaggtcctctttcaaggatagttttaaggcacctaatcaggacaatcaacatgaggcatcatctcagaagacggcttataataagcatggaaaaagcatggattcttgtgttgaagtagtcgaggttgagtcagctctacgacataaagcaaaattggaaaggcaccaacgcacagctgagcgagcggcgaaagcccttgctgaaaagaatatgcgggatatgctggtgcagagggagcatgctgagaaacatagactggctgaatttcttgatcctgaagtcaagagatggtcaaatggaaaagaaggaaatctgcgagcattgctgtccacattgcaatatatacttggttcagacagtggctggcaggcagttcccctcacagaccttatcacagctgctggtgtcaagaaggcatacaggaaggcaaccctttgtgtccatccagataaagtgcagcaaagaggtgctacaatcagacagaaatacatttgtgagaaggtgtttgatcttcttaagatccttattataatgcaagcattcgacttttcctttcgaatggagcaccatattctgcattcatacccagctatccatattctctgttccagacatggatatctgttagatggacctatatatggggaatatgcattacggtctcattgctggcctattgctgtttcattcccttcatgttcatttctgaatgtgaggcttggaataagtacaattctgaagagcgctagtgggataggtggttctttatcaattgtttacgggggacaggatattggctaggtatctctgtagcatttgccatactgattattttttacattggtgaaaatatgcagctgtagagggcatcttctggtcattttttatccatatcaatgcaatagtagagcatatgttgtctcttatctagcatccccaagtttacctttgctagactttagttgtgcaccttttgcgttactttgaccattcctagcaaagtttgcctacgtttggcgatcaacttgaagtagttgaatttatattttctttctgtggctgagtgactcgcagttgcgggggccttctattcgaactagtagctgcaatatgctcacggagaatttgtaccatttgtattaaagaatatcatgtgttatgttactagttggag

SEQ ID NO: 32605 - DNA, 5117 bp, Zea Mays
gtcgtccttccttctcattccccaagccaaacccccgggctccatcgaaccaaacctatttgaatcgccaaagccggtggcggtgggtctcactctcacagccctccgctcctcgtcctcacccctgcttcgcttgcctagccttccgtcgtcccctgctgtcagtccccgaagacggcggcgccgccggccatggaggaccccctcgccacggcgccgccaccgcgccggccccaccgggagcggcggcaccggcggaaggcgtcggacgccgccgcggccgcgctggcggcgcaggcggcgtcctcctacggcgacgtcttcggcgggcccccgcggttcgcgccgcctcctgcggcgttcgccgcgggggcggggactgcgccggcggactacgccgaggtgttcggcggagtcgcggcctcctgctccatcccctacctcgacctgccgcccgccgttgccagcggagtcggcgccggcgggtacggcgagatcttcggccgcttcgacttcggggagtttgcggtgccgtacgaggacatgctttctggtgcagagtctctggtggaggagatcgcgtcaccaagtgggagctcaagatcatcaactagaaaagaatcggtccgattggatactgagccatctgtaccctatcaacaagttccagatgctggttctggcaggcactctgatgacgagcaatttcatgcagtctcctttcctccagatggcgagcaaacgttcactatgtcatataacaagatcacccggggaaggccagatgatcttgttgaaatgaccgcttgcatagtagaaccttcaattagctatgtggttgactcttgcaatttgtcaaatgatttagaaatggattatgtcccagtaatggacagtggcacaaatgctaatgttgtgaaagaaaagatgaacctaccaaacattgcagattccggcctggagtgtgctgatagtgcttatgtggttgatcatcagcaacatatcccaacatgccctcccatctctgaaaatatttgccaggatgaaaactacaacaagaggtctagcacacattcagtgtcaagcgaggaagcaccttcccctgactatccattcttaagggtatccaacatcaaccttccagcagcacccatcaaagtacaaccaccaccgatgcccccatctaaattgcttaataaaaagggaagcaacgaaaatggagattctgatgtcaatcctaactcagttgctgctgctgctgctatgaaggaagcaatgcaatttgctgaagccagattaaaagctgcaaaagaattgatggagataaaaggtgtcagctctaaattccgtaagcggccagttcatcacaaaagcacaaaatcaactgaaattaaggaatacaatgcacctgaaaaagcacatctatttgaagaaaagctggatatgagaagattggtaaaagaggaaaatcaaagcaatgatatagctttgctggataaaaacacgggcagtgttgcacttgagcacagtgatcatgacaaaaaagggattatatcaccagggaagcctaaggagatgatgcaaaacgacagtgaactagaacaattaggagagtggacatcagatgctgatttttatgaattggttagcaatgatcagaaatgcagaactaatggagctgaatgcagagacaatggtctgatgacaaattccttagccaagcttgaccggtctgagaatgaaaaattaggaggctttgcaggtgagtcaaaaaggtctaggaaattgtgggattgtaacaacagaacatgtctgcggactgaacatgtaaatcagggaaaagatggtataggttcattggaggttgaacaaaagaatactaggtctccagaagttacagaacatgtaaatcagcaaaaagatgctatagattctgtggaaactgaacaaaagactcctaggtcacctgaagtttctccttgtaatgaaagggtgacgtatgaagagccaaccaaaggaaataatgatctgatgacaaattcttccaccaagctcgaccagtctgtgaaagtaaaggaagggggttttgcaggtgagccaaaaaggtttagaaaattgtggggcagtaacagtacaacagttctgagaacagtgcatgtaaatcaggaaaaagatgctatagctttcgtggaggctgaagaaaaggcacctaggttttcggaagttcctccttgtgatgaaagggtggcatcccaagaggcaactgattcccgtttagaacaatgtctaggggtggggaattctctaggtcacgaaaatggtgcacaatttgagacttcatgcgtgaataatttaccttcagaggtccatgcagacccagaaatctccagttcattttcggaatgttgttcatcaggaagtcatgccaatggtaatgaaaatcattctgaaagcacagctcaggaaactgcatttgtagggaactctagccaaaatgtcaacaataaagaggaacttgagcttccgtgcattgatgggttgccttgtacttcagcaaggaatcagattttgcaggaacattttaatgttattaatgctgatgaaaacaaggaaattgaagtgaaaatatcaaaattagaagggtcttccaaatcttatttgaattttgaggaagaaaagttacccagttttgttgatgaatcatgcctacagaacaaaaatgaaagagaaaatgaagtaaattcagaatcacccatccatgaaaagatgacaaagttcgggtttgaggacaaaggtgatgcatatgaagattttcaagagggagatatggatcaggttgctggatctgctgaagaggaaggttatgttacttcaggaagtggtattgctaatgaaagcgaatatgaagaagcagaagatgatatatttgtaggagacatggaatcaaatgtaagaacatgtggtagttttgacaaagatccatatcagcgccaagaatcacaaggatcatggggaccccaagatttggataatagaatggacaaaatcagtgatacaatatctcatggaaaggaaagggagactaaagaatccttgctggagaatgttgaaaagacagcggcagaagaagtactaaaccatgactgcagggaagggcagaaatccatggaaaccgttgactacatatggcccaaatatgtatgtgcagaatttaatgtaagtagtgacaaagatggtaatgtgtttgattctgctgatgaacttatcagcgacaatggcagtgattatgccatgaacatgagcacaatgtcaaataatctgcaagcttcattttcagaagcatgcagtagcattcaacatctttctcaaaaacctcagtctatttctgctgagaaggctgatgaaagcactcctgttcttggaaatcttgaagtggactgcggagaagcaggtagaaaaattccaagtgaaaattgtgaagtctcagaagaagggcaaaatattggaatcgaaatggaagaaagaaaaagagaagacaatatatcaaatataaggttcatggatcagcaaccattttacttggacagtgacattagacctaaggctgcagaaggtactgcatcagaaactattctaaaatccagagaagaggatcttaatgttcagagaactaaagtgaggaatgacataaaagaggctgaaggagaactcgagaaggaggtaaaagttgttgaagagaaagaaaaagaatgcaaaatgggaaaagagaaggaacaagataaagagagacaaagaagagagttggaagaacagaaggaacgggaaatggagcgagcaaaagataggcttgctgttcagagagctacaagagaagcacatgaaagggcattcgccgaggttcgagctaaggctgaaagaatagcattagaaaggatcacctcagcacgtcaaagagcatccgcagaagcccacgagaaagaagagaaggcaaccgctcaagcagctctggagcaggcttcaagggaagctagaatgaaagcagaacgtgcagccgttgagagagcaactgctgaagctcgggagagggcaattgaaaaggcaaaagctgctgcagatgcaaaggagcgaattgggaagttcaggtcctctttcaaggatagttttaaggcacctaatcaggacaatcaacatgaggcatcatctcagaagacggcttataataagcatggaaaaagcatggattcttgtgttgaagtcgaggttgagtcagctctacgacataaagcaaaattggaaaggcaccaacgcacagctgagcgagcggcgaaagcccttgctgaaaagaatatgcgggatatgctggtgcagagggagcatgctgagaaacatagactggctgaatttcttgatcctgaagtcaagagatggtcaaatggaaaagaaggaaatctgcgagcattgctgtccacattgcaatatatacttggttcagacagtggctggcaggcagttcccctcacagaccttatcacagctgctggtgtcaagaaggcatacaggaaggcaaccctttgtgtccatccagataaagtgcagcaaagaggtgctacaatcagacagaaatacatttgtgagaaggtgtttgatcttcttaaggaggcttggaataagtacaattctgaagagcgctagtgggataggtggttctttatcaattgtttacgggggacaggatattggctaggtatctctgtagcatttgccatactgattattttttacattggtgaaaatatgcagctgtagagggcatcttctggtcattttttatccatatcaatgcaatagtagagcatatgttgtctcttatctagcatccccaagtttacctttgctagactttagttgtgcaccttttgcgttactttgaccattcctagcaaagtttgcctacgtttggcgatcaacttgaagtagttgaatttatattttctttctgtggctgagtgactcgcagttgcgggggccttctattcgaactagtagctgcaatatgctcacggagaatttgtaccatttgtattaaagaatatcatgtgttatgttactagttggag

SEQ ID NO: 32606 - DNA, 5015 bp, Zea Mays
ctccgctcctcgtcctcacccctgcttcgcttgcctagccttccgtcgtcccctgctgtcagtccccgaagacggcggcgccgccggccatggaggaccccctcgccacggcgccgccaccgcgccggccccaccgggagcggcggcaccggcggaaggcgtcggacgccgccgcggccgcgctggcggcgcaggcggcgtcctcctacggcgacgtcttcggcgggcccccgcggttcgcgccgcctcctgcggcgttcgccgcgggggcggggactgcgccggcggactacgccgaggtgttcggcggagtcgcggcctcctgctccatcccctacctcgacctgccgcccgccgttgccagcggagtcggcgccggcgggtacggcgagatcttcggccgcttcgacttcggggagtttgcggtgccgtacgaggacatgctttctggtgcagagtctctggtggaggagatcgcgtcaccaagtgggagctcaagatcatcaactagaaaagaatcggtccgattggatactgagccatctgtaccctatcaacaagttccagatgctggttctggcaggcactctgatgacgagcaatttcatgcagtctcctttcctccagatggcgagcaaacgttcactatgtcatataacaagatcacccggggaaggccagatgatcttgttgaaatgaccgcttgcatagtagaaccttcaattagctatgtggttgactcttgcaatttgtcaaatgatttagaaatggattatgtcccagtaatggacagtggcacaaatgctaatgttgtgaaagaaaagatgaacctaccaaacattgcagattccggcctggagtgtgctgatagtgcttatgtggttgatcatcagcaacatatcccaacatgccctcccatctctgaaaatatttgccaggatgaaaactacaacaagaggtctagcacacattcagtgtcaagcgaggaagcaccttcccctgactatccattcttaagggtatccaacatcaaccttccagcagcacccatcaaagtacaaccaccaccgatgcccccatctaaattgcttaataaaaagggaagcaacgaaaatggagattctgatgtcaatcctaactcagttgctgctgctgctgctatgaaggaagcaatgcaatttgctgaagccagattaaaagctgcaaaagaattgatggagataaaaggtgtcagctctaaattccgtaagcggccagttcatcacaaaagcacaaaatcaactgaaattaaggaatacaatgcacctgaaaaagcacatctatttgaagaaaagctggatatgagaagattggtaaaagaggaaaatcaaagcaatgatatagctttgctggataaaaacacgggcagtgttgcacttgagcacagtgatcatgacaaaaaagggattatatcaccagggaagcctaaggagatgatgcaaaacgacagtgaactagaacaattaggagagtggacatcagatgctgatttttatgaattggttagcaatgatcagaaatgcagaactaatggagctgaatgcagagacaatggtctgatgacaaattccttagccaagcttgaccggtctgagaatgaaaaattaggaggctttgcaggtgagtcaaaaaggtctaggaaattgtgggattgtaacaacagaacatgtctgcggactgaacatgtaaatcagggaaaagatggtataggttcattggaggttgaacaaaagaatactaggtctccagaagttacagaacatgtaaatcagcaaaaagatgctatagattctgtggaaactgaacaaaagactcctaggtcacctgaagtttctccttgtaatgaaagggtgacgtatgaagagccaaccaaaggaaataatgatctgatgacaaattcttccaccaagctcgaccagtctgtgaaagtaaaggaagggggttttgcaggtgagccaaaaaggtttagaaaattgtggggcagtaacagtacaacagttctgagaacagtgcatgtaaatcaggaaaaagatgctatagctttcgtggaggctgaagaaaaggcacctaggttttcggaagttcctccttgtgatgaaagggtggcatcccaagaggcaactgattcccgtttagaacaatgtctaggggtggggaattctctaggtcacgaaaatggtgcacaatttgagacttcatgcgtgaataatttaccttcagaggtccatgcagacccagaaatctccagttcattttcggaatgttgttcatcaggaagtcatgccaatggtaatgaaaatcattctgaaagcacagctcaggaaactgcatttgtagggaactctagccaaaatgtcaacaataaagaggaacttgagcttccgtgcattgatgggttgccttgtacttcagcaaggaatcagattttgcaggaacattttaatgttattaatgctgatgaaaacaaggaaattgaagtgaaaatatcaaaattagaagggtcttccaaatcttatttgaattttgaggaagaaaagttacccagttttgttgatgaatcatgcctacagaacaaaaatgaaagagaaaatgaagtaaattcagaatcacccatccatgaaaagatgacaaagttcgggtttgaggacaaaggtgatgcatatgaagattttcaagagggagatatggatcaggttgctggatctgctgaagaggaaggttatgttacttcaggaagtggtattgctaatgaaagcgaatatgaagaagcagaagatgatatatttgtaggagacatggaatcaaatgtaagaacatgtggtagttttgacaaagatccatatcagcgccaagaatcacaaggatcatggggaccccaagatttggataatagaatggacaaaatcagtgatacaatatctcatggaaaggaaagggagactaaagaatccttgctggagaatgttgaaaagacagcggcagaagaagtactaaaccatgactgcagggaagggcagaaatccatggaaaccgttgactacatatggcccaaatatgtatgtgcagaatttaatgtaagtagtgacaaagatggtaatgtgtttgattctgctgatgaacttatcagcgacaatggcagtgattatgccatgaacatgagcacaatgtcaaataatctgcaagcttcattttcagaagcatgcagtagcattcaacatctttctcaaaaacctcagtctatttctgctgagaaggctgatgaaagcactcctgttcttggaaatcttgaagtggactgcggagaagcaggtagaaaaattccaagtgaaaattgtgaagtctcagaagaagggcaaaatattggaatcgaaatggaagaaagaaaaagagaagacaatatatcaaatataaggttcatggatcagcaaccattttacttggacagtgacattagacctaaggctgcagaaggtactgcatcagaaactattctaaaatccagagaagaggatcttaatgttcagagaactaaagtgaggaatgacataaaagaggctgaaggagaactcgagaaggaggtaaaagttgttgaagagaaagaaaaagaatgcaaaatgggaaaagagaaggaacaagataaagagagacaaagaagagagttggaagaacagaaggaacgggaaatggagcgagcaaaagataggcttgctgttcagagagctacaagagaagcacatgaaagggcattcgccgaggttcgagctaaggctgaaagaatagcattagaaaggatcacctcagcacgtcaaagagcatccgcagaagcccacgagaaagaagagaaggcaaccgctcaagcagctctggagcaggcttcaagggaagctagaatgaaagcagaacgtgcagccgttgagagagcaactgctgaagctcgggagagggcaattgaaaaggcaaaagctgctgcagatgcaaaggagcgaattgggaagttcaggtcctctttcaaggatagttttaaggcacctaatcaggacaatcaacatgaggcatcatctcagaagacggcttataataagcatggaaaaagcatggattcttgtgttgaagtagtcgaggttgagtcagctctacgacataaagcaaaattggaaaggcaccaacgcacagctgagcgagcggcgaaagcccttgctgaaaagaatatgcgggatatgctggtgcagagggagcatgctgagaaacatactggctgaatttcttgatcctgaagtcaagagatggtcaaatggaaaagaaggaaatctgcgagcattgctgtccacattgcaatatatacttggttcagacagtggctggcaggcagttcccctcacagaccttatcacagctgctggtgtcaagaaggcatacaggaaggcaaccctttgtgtccatccagataaagtgcagcaaagaggtgctacaatcagacagaaatacatttgtgagaaggtgtttgatcttcttaaggaggcttggaataagtacaattctgaagagcgctagtgggataggtggttctttatcaattgtttacgggggacaggatattggctaggtatctctgtagcatttgccatactgattattttttacattggtgaaaatatgcagctgtagagggcatcttctggtcattttttatccatatcaatgcaatagtagagcatatgttgtctcttatctagcatccccaagtttacctttgctagactttagttgtgcaccttttgcgttactttgaccattcctagcaaagtttgcctacgtttggcgatcaacttgaagtagttgaatttatattttctttctgtggctgagtgactcgcagttgcgggggccttctattcgaactagtagctgcaatatgctcacggagaatttgtaccatttgtattaaagaatatcatgtgttatgttactagttggag

SEQ ID NO: 32607 - DNA, 1926 bp, Zea Mays
caacgcgctggcagtggcagatgcatgcactggataacattccgcaccgtacccacccagctgccacgtgcctcattgccatctgcctcaacataaaacacaccccatccgcacgcaccctcctgaccacctaataagcaaagaatccctttcacaggctctctcctctcttccgccacccgcggataaacaaagcgcggtcgcgtcgcgcaccacctctgtcctcgcagagacacgcacgcaacagcatcactgaccctcaccaccgcacctggcatcgaccgatttcatctatagtagctgaccctcgtcgatcgtcaccatggaggacctgcagcaccacgtcgagggcgtgagggcgcgggggcgccatcaccaccagcaccagctcgtgcgcgagcgcggccgccgtcgcatcgtcaaggccgctgccgcggaggagcgcgccctcgttgtgccgccggaggaggagacctcgacggaggacaagctgctggaggggccacgggatcatgaaggagacgatgaagaggtggtggtggagcagaaggtggcgctgctgcggcagctggtgccgggcggcgagggcatggccgtggagggtctgttggaggagacggccgactacatcgctgcgctcaaggcgcaggtcggcgccatgcgcgcgctcacctgcctgctgtccggttccggttccggttccgacctcgacgcgctgcggccagagtcgctggctgctggcgtcctcacgccggacaaccccatgtgagatccagatccacagcaaccagcgccattcctggactctggaggacgtctgttgctgttgctttccactgggtggattggttttaatttacccaagtctatattagagtttttgtcagattcgtttccacatctgtgcaccgaagcaacgttttggatgacaatacgagactgttgaaggtcttacggagtgctttattcgaagcacgcttggttgtcgaaagagcttagttttgtccaaaggcaccaggagaaagcaaagtgcgcaacaaacggagcgggagagcgggcatgctggcgggtgccaacaaccttatctttctacgatctataatgcaaaatactaaataggaatagtttttttttttgcatatatatatggtctaacaaactagactgtccatgacgattggaagtgggagtcgaagcacatggccacatgggacatggtcacatatatcgacatgtgtgatacgccacctttgttgttctaaaggtgcttttcccatgtgttcgaacaatggactagggatttgacttgatcgatcctacgctacgatgctattaagggtactagaacataaggcgcccttgcgggcgccctacaattttatgaaatactcctgcaccattacttggctaatatgtatcacaaagttaaggcttagatgcgctccttcaacaatcacatattctttctgctcttcctaggatgtaattaacatgtccaggatgggccttgtacctttctactgtcatttgtttgttgccaataaattcagctctaggaggtaattctgaagatccatgctgagatttgttatccgaagtcacatcattgtctccactggtatttggatgagaaacaactgaggtgttacttaattttatgacagttgatgtgagtctcaacgagtacttaaattttggataccttcgggcactgactgataatcagctgctttgttgctcgtgaagatgatgaacatggcagtgactccagggggaacatatccctgcaactgcaagtgccatagtcgacacaggattgaagctttgctaaccttttcttgtaacagttatcaatgtagctgtcatactcaacattgcaaagggcgcaatagaatttccagtgcagtgataattaatacaaagttg

SEQ ID NO: 32608 - DNA, 2462 bp, Zea Mays
gtaaaatattcggtacaaagaactcagtataaacattactttactactatacaaagcgcgacgtaaaagtacgacaccgttcgtccacgtcacctttaaaatttttagccgttcgatcagattttagcggccaagaatccctccgtgtatcaaatcctggaatagcctcgatggttccagacagcgaacgaacgggatgaggaaaaggacccaccagcctgctgtccattgctcctagaagcatcgcgtcgtggatcggctttctccgtgctccgcctcgtcggcctcatgccctgtagccccgactccccatctgccgcctccacctcatgggccgccgggtccaccctcgccgtccagcttggcaacatctttgaccgtggtggcgacgaactccgcctcctgcaccccctccgcctcctcgccccttccgctgaggcccgcgtcagcgcgttcctgccatagtcggcaaccaataggagcgtaaaactggagctagggattgaagctgttgcaggtacatgtcatatataaatggacatgggcaggcactcccgctgagggtgcttcttggcttcgtctgtagaggcttgctgatatttggcataggatattgttaatttgtgggtatgatgcatggattatttgagatctttgagcagataaagcaatcattatcatctcaaagggagggtattgatttcatggccgtgattccccctctcccagtcaaagccatccaagccgcaattacttcagggacagggtgttcactggggctagaaggattctgtttttattgcacgacacatgacaacatatccaagtagtccttgattgatttagcagcagggagtaagcgtcttgctaaaagtggctccacaggtgaacttagcaatgctagatcttggtagcgagacaacgttcttcgatgtttttgatggtcacggaggtaatcacaatatatgccttttatgttccttgaattagactgcctacgaggaataccattatgccaagtatttatagaacctctctttaacatttcacaacctcatacggtcataccattgctttacttaggaagagtagctgtcaaattctgtacaaaatacccgcataatcaagttctcaaaagtgaagcctattcagttggtgacctaggtcctactgtcctaataaagcttaaatatttattatatgtatacaacaaacacaaagttgattgtgtaaatgctctgttgatagtggctttctaattcaacatatatccctataactgcatatctgtattgaatatgataatgttatctgcatttaaatggacctgtgggtaagactcatatgaatgaacagccgtctagaggccattttgtatttacattaaagatatccaaatctaatgaggtagaatggaacattcactattatcataccaagatctaccaaaatatagtgttccttatgctctctttcagactcgcgacaatccctttttaaacaaatattttgcatgccaaataactaatcctgagaaagtatagctcccatttttttggttgaagaaaacagaccaacctggccaaagagtcattaacttgattgattttgctgcagcgatcgtcttgctaaaagtggttgtacaggtgatcgcttgaaggaaactcagctgagtgtttggttactataaattttcaaattttttagtgattctggtcaccatacaatttttttaattaaggaaacacaagtttagacagagttctactgctttactttgaagaaagtgactttcgttctcaatgggcctaaagagaatacttgatttaaagcattacgtcttgcctagctgctatttctaattagtaatctcactatattgtatgccgaacagacacttcatgtccaatgtgcataccatactatttccagtctaatgctctaattctaggacacaacaaacttcacaggcatcatgattcatgtcatgttctactttgttaagacttaacaataatctataaaacaattgttatgataatggtgagtcaaaacctgcacttatgattctgcttaaagttcttgtatctttacataaagttccatttgtgaaaaaaagatacaaatacaaatcagtccataaatgaaaatatatttaccaactcactattttttccataattcactaacaggttcaagaaggacacatgagtatccgagaaaaaactcccaagaaatcttcccaaaactgaatgttgccttctaccatcaacaacctttgaagttctagggtgtttatttttgaatgttctctacaattatgtgtgtatatatatatatatgcttcttcatccttttcaagacaatttttataaatataacaacttgatttcaaacgttgaaacacgataatttacctaactctatttagatgactatatgtatatcttactcaaaatgtt

SEQ ID NO: 32609 - DNA, 2870 bp, Zea Mays
aaaatattcggtacaaagaactcagtataaacattactttactactatacaaagcgcgacgtaaaagtacgacaccgttcgtccacgtcacctttaaaatttttagccgttcgatcagattttagcggccaagaatccctccgtgtatcaaatcctggaatagcctcgatggttccagacagcgaacgaacgggatgaggaaaaggacccaccagcctgctgtccattgctcctagaagcatcgcgtcgtggatcggctttctccgtgctccgcctcgtcggcctcatgccctgtagccccgactccccatctgccgcctccacctcatgggccgccgggtccaccctcgccgtccagcttggcaacatctttgaccgtggtggcgacgaactccgcctcctgcaccccctccgcctcctcgccccttccgctgaggcccgcgtcagcgcgttcctgccatagtcggcaaccaataggagcgtaaaactggagctagggattgaagctgttgcaggtacatgtcatatataaatggacatgggcaggcactcccgctgagggtgcttcttggcttcgtctgtagaggcttgctgatatttggcataggatattgttaatttgtgggtatgatgcatggattatttgagatctttgagcagataaagcaatcattatcatctcaaagggagggtattgatttcatggccgtgattccccctctcccagtcaaagccatccaagccgcaattacttcagggacagggtgttcactggggctagaaggattctgtttttattgcacgacacatgacaacatatccaagtagtccttgattgatttagcagcagggagtaagcgtcttgctaaaagtggctccacaggtgaacttaggtgagtgtttggttaccatgtatttccagatcaatgacatactaaaattgttctttgcacatataaatacaaaaaaataggtataggaaaagaaatgacatgcaacccaataaatctttttgtatttatttataagaaatgacagaaaaaatctccctcattaaaataagtgaaagaatctaacaaccactaattatcttccaaaaaatcaattattatttttgcaccaaattgtaacaatactgaaaccatattcctttcatctcattttatctgtttaacacaatgattttaataagttcaatatcacactgtaaagagtgaaccaatgatttgtcttagactacaggcgttagctctcttttgatactaaatccatattcctttcatcctttgatctcatttaatatgtttaatacattgattttagtacgttcaacatcacactacaagcatggttattttttaaagatgcctaccatttttatcggtcagactatttcttaaaattgttccacgacataatatttaccaatctatacatccatacatcattcagcaatgctagatcttggtagcgagacaacgttcttcgatgtttttgatggtcacggaggtaatcacaatatatgccttttatgttccttgaattagactgcctacgaggaataccattatgccaagtatttatagaacctctctttaacatttcacaacctcatacggtcataccattgctttacttaggaagagtagctgtcaaattctgtacaaaatacccgcataatcaagttctcaaaagtgaagcctattcagttggtgacctaggtcctactgtcctaataaagcttaaatatttattatatgtatacaacaaacacaaagttgattgtgtaaatgctctgttgatagtggctttctaattcaacatatatccctataactgcatatctgtattgaatatgataatgttatctgcatttaaatggacctgtgggtaagactcatatgaatgaacagccgtctagaggccattttgtatttacattaaagatatccaaatctaatgaggtagaatggaacattcactattatcataccaagatctaccaaaatatagtgttccttatgctctctttcagactcgcgacaatccctttttaaacaaatattttgcatgccaaataactaatcctgagaaagtatagctcccatttttttggttgaagaaaacagaccaacctggccaaagagtcattaacttgattgattttgctgcagcgatcgtcttgctaaaagtggttgtacaggtgatcgcttgaaggaaactcagctgagtgtttggttactataaattttcaaattttttagtgattctggtcaccatacaatttttttaattaaggaaacacaagtttagacagagttctactgctttactttgaagaaagtgactttcgttctcaatgggcctaaagagaatacttgatttaaagcattacgtcttgcctagctgctatttctaattagtaatctcactatattgtatgccgaacagacacttcatgtccaatgtgcataccatactatttccagtctaatgctctaattctaggacacaacaaacttcacaggcatcatgattcatgtcatgttctactttgttaagacttaacaataatctataaaacaattgttatgataatggttcaagaaggacacatgagtatccgagaaaaaactcccaagaaatcttcccaaaactgaatgttgccttctaccatcaacaacctttgaagttctagggtgtttatttttgaatgttctctacaattatgtgtgtatatatatatatatgcttcttcatccttttcaagacaatttttataaatataacaacttgatttcaaacgttgaaacacgataatttacctaactctatttagatgactatatgtatatcttactcaaaatgtt

SEQ ID NO: 32610 - DNA, 2563 bp, Zea Mays
attcggtacaaagaactcagtataaacattactttactactatacaaagcgcgacgtaaaagtacgacaccgttcgtccacgtcacctttaaaatttttagccgttcgatcagattttagcggccaagaatccctccgtgtatcaaatcctggaatagcctcgatggttccagacagcgaacgaacgggatgaggaaaaggacccaccagcctgctgtccattgctcctagaagcatcgcgtcgtggatcggctttctccgtgctccgcctcgtcggcctcatgccctgtagccccgactccccatctgccgcctccacctcatgggccgccgggtccaccctcgccgtccagcttggcaacatctttgaccgtggtggcgacgaactccgcctcctgcaccccctccgcctcctcgccccttccgctgaggcccgcgtcagcgcgttcctgccatagtcggcaaccaataggagcgtaaaactggagctagggattgaagctgttgcaggtacatgtcatatataaatggacatgggcaggcactcccgctgagggtgcttcttggcttcgtctgtagaggcttgctgatatttggcataggatattgttaatttgtgggtatgatgcatggattatttgagatctttgagcagataaagcaatcattatcatctcaaagggagggtattgatttcatggccgtgattccccctctcccagtcaaagccatccaagccgcaattacttcagggacagggtgttcactggggctagaaggattctgtttttattgcacgacacatgacaacatatccaagtagtccttgattgatttagcagcagggagtaagcgtcttgctaaaagtggctccacaggtgaacttaggtgagtgtttggttaccatgtatttccagatcaatgacatactaaaattgttctttgcacatataaatacaaaaaaataggtataggaaaagaaatgacatgcaacccaataaatctttttgtatttatttataagaaatgacagaaaaaatctccctcattaaaataagtgaaagaatctaacaaccactaattatcttccaaaaaatcaattattatttttgcaccaaattgtaacaatactgaaaccatattcctttcatctcattttatctgtttaacacaatgattttaataagttcaatatcacactgtaaagagtgaaccaatgatttgtcttagactacaggcgttagctctcttttgatactaaatccatattcctttcatcctttgatctcatttaatatgtttaatacattgattttagtacgttcaacatcacactacaagcatggttattttttaaagatgcctaccatttttatcggtcagactatttcttaaaattgttccacgacataatatttaccaatctatacatccatacatcattcagcaatgctagatcttggtagcgagacaacgttcttcgatgtttttgatggtcacggaggtaatcacaatatatgccttttatgttccttgaattagactgcctacgaggaataccattatgccaagtatttatagaacctctctttaacatttcacaacctcatacggtcataccattgctttacttaggaagagtagctgtcaaattctgtacaaaatacccgcataatcaagttctcaaaagtgaagcctattcagttggtgacctaggtcctactgtcctaataaagcttaaatatttattatatgtatacaacaaacacaaagttgattgtgtaaatgctctgttgatagtggctttctaattcaacatatatccctataactgcatatctgtattgaatatgataatgttatctgcatttaaatggacctgtgggtaagactcatatgaatgaacagccgtctagaggccattttgtatttacattaaagatatccaaatctaatgaggtagaatggaacattcactattatcataccaagatctaccaaaatatagtgttccttatgctctctttcagactcgcgacaatccctttttaaacaaatattttgcatgccaaataactaatcctgagaaagtatagctcccatttttttggttgaagaaaacagaccaacctggccaaagagtcattaacttgattgattttgctgcagcgatcgtcttgctaaaagtggttgtacaggtgatcgcttgaaggaaactcagcatcatgattcatgtcatgttctactttgttaagacttaacaataatctataaaacaattgttatgataatggttcaagaaggacacatgagtatccgagaaaaaactcccaagaaatcttcccaaaactgaatgttgccttctaccatcaacaacctttgaagttctagggtgtttatttttgaatgttctctacaattatgtgtgtatatatatatatatgcttcttcatccttttcaagacaatttttataaatataacaacttgatttcaaacgttgaaacacgataatttacctaactctatttagatgactatatgtatatcttactcaaaatgtt

SEQ ID NO: 32611 - DNA, 2933 bp, Zea Mays
tcagtataaacattactttactactatacaaagcgcgacgtaaaagtacgacaccgttcgtccacgtcacctttaaaatttttagccgttcgatcagattttagcggccaagaatccctccgtgtatcaaatcctggaatagcctcgatggttccagacagcgaacgaacgggatgaggaaaaggacccaccagcctgctgtccattgctcctagaagcatcgcgtcgtggatcggctttctccgtgctccgcctcgtcggcctcatgccctgtagccccgactccccatctgccgcctccacctcatgggccgccgggtccaccctcgccgtccagcttggcaacatctttgaccgtggtggcgacgaactccgcctcctgcaccccctccgcctcctcgccccttccgctgaggcccgcgtcagcgcgttcctgccatagtcggcaaccaataggagcgtaaaactggagctagggattgaagctgttgcagccggtttccgttcaagattagtagctgctctgcatcgacggtgctcctccgaatgcattttttatttacacaatttctagcttggtacatgtcatatataaatggacatgggcaggcactcccgctgagggtgcttcttggcttcgtctgtagaggcttgctgatatttggcataggatattgttaatttgtgggtatgatgcatggattatttgagatctttgagcagataaagcaatcattatcatctcaaagggagggtattgatttcatggccgtgattccccctctcccagtcaaagccatccaagccgcaattacttcagggacagggtgttcactggggctagaaggattctgtttttattgcacgacacatgacaacatatccaagtagtccttgattgatttagcagcagggagtaagcgtcttgctaaaagtggctccacaggtgaacttaggtgagtgtttggttaccatgtatttccagatcaatgacatactaaaattgttctttgcacatataaatacaaaaaaataggtataggaaaagaaatgacatgcaacccaataaatctttttgtatttatttataagaaatgacagaaaaaatctccctcattaaaataagtgaaagaatctaacaaccactaattatcttccaaaaaatcaattattatttttgcaccaaattgtaacaatactgaaaccatattcctttcatctcattttatctgtttaacacaatgattttaataagttcaatatcacactgtaaagagtgaaccaatgatttgtcttagactacaggcgttagctctcttttgatactaaatccatattcctttcatcctttgatctcatttaatatgtttaatacattgattttagtacgttcaacatcacactacaagcatggttattttttaaagatgcctaccatttttatcggtcagactatttcttaaaattgttccacgacataatatttaccaatctatacatccatacatcattcagcaatgctagatcttggtagcgagacaacgttcttcgatgtttttgatggtcacggaggtaatcacaatatatgccttttatgttccttgaattagactgcctacgaggaataccattatgccaagtatttatagaacctctctttaacatttcacaacctcatacggtcataccattgctttacttaggaagagtagctgtcaaattctgtacaaaatacccgcataatcaagttctcaaaagtgaagcctattcagttggtgacctaggtcctactgtcctaataaagcttaaatatttattatatgtatacaacaaacacaaagttgattgtgtaaatgctctgttgatagtggctttctaattcaacatatatccctataactgcatatctgtattgaatatgataatgttatctgcatttaaatggacctgtgggtaagactcatatgaatgaacagccgtctagaggccattttgtatttacattaaagatatccaaatctaatgaggtagaatggaacattcactattatcataccaagatctaccaaaatatagtgttccttatgctctctttcagactcgcgacaatccctttttaaacaaatattttgcatgccaaataactaatcctgagaaagtatagctcccatttttttggttgaagaaaacagaccaacctggccaaagagtcattaacttgattgattttgctgcagcgatcgtcttgctaaaagtggttgtacaggtgatcgcttgaaggaaactcagctgagtgtttggttactataaattttcaaattttttagtgattctggtcaccatacaatttttttaattaaggaaacacaagtttagacagagttctactgctttactttgaagaaagtgactttcgttctcaatgggcctaaagagaatacttgatttaaagcattacgtcttgcctagctgctatttctaattagtaatctcactatattgtatgccgaacagacacttcatgtccaatgtgcataccatactatttccagtctaatgctctaattctaggacacaacaaacttcacaggcatcatgattcatgtcatgttctactttgttaagacttaacaataatctataaaacaattgttatgataatggttcaagaaggacacatgagtatccgagaaaaaactcccaagaaatcttcccaaaactgaatgttgccttctaccatcaacaacctttgaagttctagggtgtttatttttgaatgttctctacaattatgtgtgtatatatatatatatgcttcttcatccttttcaagacaatttttataaatataacaacttgatttcaaacgttgaaacacgataatttacctaactctatttagatgactatatgtatatcttactcaaaatgtt

SEQ ID NO: 32612 - DNA, 1207 bp, Zea Mays
tcagtataaacattactttactactatacaaagcgcgacgtaaaagtacgacaccgttcgtccacgtcacctttaaaatttttagccgttcgatcagattttagcggccaagaatccctccgtgtatcaaatcctggaatagcctcgatggttccagacagcgaacgaacgggatgaggaaaaggacccaccagcctgctgtccattgctcctagaagcatcgcgtcgtggatcggctttctccgtgctccgcctcgtcggcctcatgccctgtagccccgactccccatctgccgcctccacctcatgggccgccgggtccaccctcgccgtccagcttggcaacatctttgaccgtggtggcgacgaactccgcctcctgcaccccctccgcctcctcgccccttccgctgaggcccgcgtcagcgcgttcctgccatagtcggcaaccaataggagcgtaaaactggagctagggattgaagctgttgcaggtacatgtcatatataaatggacatgggcaggcactcccgctgagggtgcttcttggcttcgtctgtagaggcttgctgatatttggcataggatattgttaatttgtgggtatgatgcatggattatttgagatctttgagcagataaagcaatcattatcatctcaaagggagggtattgatttcatggccgtgattccccctctcccagtcaaagccatccaagccgcaattacttcagggacagggtgttcactggggctagaaggattctgtttttattgcacgacacatgacaacatatccaagtagtccttgattgatttagcagcagggagtaagcgtcttgctaaaagtggctccacaggtgaacttagacagaggtggtaaaaaggaaggtggttgcaggaagcagaacaatcaaaaaggtggttaacgacactttcaatcgctatctcggctagtctccgatggatagacgtattacattttaagttcatctttctagtgatcgtttgtgtgtggttatctagttgttgatgtatttttgatgtcttcctgtgctgtaatagccttcttcaggcgtagttggtgtggtttcgctaaaacatcgtctgtgtccttttatggcccttagatatctcgtcttcttaggctggctccaacaacaaacagctatattgcccagctatttcatggtttacctgctccc

SEQ ID NO: 32613 - DNA, 2293 bp, Zea Mays
actcgccgcaatcgcactcgcacatcgccacagctgtatccgccatctgcttctctcttccactgccccaagccgccaccaatggcgacctgcgttctgctgatgctgcgggaagtctctccgtgggcgctggccagcgtggtggcgtccgtgtcgctgttgtggctggtggtctggacgctggagtgggcctggtggacgccttggcggctcgagcgggccctgcgggtccagggcctcaagggcaccaggtaccgcctcttcaccggcgacctgagggaaaccgcccgggctaaccgggaggctcgcaagaagccgctgccgctcggcagccacgacatcgccccacgcgtgcagcccatgcatcacagcaccatcaaggaatacgggaaactatcgttcacctggttcggcccaacaccaagggtgatgattcctgacccagagttagtcaaagaggtgctgtctaataagtttggccactttggcaaaccaaggagtaaccgcattgggaggttgctagccaacgggcttgtaaatcatgatggtgaaaaatgggcaaagcacaggagaattcttaatcctgcatttcaccatgaaaaaataaaggggatgatgccagtattttctacctgctgtattgaaatgattactagatgggataattcaatgccttctgagggatcttctgagatagatgtctggcctgagttccagaatcttactggagatgttatctcaagaactgcgtttgggagcaactatcaagaagggaggagaattttcgagctgcaaggagaactagctgaacgcctcatccaatctgttcagacaatatttatcccaggctattggtttgttacgctttcctctaatagccagcagcaacgtcttattcatgtgcaattgcatatccaagcatttcaatacatgaagatttgtttcatcaattactccttagccctattcatggttttgtaattataaaatttgtcataaaagatcatttttagaattgttggcgttttgtactaaaattgattgctcaagtgtcaaatggaaagaaaagatttttataaacagatcagcatagcagaatgcaaagcttccgtgataacaatgttgagcatatgcaggttcttgcccaccaaaaacaacagaaggatgagagcgatcgatgtagagatccgcaaaattctccgtgaaataattgggaagagagagaaggatactaaaaacagagaaacaaataacgacgacttgctgggcttattactggagtcaaacacaaggcaatcaaatggaaatgcaagcctgggattgacaacagaagatgtgattgaggaatgcaagttattttactttgcaggtatggagacaacatcagtccttcttacttggacacttattgtgctaagcatgcacccagaatggcaagagagagcaagagaagaggttttgagccactttggaagaaccacaccggattatgatagcttgagccgcctcaagactataaccatgattctacatgaggtccttaggttgtacccaccggcaacctttctaacaagaagaacttataaggaaatggagctcggtggaatcaaatatcctgcaggagttgacctccttctacccgtcatcttcattcaccatgatcctgacatttggggaaaagacgcaagcgagttcaacccagaaaggtttgccaacggcatctccagcgcaaccaggcatcaggctgctttctttccgttcggaggggggcctagaatctgcatcggccagagctttgcgttgctggaagccaagatgacgctatgcaccatcctccaacgcttctcgttcgagctctcgccatcctacacccacgcgccgtacaccgtgataacactgcaccctcaacatggtgctcagataaggctcaaaaagctttctccgtgatgctccttctatgctgctaccggacactactttcgttactgaccgcatatgtagaaacgtatttcttatttagtatgtattttttaggatataaataaaaagatggtgcatattaatgggaaataagttcccttgtatgcattgcgatgtaattttgggaagatttggcaaggaacttaattatacaatatatgtattgtctttaagttatatctaacgcccccgttttattttttgtagggtgcactagtacttgaaagtagtcgttgcgagtagagagtatatatgccttttcacctttttccagtatatattacaaatcgctaaaaggtcaatattatattag

SEQ ID NO: 32614 - DNA, 656 bp, Zea Mays
gggggggggggggagccacaggaacacggcgagtcgtcgtcgcggccgccgcgcgcgcgcgccacggcgtgcgctgtcgagatccagcggcggcgacccggcagcaccgcccgacgccttccggccgctggtgtccgtggagacgacgaggcgcactacggagcgcagcgagaggagcaaggaagacaagggtctcaataacgccaagaagctgacgatgacgatgctgggcgcggccgctgccgcggaggaggaggaggaggaggccatcgccgccggcgcgggcatggctgtggtgaagcgctccagcaacccttacctggacttccgcagctccatggtggagatggtggtggagcggcgcatcgccagcgtggggaagatggaggagctcctgggctcgtacctctcgctcaactcgccgcgccaccacccggccatcctcgctgccttcgaggacgtctgggaggccgtcttcggcgaggagtgagtgactgggagcgtcaagcgtgatctctttcagagtactgtttcaaaacttctacgtacatgccaatgtataaattggcaacattttgccacgccgagatgctgtggtgctcatcgtatgtaacgagcttcatatacatggtgataattgagcgcctgagtggctg

SEQ ID NO: 32615 - DNA, 2764 bp, Zea Mays
cagccaccggggacgatgcggctcgaacgacgatgactaggtggacctcacggtgctcgacgacggtggcagcctgcagtcaatttgtcagtttattgagacatccaacttgcatgagttgatcaacaagcccatccctggttccttatggaggcatcatcttccttgcgcttccaagtttctcgttttagttcgttcaagatatggctatgcctttttctggtactcgttcttcagaactgcagcccagcactttcagattcaccatatttggtcggtatggggagctatgacataacagggccagcagcagacgttaacatgatgggatatgcaaatgctgagcagattgcatcaggaattcactttaggctaaaggctcgtgcctttatcgttgctgagcctaacggcaagcgtgtcgtgtttgtaaatcttgatgcttgcatggcatcacagcttgttactataaaggtgcttgaaagacttaaagcaaggtatggagatctttataatgagaataatgtggctatcagtggaatccatacgcatgctggtcctggtggttatctgcagtatgtagtttatattgttacatcacttgggtttgttcgccaatcatttgatgtgattgtcaatggaattgagcaatgcattgttgaagctcacaacaatctccaccctgggaaaatctatgtgaacaaaggtgacctccttgatgccagtgtgaatcgcagcccaagtgcatatctaaataaccccgctgaagagagaggcaagtataagtacaatgttgataaagaaatgaccctcatcaagtttgtagatgatgagtctggtccgattgggagtttcaattggtttgcaactcatggaacatctatgagtcgtacaaattctttgataagtggtgataacaaaggagcagccgcacgtttcatggaagattgggcagaacaaaatggcattccaaaacaggcagctcatgtaaatcacgatggtttggaatcttcacacatgacctctcgacttccgagaagagtctccccaataattcctgaaccaaatgagataactgatgacttagtacaattggcgtcatcctacgaagcctcaggtggacggcgattatcaagttcaagtatcaccaagcgtatcagaagtacccaacaaaacagacctaaatttgtttctgcattctgccagtcaaattgtggtgatgttagtccaaatgtcctgggaactttctgtatagacactggccttccttgtgacttcaatcacagcacatgcaatgggaagaatgaattatgctatggacgagggccaggatatcctgatgaatttgaaagtacccatatcattggcaataggcaatttcaaaaggctgtagatctttttagttcagcttctgaagaaatacaaggcaaaattgactacaggcatacttacctagatttctcaaaacttgaagtgaatgtccgtacaagtacaggaagtcagcaagttgtgaaaacatgcccagcagccatggggtttgcctttgctgctggaaccacagatggtcctggagcttttgactttaaacaaggagatgtcaagggaaaccctttctggagattagtaagaaacttacttaagacaccagggaaggagcaagtcgaatgtcaagcaccaaaacctatcttgctagacactggtgaaatgaaggaaccatatgattgggcgcctgcaattcttccaattcagatcataagaatcggccagctggctatcttgtgtgtccctggagaattcacaacaatggctggcaggaggctacgtgatgccgtcaaagctgtacttacaagtgacaacagtggtgaatttaataacattcatgttgttcttgcggggctaacaaatacatattcgcagtatattacaacttttgaagaatatgagatccaaagatacgagggagcatcgacgttgtatggcccccacacgttgagcgcctacattcaggagttccagaaacttgctacagccatggtggcaaacaaagaggtcccgacaaattttcagcccccagacatgttggacaagcaaataggactcctcccaggcgttgtgttcgactccacacctcctggggtggagttcggagatgtcagctcagacgtccccgcaagctcaactttcaggaagggcagtgtcgtgaacgctacattctactcggcgtgcccgaggaatgaccttctcacggacggcacgttcgcgctcgttgagaagctggacggcagcaacagctgggttcctgcctacgacgacgacgactggtcactacgcttcaagtggtcgagaccgtcgaagctgagcccgagaagctttgcgacgctggaatggaccgttcctggagacgccccgtcgggcgtttataggttgaggcattttggtgcctccaaaccactgattgggtccatcaaacattttacagggacctctcgggcgttcgcagtgcgttaggttgcacaccgttgcgttgcgttcgacggcacacctgtcagagaatcgacaccgggtcatatatttactttgcatacctgccacagtatatggacatgttttccctatagtttttacatgctcctgatattaataacgctgtccatcgcccgttctgtttggtcatgacaaatacccaaatcgccatatagctacagactcgatgtgtgtgaaatttctatatattaaagcaggaaagaaatctgttctcagattcagc

SEQ ID NO: 32616 - DNA, 2333 bp, Zea Mays
atttcttttatggtagagaaatagagtagtatgagtgcggatagcctaaggccttaaaataattgtacactggccgcggcaggggagcaggcgcgcagcggagctgcacaaggtggacgccatcccagtcctacgactacgaggcgcccccgctctcggaattttcagcgggtcgcgtcgcgttctgtgcggggtgtcgcagtgccgaggtataaatggcggtcagtccctgcggccgcagcagcaactgaatcatccgaggaaggagggtggagggaggagggattttgccgatcacggcctgcagtcaatttgtcagtttattgagacatccaacttgcatgagttgatcaacaagcccatccctggttccttatggaggcatcatcttccttgcgcttccaagtttctcgttttagttcgttcaagatatggctatgcctttttctggtactcgttcttcagaactgcagcccagcactttcagattcaccatatttggtcggtatggggagctatgacataacagggccagcagcagacgttaacatgatgggatatgcaaatgctgagcagattgcatcaggaattcactttaggctaaaggctcgtgcctttatcgttgctgagcctaacggcaagcgtgtcgtgtttgtaaatcttgatgcttgcatggcatcacagcttgttactataaaggtgcttgaaagacttaaagcaaggtatggagatctttataatgagaataatgtggctatcagtggaatccatacgcatgctggtcctggtggttatctgcagtatgtagtttatattgttacatcacttgggtttgttcgccaatcatttgatgtgattgtcaatggaattgagcaatgcattgttgaagctcacaacaatctccaccctgggaaaatctatgtgaacaaaggtgacctccttgatgccagtgtgaatcgcagcccaagtgcatatctaaataaccccgctgaagagagaggcaagtataagtacaatgttgataaagaaatgaccctcatcaagtttgtagatgatgagtctggtccgattgggagtttcaattggtttgcaactcatggaacatctatgagtcgtacaaattctttgataagtggtgataacaaaggagcagccgcacgtttcatggaagattgggcagaacaaaatggcattccaaaacaggcagctcatgtaaatcacgatggtttggaatcttcacacatgacctctcgacttccgagaagagtctccccaataattcctgaaccaaatgagataactgatgacttagtacaattggcgtcatcctacgaagcctcaggtggacggcgattatcaagttcaagtatcaccaagcgtatcagaagtacccaacaaaacagacctaaatttgtttctgcattctgccagtcaaattgtggtgatgttagtccaaatgtcctgggaactttctgtatagacactggccttccttgtgacttcaatcacagcacatgcaatgggaagaatgaattatgctatggacgagggccaggatatcctgatgaatttgaaagtacccatatcattggcaataggcaatttcaaaaggctgtagatctttttagttcagcttctgaagaaatacaaggcaaaattgactacaggcatacttacctagatttctcaaaacttgaagtgaatgtccgtacaagtacaggaagtcagcaagttgtgaaaacatgcccagcagccatggggtttgcctttgctgctggaaccacagatggtcctggagcttttgactttaaacaaggagatgtcaagggaaaccctttctggagattagtaagaaacttacttaagacaccagggaaggagcaagtcgaatgtcaagcaccaaaacctatcttgctagacactggtgaaatgaaggaaccatatgattgggcgcctgcaattcttccaattcagatcataagaatcggccagctggctatcttgtgtgtccctggagaattcacaacaatggctggcaggaggctacgtgatgccgtcaaagctgtacttacaagtgacaacagtggtgaatttaataacattcatgttgttcttgcggggctaacaaatacatattcgcagtatattacaacttttgaagaatatgagatccaaagatacgagacccctgggtgcattattgcaagctgttttaaccgccgcggaccccttatatttagcgtcacaaagggacaattctacatttttttcatctttggttgcaagtgttaatgtccttttgtttccttattttgtatgttcgcatggtgctt

SEQ ID NO: 32617 - DNA, 2241 bp, Zea Mays
agcaggcgcgcagcggagctgcacaaggtggacgccatcccagtcctacgactacgaggcgcccccgctctcggaattttcagcgggtcgcgtcgcgttctgtgcggggtgtcgcagtgccgaggtataaatggcggtcagtccctgcggccgcagcagcaactgaatcatccgaggaaggagggtggagggaggagggattttgccgatcacggtcaatttgtcagtttattgagacatccaacttgcatgagttgatcaacaagcccatccctggttccttatggaggcatcatcttccttgcgcttccaagtttctcgttttagttcgttcaagatatggctatgcctttttctggtactcgttcttcagaactgcagcccagcactttcagattcaccatatttggtcggtatggggagctatgacataacagggccagcagcagacgttaacatgatgggatatgcaaatgctgagcagattgcatcaggaattcactttaggctaaaggctcgtgcctttatcgttgctgagcctaacggcaagcgtgtcgtgtttgtaaatcttgatgcttgcatggcatcacagcttgttactataaaggtgcttgaaagacttaaagcaaggtatggagatctttataatgagaataatgtggctatcagtggaatccatacgcatgctggtcctggtggttatctgcagtatgtagtttatattgttacatcacttgggtttgttcgccaatcatttgatgtgattgtcaatggaattgagcaatgcattgttgaagctcacaacaatctccaccctgggaaaatctatgtgaacaaaggtgacctccttgatgccagtgtgaatcgcagcccaagtgcatatctaaataaccccgctgaagagagaggcaagtataagtacaatgttgataaagaaatgaccctcatcaagtttgtagatgatgagtctggtccgattgggagtttcaattggtttgcaactcatggaacatctatgagtcgtacaaattctttgataagtggtgataacaaaggagcagccgcacgtttcatggaagattgggcagaacaaaatggcattccaaaacaggcagctcatgtaaatcacgatggtttggaatcttcacacatgacctctcgacttccgagaagagtctccccaataattcctgaaccaaatgagataactgatgacttagtacaattggcgtcatcctacgaagcctcaggtggacggcgattatcaagttcaagtatcaccaagcgtatcagaagtacccaacaaaacagacctaaatttgtttctgcattctgccagtcaaattgtggtgatgttagtccaaatgtcctgggaactttctgtatagacactggccttccttgtgacttcaatcacagcacatgcaatgggaagaatgaattatgctatggacgagggccaggatatcctgatgaatttgaaagtacccatatcattggcaataggcaatttcaaaaggctgtagatctttttagttcagcttctgaagaaatacaaggcaaaattgactacaggcatacttacctagatttctcaaaacttgaagtgaatgtccgtacaagtacaggaagtcagcaagttgtgaaaacatgcccagcagccatggggtttgcctttgctgctggaaccacagatggtcctggagcttttgactttaaacaaggagatgtcaagggaaaccctttctggagattagtaagaaacttacttaagacaccagggaaggagcaagtcgaatgtcaagcaccaaaacctatcttgctagacactggtgaaatgaaggaaccatatgattgggcgcctgcaattcttccaattcagatcataagaatcggccagctggctatcttgtgtgtccctggagaattcacaacaatggctggcaggaggctacgtgatgccgtcaaagctgtacttacaagtgacaacagtggtgaatttaataacattcatgttgttcttgcggggctaacaaatacatattcgcagtatattacaacttttgaagaatatgagatccaaagatacgagacccctgggtgcattattgcaagctgttttaaccgccgcggaccccttatatttagcgtcacaaagggacaattctacatttttttcatctttggttgcaagtgttaatgtccttttgtttccttattttgtatgttcgcatggtgctt

SEQ ID NO: 32618 - DNA, 2884 bp, Zea Mays
agctgcacaaggtggacgccatcccagtcctacgactacgaggcgcccccgctctcggaattttcagcgggtcgcgtcgcgttctgtgcggggtgtcgcagtgccgaggtataaatggcggtcagtccctgcggccgcagcagcaactgaatcatccgaggaaggagggtggagggaggagggattttgccgatcacggtcaatttgtcagtttattgagacatccaacttgcatgagttgatcaacaagcccatccctggttccttatggaggcatcatcttccttgcgcttccaagtttctcgttttagttcgttcaagatatggctatgcctttttctggtactcgttcttcagaactgcagcccagcactttcagattcaccatatttggtcggtatggggagctatgacataacagggccagcagcagacgttaacatgatgggatatgcaaatgctgagcagattgcatcaggaattcactttaggctaaaggctcgtgcctttatcgttgctgagcctaacggcaagcgtgtcgtgtttgtaaatcttgatgcttgcatggcatcacagcttgttactataaaggtgcttgaaagacttaaagcaaggtatggagatctttataatgagaataatgtggctatcagtggaatccatacgcatgctggtcctggtggttatctgcagtatgtagtttatattgttacatcacttgggtttgttcgccaatcatttgatgtgattgtcaatggaattgagcaatgcattgttgaagctcacaacaatctccaccctgggaaaatctatgtgaacaaaggtgacctccttgatgccagtgtgaatcgcagcccaagtgcatatctaaataaccccgctgaagagagaggcaagtataagtacaatgttgataaagaaatgaccctcatcaagtttgtagatgatgagtctggtccgattgggagtttcaattggtttgcaactcatggaacatctatgagtcgtacaaattctttgataagtggtgataacaaaggagcagccgcacgtttcatggaagattgggcagaacaaaatggcattccaaaacaggcagctcatgtaaatcacgatggtttggaatcttcacacatgacctctcgacttccgagaagagtctccccaataattcctgaaccaaatgagataactgatgacttagtacaattggcgtcatcctacgaagcctcaggtggacggcgattatcaagttcaagtatcaccaagcgtatcagaagtacccaacaaaacagacctaaatttgtttctgcattctgccagtcaaattgtggtgatgttagtccaaatgtcctgggaactttctgtatagacactggccttccttgtgacttcaatcacagcacatgcaatgggaagaatgaattatgctatggacgagggccaggatatcctgatgaatttgaaagtacccatatcattggcaataggcaatttcaaaaggctgtagatctttttagttcagcttctgaagaaatacaaggcaaaattgactacaggcatacttacctagatttctcaaaacttgaagtgaatgtccgtacaagtacaggaagtcagcaagttgtgaaaacatgcccagcagccatggggtttgcctttgctgctggaaccacagatggtcctggagcttttgactttaaacaaggagatgtcaagggaaaccctttctggagattagtaagaaacttacttaagacaccagggaaggagcaagtcgaatgtcaagcaccaaaacctatcttgctagacactggtgaaatgaaggaaccatatgattgggcgcctgcaattcttccaattcagatcataagaatcggccagctggctatcttgtgtgtccctggagaattcacaacaatggctggcaggaggctacgtgatgccgtcaaagctgtacttacaagtgacaacagtggtgaatttaataacattcatgttgttcttgcggggctaacaaatacatattcgcagtatattacaacttttgaagaatatgagatccaaagatacgagggagcatcgacgttgtatggcccccacacgttgagcgcctacattcaggagttccagaaacttgctacagccatggtggcaaacaaagaggtcccgacaaattttcagcccccagacatgttggacaagcaaataggactcctcccaggcgttgtgttcgactccacacctcctggggtggagttcggagatgtcagctcagacgtccccgcaagctcaactttcaggaagggcagtgtcgtgaacgctacattctactcggcgtgcccgaggaatgaccttctcacggacggcacgttcgcgctcgttgagaagctggacggcagcaacagctgggttcctgcctacgacgacgacgactggtcactacgcttcaagtggtcgagaccgtcgaagctgagcccgagaagctttgcgacgctggaatggaccgttcctggagacgccccgtcgggcgtttataggttgaggcattttggtgcctccaaaccactgattgggtccatcaaacattttacagggacctctcgggcgttcgcagtgcgttaggttgcacaccgttgcgttgcgttcgacggcacacctgtcagagaatcgacaccgggtcatatatttactttgcatacctgccacagtatatggacatgttttccctatagtttttacatgctcctgatattaataacgctgtccatcgcccgttctgtttggtcatgacaaatacccaaatcgccatatagctacagactcgatgtgtgtgaaatttctatatattaaagcaggaaagaaatctgttctcagattcagc

SEQ ID NO: 32619 - DNA, 2885 bp, Zea Mays
gcacaaggtggacgccatcccagtcctacgactacgaggcgcccccgctctcggaattttcagcgggtcgcgtcgcgttctgtgcggggtgtcgcagtgccgaggtataaatggcggtcagtccctgcggccgcagcagcaactgaatcatccgaggaaggagggtggagggaggagggattttgccgatcacggcctgcagtcaatttgtcagtttattgagacatccaacttgcatgagttgatcaacaagcccatccctggttccttatggaggcatcatcttccttgcgcttccaagtttctcgttttagttcgttcaagatatggctatgcctttttctggtactcgttcttcagaactgcagcccagcactttcagattcaccatatttggtcggtatggggagctatgacataacagggccagcagcagacgttaacatgatgggatatgcaaatgctgagcagattgcatcaggaattcactttaggctaaaggctcgtgcctttatcgttgctgagcctaacggcaagcgtgtcgtgtttgtaaatcttgatgcttgcatggcatcacagcttgttactataaaggtgcttgaaagacttaaagcaaggtatggagatctttataatgagaataatgtggctatcagtggaatccatacgcatgctggtcctggtggttatctgcagtatgtagtttatattgttacatcacttgggtttgttcgccaatcatttgatgtgattgtcaatggaattgagcaatgcattgttgaagctcacaacaatctccaccctgggaaaatctatgtgaacaaaggtgacctccttgatgccagtgtgaatcgcagcccaagtgcatatctaaataaccccgctgaagagagaggcaagtataagtacaatgttgataaagaaatgaccctcatcaagtttgtagatgatgagtctggtccgattgggagtttcaattggtttgcaactcatggaacatctatgagtcgtacaaattctttgataagtggtgataacaaaggagcagccgcacgtttcatggaagattgggcagaacaaaatggcattccaaaacaggcagctcatgtaaatcacgatggtttggaatcttcacacatgacctctcgacttccgagaagagtctccccaataattcctgaaccaaatgagataactgatgacttagtacaattggcgtcatcctacgaagcctcaggtggacggcgattatcaagttcaagtatcaccaagcgtatcagaagtacccaacaaaacagacctaaatttgtttctgcattctgccagtcaaattgtggtgatgttagtccaaatgtcctgggaactttctgtatagacactggccttccttgtgacttcaatcacagcacatgcaatgggaagaatgaattatgctatggacgagggccaggatcctgatgaatttgaaagtacccatatcattggcaataggcaatttcaaaaggctgtagatctttttagttcagcttctgaagaaatacaaggcaaaattgactacaggcatacttacctagatttctcaaaacttgaagtgaatgtccgtacaagtacaggaagtcagcaagttgtgaaaacatgcccagcagccatggggtttgcctttgctgctggaaccacagatggtcctggagcttttgactttaaacaaggagatgtcaagggaaaccctttctggagattagtaagaaacttacttaagacaccagggaaggagcaagtcgaatgtcaagcaccaaaacctatcttgctagacactggtgaaatgaaggaaccatatgattgggcgcctgcaattcttccaattcagatcataagaatcggccagctggctatcttgtgtgtccctggagaattcacaacaatggctggcaggaggctacgtgatgccgtcaaagctgtacttacaagtgacaacagtggtgaatttaataacattcatgttgttcttgcggggctaacaaatacatattcgcagtatattacaacttttgaagaatatgagatccaaagatacgagggagcatcgacgttgtatggcccccacacgttgagcgcctacattcaggagttccagaaacttgctacagccatggtggcaaacaaagaggtcccgacaaattttcagcccccagacatgttggacaagcaaataggactcctcccaggcgttgtgttcgactccacacctcctggggtggagttcggagatgtcagctcagacgtccccgcaagctcaactttcaggaagggcagtgtcgtgaacgctacattctactcggcgtgcccgaggaatgaccttctcacggacggcacgttcgcgctcgttgagaagctggacggcagcaacagctgggttcctgcctacgacgacgacgactggtcactacgcttcaagtggtcgagaccgtcgaagctgagcccgagaagctttgcgacgctggaatggaccgttcctggagacgccccgtcgggcgtttataggttgaggcattttggtgcctccaaaccactgattgggtccatcaaacattttacagggacctctcgggcgttcgcagtgcgttaggttgcacaccgttgcgttgcgttcgacggcacacctgtcagagaatcgacaccgggtcatatatttactttgcatacctgccacagtatatggacatgttttccctatagtttttacatgctcctgatattaataacgctgtccatcgcccgttctgtttggtcatgacaaatacccaaatcgccatatagctacagactcgatgtgtgtgaaatttctatatattaaagcaggaaagaaatctgttctcagattcagc

SEQ ID NO: 32620 - DNA, 2959 bp, Zea Mays
gttgcttgtgggatttggtgtagcgtcggttgcttgttgcccgattagacttgtgatgccgatctcccgtgggtgcgtgatagtatacgccaagaatctgaagtcagggcagattcgagtgtgcccgcctgtgcggcgtgtgcttccaaggatatcacttgtgccccttgcctcccaggctctcaattcccaccctctaaatctgtccactcccaccgccactccccctctgccgctgccggaaattcatgttaactattttttttgcctgcagtcaatttgtcagtttattgagacatccaacttgcatgagttgatcaacaagcccatccctggttccttatggaggcatcatcttccttgcgcttccaagtttctcgttttagttcgttcaagatatggctatgcctttttctggtactcgttcttcagaactgcagcccagcactttcagattcaccatatttggtcggtatggggagctatgacataacagggccagcagcagacgttaacatgatgggatatgcaaatgctgagcagattgcatcaggaattcactttaggctaaaggctcgtgcctttatcgttgctgagcctaacggcaagcgtgtcgtgtttgtaaatcttgatgcttgcatggcatcacagcttgttactataaaggtgcttgaaagacttaaagcaaggtatggagatctttataatgagaataatgtggctatcagtggaatccatacgcatgctggtcctggtggttatctgcagtatgtagtttatattgttacatcacttgggtttgttcgccaatcatttgatgtgattgtcaatggaattgagcaatgcattgttgaagctcacaacaatctccaccctgggaaaatctatgtgaacaaaggtgacctccttgatgccagtgtgaatcgcagcccaagtgcatatctaaataaccccgctgaagagagaggcaagtataagtacaatgttgataaagaaatgaccctcatcaagtttgtagatgatgagtctggtccgattgggagtttcaattggtttgcaactcatggaacatctatgagtcgtacaaattctttgataagtggtgataacaaaggagcagccgcacgtttcatggaagattgggcagaacaaaatggcattccaaaacaggcagctcatgtaaatcacgatggtttggaatcttcacacatgacctctcgacttccgagaagagtctccccaataattcctgaaccaaatgagataactgatgacttagtacaattggcgtcatcctacgaagcctcaggtggacggcgattatcaagttcaagtatcaccaagcgtatcagaagtacccaacaaaacagacctaaatttgtttctgcattctgccagtcaaattgtggtgatgttagtccaaatgtcctgggaactttctgtatagacactggccttccttgtgacttcaatcacagcacatgcaatgggaagaatgaattatgctatggacgagggccaggatatcctgatgaatttgaaagtacccatatcattggcaataggcaatttcaaaaggctgtagatctttttagttcagcttctgaagaaatacaaggcaaaattgactacaggcatacttacctagatttctcaaaacttgaagtgaatgtccgtacaagtacaggaagtcagcaagttgtgaaaacatgcccagcagccatggggtttgcctttgctgctggaaccacagatggtcctggagcttttgactttaaacaaggagatgtcaagggaaaccctttctggagattagtaagaaacttacttaagacaccagggaaggagcaagtcgaatgtcaagcaccaaaacctatcttgctagacactggtgaaatgaaggaaccatatgattgggcgcctgcaattcttccaattcagatcataagaatcggccagctggctatcttgtgtgtccctggagaattcacaacaatggctggcaggaggctacgtgatgccgtcaaagctgtacttacaagtgacaacagtggtgaatttaataacattcatgttgttcttgcggggctaacaaatacatattcgcagtatattacaacttttgaagaatatgagatccaaagatacgagggagcatcgacgttgtatggcccccacacgttgagcgcctacattcaggagttccagaaacttgctacagccatggtggcaaacaaagaggtcccgacaaattttcagcccccagacatgttggacaagcaaataggactcctcccaggcgttgtgttcgactccacacctcctggggtggagttcggagatgtcagctcagacgtccccgcaagctcaactttcaggaagggcagtgtcgtgaacgctacattctactcggcgtgcccgaggaatgaccttctcacggacggcacgttcgcgctcgttgagaagctggacggcagcaacagctgggttcctgcctacgacgacgacgactggtcactacgcttcaagtggtcgagaccgtcgaagctgagcccgagaagctttgcgacgctggaatggaccgttcctggagacgccccgtcgggcgtttataggttgaggcattttggtgcctccaaaccactgattgggtccatcaaacattttacagggacctctcgggcgttcgcagtgcgttaggttgcacaccgttgcgttgcgttcgacggcacacctgtcagagaatcgacaccgggtcatatatttactttgcatacctgccacagtatatggacatgttttccctatagtttttacatgctcctgatattaataacgctgtccatcgcccgttctgtttggtcatgacaaatacccaaatcgccatatagctacagactcgatgtgtgtgaaatttctatatattaaagcaggaaagaaatctgttctcagattcagc

SEQ ID NO: 32621 - DNA, 2193 bp, Zea Mays
cggcgtgtgcttccaaggatatcacttgtgccccttgcctcccaggctctcaattcccaccctctaaatctgtccactcccaccgccactccccctctgccgctgccggaaattcatgttaactattttttttggtgcgtctacatcagaatctcataagcctgcagtcaatttgtcagtttattgagacatccaacttgcatgagttgatcaacaagcccatccctggttccttatggaggcatcatcttccttgcgcttccaagtttctcgttttagttcgttcaagatatggctatgcctttttctggtactcgttcttcagaactgcagcccagcactttcagattcaccatatttggtcggtatggggagctatgacataacagggccagcagcagacgttaacatgatgggatatgcaaatgctgagcagattgcatcaggaattcactttaggctaaaggctcgtgcctttatcgttgctgagcctaacggcaagcgtgtcgtgtttgtaaatcttgatgcttgcatggcatcacagcttgttactataaaggtgcttgaaagacttaaagcaaggtatggagatctttataatgagaataatgtggctatcagtggaatccatacgcatgctggtcctggtggttatctgcagtatgtagtttatattgttacatcacttgggtttgttcgccaatcatttgatgtgattgtcaatggaattgagcaatgcattgttgaagctcacaacaatctccaccctgggaaaatctatgtgaacaaaggtgacctccttgatgccagtgtgaatcgcagcccaagtgcatatctaaataaccccgctgaagagagaggcaagtataagtacaatgttgataaagaaatgaccctcatcaagtttgtagatgatgagtctggtccgattgggagtttcaattggtttgcaactcatggaacatctatgagtcgtacaaattctttgataagtggtgataacaaaggagcagccgcacgtttcatggaagattgggcagaacaaaatggcattccaaaacaggcagctcatgtaaatcacgatggtttggaatcttcacacatgacctctcgacttccgagaagagtctccccaataattcctgaaccaaatgagataactgatgacttagtacaattggcgtcatcctacgaagcctcaggtggacggcgattatcaagttcaagtatcaccaagcgtatcagaagtacccaacaaaacagacctaaatttgtttctgcattctgccagtcaaattgtggtgatgttagtccaaatgtcctgggaactttctgtatagacactggccttccttgtgacttcaatcacagcacatgcaatgggaagaatgaattatgctatggacgagggccaggatatcctgatgaatttgaaagtacccatatcattggcaataggcaatttcaaaaggctgtagatctttttagttcagcttctgaagaaatacaaggcaaaattgactacaggcatacttacctagatttctcaaaacttgaagtgaatgtccgtacaagtacaggaagtcagcaagttgtgaaaacatgcccagcagccatggggtttgcctttgctgctggaaccacagatggtcctggagcttttgactttaaacaaggagatgtcaagggaaaccctttctggagattagtaagaaacttacttaagacaccagggaaggagcaagtcgaatgtcaagcaccaaaacctatcttgctagacactggtgaaatgaaggaaccatatgattgggcgcctgcaattcttccaattcagatcataagaatcggccagctggctatcttgtgtgtccctggagaattcacaacaatggctggcaggaggctacgtgatgccgtcaaagctgtacttacaagtgacaacagtggtgaatttaataacattcatgttgttcttgcggggctaacaaatacatattcgcagtatattacaacttttgaagaatatgagatccaaagatacgagacccctgggtgcattattgcaagctgttttaaccgccgcggaccccttatatttagcgtcacaaagggacaattctacatttttttcatctttggttgcaagtgttaatgtccttttgtttccttattttgtatgttcgcatggtgctt

SEQ ID NO: 32622 - DNA, 2816 bp, Zea Mays
cggcgtgtgcttccaaggatatcacttgtgccccttgcctcccaggctctcaattcccaccctctaaatctgtccactcccaccgccactccccctctgccgctgccggaaattcatgttaactattttttttggtgcgtctacatcagaatctcataagcctgcagtcaatttgtcagtttattgagacatccaacttgcatgagttgatcaacaagcccatccctggttccttatggaggcatcatcttccttgcgcttccaagtttctcgttttagttcgttcaagatatggctatgcctttttctggtactcgttcttcagaactgcagcccagcactttcagattcaccatatttggtcggtatggggagctatgacataacagggccagcagcagacgttaacatgatgggatatgcaaatgctgagcagattgcatcaggaattcactttaggctaaaggctcgtgcctttatcgttgctgagcctaacggcaagcgtgtcgtgtttgtaaatcttgatgcttgcatggcatcacagcttgttactataaaggtgcttgaaagacttaaagcaaggtatggagatctttataatgagaataatgtggctatcagtggaatccatacgcatgctggtcctggtggttatctgcagtatgtagtttatattgttacatcacttgggtttgttcgccaatcatttgatgtgattgtcaatggaattgagcaatgcattgttgaagctcacaacaatctccaccctgggaaaatctatgtgaacaaaggtgacctccttgatgccagtgtgaatcgcagcccaagtgcatatctaaataaccccgctgaagagagaggcaagtataagtacaatgttgataaagaaatgaccctcatcaagtttgtagatgatgagtctggtccgattgggagtttcaattggtttgcaactcatggaacatctatgagtcgtacaaattctttgataagtggtgataacaaaggagcagccgcacgtttcatggaagattgggcagaacaaaatggcattccaaaacaggcagctcatgtaaatcacgatggtttggaatcttcacacatgacctctcgacttccgagaagagtctccccaataattcctgaaccaaatgagataacctcaggtggacggcgattatcaagttcaagtatcaccaagcgtatcagaagtacccaacaaaacagacctaaatttgtttctgcattctgccagtcaaattgtggtgatgttagtccaaatgtcctgggaactttctgtatagacactggccttccttgtgacttcaatcacagcacatgcaatgggaagaatgaattatgctatggacgagggccaggatatcctgatgaatttgaaagtacccatatcattggcaataggcaatttcaaaaggctgtagatctttttagttcagcttctgaagaaatacaaggcaaaattgactacaggcatacttacctagatttctcaaaacttgaagtgaatgtccgtacaagtacaggaagtcagcaagttgtgaaaacatgcccagcagccatggggtttgcctttgctgctggaaccacagatggtcctggagcttttgactttaaacaaggagatgtcaagggaaaccctttctggagattagtaagaaacttacttaagacaccagggaaggagcaagtcgaatgtcaagcaccaaaacctatcttgctagacactggtgaaatgaaggaaccatatgattgggcgcctgcaattcttccaattcagatcataagaatcggccagctggctatcttgtgtgtccctggagaattcacaacaatggctggcaggaggctacgtgatgccgtcaaagctgtacttacaagtgacaacagtggtgaatttaataacattcatgttgttcttgcggggctaacaaatacatattcgcagtatattacaacttttgaagaatatgagatccaaagatacgagggagcatcgacgttgtatggcccccacacgttgagcgcctacattcaggagttccagaaacttgctacagccatggtggcaaacaaagaggtcccgacaaattttcagcccccagacatgttggacaagcaaataggactcctcccaggcgttgtgttcgactccacacctcctggggtggagttcggagatgtcagctcagacgtccccgcaagctcaactttcaggaagggcagtgtcgtgaacgctacattctactcggcgtgcccgaggaatgaccttctcacggacggcacgttcgcgctcgttgagaagctggacggcagcaacagctgggttcctgcctacgacgacgacgactggtcactacgcttcaagtggtcgagaccgtcgaagctgagcccgagaagctttgcgacgctggaatggaccgttcctggagacgccccgtcgggcgtttataggttgaggcattttggtgcctccaaaccactgattgggtccatcaaacattttacagggacctctcgggcgttcgcagtgcgttaggttgcacaccgttgcgttgcgttcgacggcacacctgtcagagaatcgacaccgggtcatatatttactttgcatacctgccacagtatatggacatgttttccctatagtttttacatgctcctgatattaataacgctgtccatcgcccgttctgtttggtcatgacaaatacccaaatcgccatatagctacagactcgatgtgtgtgaaatttctatatattaaagcaggaaagaaatctgttctcagattcagc

SEQ ID NO: 32623 - DNA, 2765 bp, Zea Mays
atctgcagctatttttggtaaacattagctcatgtatgttagtatactgtgttcatgtggagaaatgcaattgcctgcagtcaatttgtcagtttattgagacatccaacttgcatgagttgatcaacaagcccatccctggttccttatggaggcatcatcttccttgcgcttccaagtttctcgttttagttcgttcaagatatggctatgcctttttctggtactcgttcttcagaactgcagcccagcactttcagattcaccatatttggtcggtatggggagctatgacataacagggccagcagcagacgttaacatgatgggatatgcaaatgctgagcagattgcatcaggaattcactttaggctaaaggctcgtgcctttatcgttgctgagcctaacggcaagcgtgtcgtgtttgtaaatcttgatgcttgcatggcatcacagcttgttactataaaggtgcttgaaagacttaaagcaaggtatggagatctttataatgagaataatgtggctatcagtggaatccatacgcatgctggtcctggtggttatctgcagtatgtagtttatattgttacatcacttgggtttgttcgccaatcatttgatgtgattgtcaatggaattgagcaatgcattgttgaagctcacaacaatctccaccctgggaaaatctatgtgaacaaaggtgacctccttgatgccagtgtgaatcgcagcccaagtgcatatctaaataaccccgctgaagagagaggcaagtataagtacaatgttgataaagaaatgaccctcatcaagtttgtagatgatgagtctggtccgattgggagtttcaattggtttgcaactcatggaacatctatgagtcgtacaaattctttgataagtggtgataacaaaggagcagccgcacgtttcatggaagattgggcagaacaaaatggcattccaaaacaggcagctcatgtaaatcacgatggtttggaatcttcacacatgacctctcgacttccgagaagagtctccccaataattcctgaaccaaatgagataactgatgacttagtacaattggcgtcatcctacgaagcctcaggtggacggcgattatcaagttcaagtatcaccaagcgtatcagaagtacccaacaaaacagacctaaatttgtttctgcattctgccagtcaaattgtggtgatgttagtccaaatgtcctgggaactttctgtatagacactggccttccttgtgacttcaatcacagcacatgcaatgggaagaatgaattatgctatggacgagggccaggatatcctgatgaatttgaaagtacccatatcattggcaataggcaatttcaaaaggctgtagatctttttagttcagcttctgaagaaatacaaggcaaaattgactacaggcatacttacctagatttctcaaaacttgaagtgaatgtccgtacaagtacaggaagtcagcaagttgtgaaaacatgcccagcagccatggggtttgcctttgctgctggaaccacagatggtcctggagcttttgactttaaacaaggagatgtcaagggaaaccctttctggagattagtaagaaacttacttaagacaccagggaaggagcaagtcgaatgtcaagcaccaaaacctatcttgctagacactggtgaaatgaaggaaccatatgattgggcgcctgcaattcttccaattcagatcataagaatcggccagctggctatcttgtgtgtccctggagaattcacaacaatggctggcaggaggctacgtgatgccgtcaaagctgtacttacaagtgacaacagtggtgaatttaataacattcatgttgttcttgcggggctaacaaatacatattcgcagtatattacaacttttgaagaatatgagatccaaagatacgagggagcatcgacgttgtatggcccccacacgttgagcgcctacattcaggagttccagaaacttgctacagccatggtggcaaacaaagaggtcccgacaaattttcagcccccagacatgttggacaagcaaataggactcctcccaggcgttgtgttcgactccacacctcctggggtggagttcggagatgtcagctcagacgtccccgcaagctcaactttcaggaagggcagtgtcgtgaacgctacattctactcggcgtgcccgaggaatgaccttctcacggacggcacgttcgcgctcgttgagaagctggacggcagcaacagctgggttcctgcctacgacgacgacgactggtcactacgcttcaagtggtcgagaccgtcgaagctgagcccgagaagctttgcgacgctggaatggaccgttcctggagacgccccgtcgggcgtttataggttgaggcattttggtgcctccaaaccactgattgggtccatcaaacattttacagggacctctcgggcgttcgcagtgcgttaggttgcacaccgttgcgttgcgttcgacggcacacctgtcagagaatcgacaccgggtcatatatttactttgcatacctgccacagtatatggacatgttttccctatagtttttacatgctcctgatattaataacgctgtccatcgcccgttctgtttggtcatgacaaatacccaaatcgccatatagctacagactcgatgtgtgtgaaatttctatatattaaagcaggaaagaaatctgttctcagattcagc

SEQ ID NO: 32624 - DNA, 2083 bp, Zea Mays
attagctcatgtatgttagtatactgtgttcatgtggagaaatgcaattgcctgcagtcaatttgtcagtttattgagacatccaacttgcatgagttgatcaacaagcccatccctggttccttatggaggcatcatcttccttgcgcttccaagtttctcgttttagttcgttcaagatatggctatgcctttttctggtactcgttcttcagaactgcagcccagcactttcagattcaccatatttggtcggtatggggagctatgacataacagggccagcagcagacgttaacatgatgggatatgcaaatgctgagcagattgcatcaggaattcactttaggctaaaggctcgtgcctttatcgttgctgagcctaacggcaagcgtgtcgtgtttgtaaatcttgatgcttgcatggcatcacagcttgttactataaaggtgcttgaaagacttaaagcaaggtatggagatctttataatgagaataatgtggctatcagtggaatccatacgcatgctggtcctggtggttatctgcagtatgtagtttatattgttacatcacttgggtttgttcgccaatcatttgatgtgattgtcaatggaattgagcaatgcattgttgaagctcacaacaatctccaccctgggaaaatctatgtgaacaaaggtgacctccttgatgccagtgtgaatcgcagcccaagtgcatatctaaataaccccgctgaagagagaggcaagtataagtacaatgttgataaagaaatgaccctcatcaagtttgtagatgatgagtctggtccgattgggagtttcaattggtttgcaactcatggaacatctatgagtcgtacaaattctttgataagtggtgataacaaaggagcagccgcacgtttcatggaagattgggcagaacaaaatggcattccaaaacaggcagctcatgtaaatcacgatggtttggaatcttcacacatgacctctcgacttccgagaagagtctccccaataattcctgaaccaaatgagataactgatgacttagtacaattggcgtcatcctacgaagcctcaggtggacggcgattatcaagttcaagtatcaccaagcgtatcagaagtacccaacaaaacagacctaaatttgtttctgcattctgccagtcaaattgtggtgatgttagtccaaatgtcctgggaactttctgtatagacactggccttccttgtgacttcaatcacagcacatgcaatgggaagaatgaattatgctatggacgagggccaggatatcctgatgaatttgaaagtacccatatcattggcaataggcaatttcaaaaggctgtagatctttttagttcagcttctgaagaaatacaaggcaaaattgactacaggcatacttacctagatttctcaaaacttgaagtgaatgtccgtacaagtacaggaagtcagcaagttgtgaaaacatgcccagcagccatggggtttgcctttgctgctggaaccacagatggtcctggagcttttgactttaaacaaggagatgtcaagggaaaccctttctggagattagtaagaaacttacttaagacaccagggaaggagcaagtcgaatgtcaagcaccaaaacctatcttgctagacactggtgaaatgaaggaaccatatgattgggcgcctgcaattcttccaattcagatcataagaatcggccagctggctatcttgtgtgtccctggagaattcacaacaatggctggcaggaggctacgtgatgccgtcaaagctgtacttacaagtgacaacagtggtgaatttaataacattcatgttgttcttgcggggctaacaaatacatattcgcagtatattacaacttttgaagaatatgagatccaaagatacgagacccctgggtgcattattgcaagctgttttaaccgccgcggaccccttatatttagcgtcacaaagggacaattctacatttttttcatctttggttgcaagtgttaatgtccttttgtttccttattttgtatgttcgcatggtgctt

SEQ ID NO: 32625 - DNA, 2683 bp, Zea Mays
agtatactgtgttcatgtggagaaatgcaattgcctgcagtcaatttgtcagtttattgagacatccaacttgcatgagttgatcaacaagcccatccctggttccttatggaggcatcatcttccttgcgcttccaagtttctcgttttagttcgttcaagatatggctatgcctttttctggtactcgttcttcagaactgcagcccagcactttcagattcaccatatttggtcggtatggggagctatgacataacagggccagcagcagacgttaacatgatgggatatgcaaatgctgagcagattgcatcaggaattcactttaggctaaaggctcgtgcctttatcgttgctgagcctaacggcaagcgtgtcgtgtttgtaaatcttgatgcttgcatggcatcacagcttgttactataaaggtgcttgaaagacttaaagcaaggtatggagatctttataatgagaataatgtggctatcagtggaatccatacgcatgctggtcctggtggttatctgcagtatgtagtttatattgttacatcacttgggtttgttcgccaatcatttgatgtgattgtcaatggaattgagcaatgcattgttgaagctcacaacaatctccaccctgggaaaatctatgtgaacaaaggtgacctccttgatgccagtgtgaatcgcagcccaagtgcatatctaaataaccccgctgaagagagaggcaagtataagtacaatgttgataaagaaatgaccctcatcaagtttgtagatgatgagtctggtccgattgggagtttcaattggtttgcaactcatggaacatctatgagtcgtacaaattctttgataagtggtgataacaaaggagcagccgcacgtttcatggaagattgggcagaacaaaatggcattccaaaacaggcagctcatgtaaatcacgatggtttggaatcttcacacatgacctctcgacttccgagaagagtctccccaataattcctgaaccaaatgagataagtggacggcgattatcaagttcaagtatcaccaagcgtatcagaagtacccaacaaaacagacctaaatttgtttctgcattctgccagtcaaattgtggtgatgttagtccaaatgtcctgggaactttctgtatagacactggccttccttgtgacttcaatcacagcacatgcaatgggaagaatgaattatgctatggacgagggccaggatatcctgatgaatttgaaagtacccatatcattggcaataggcaatttcaaaaggctgtagatctttttagttcagcttctgaagaaatacaaggcaaaattgactacaggcatacttacctagatttctcaaaacttgaagtgaatgtccgtacaagtacaggaagtcagcaagttgtgaaaacatgcccagcagccatggggtttgcctttgctgctggaaccacagatggtcctggagcttttgactttaaacaaggagatgtcaagggaaaccctttctggagattagtaagaaacttacttaagacaccagggaaggagcaagtcgaatgtcaagcaccaaaacctatcttgctagacactggtgaaatgaaggaaccatatgattgggcgcctgcaattcttccaattcagatcataagaatcggccagctggctatcttgtgtgtccctggagaattcacaacaatggctggcaggaggctacgtgatgccgtcaaagctgtacttacaagtgacaacagtggtgaatttaataacattcatgttgttcttgcggggctaacaaatacatattcgcagtatattacaacttttgaagaatatgagatccaaagatacgagggagcatcgacgttgtatggcccccacacgttgagcgcctacattcaggagttccagaaacttgctacagccatggtggcaaacaaagaggtcccgacaaattttcagcccccagacatgttggacaagcaaataggactcctcccaggcgttgtgttcgactccacacctcctggggtggagttcggagatgtcagctcagacgtccccgcaagctcaactttcaggaagggcagtgtcgtgaacgctacattctactcggcgtgcccgaggaatgaccttctcacggacggcacgttcgcgctcgttgagaagctggacggcagcaacagctgggttcctgcctacgacgacgacgactggtcactacgcttcaagtggtcgagaccgtcgaagctgagcccgagaagctttgcgacgctggaatggaccgttcctggagacgccccgtcgggcgtttataggttgaggcattttggtgcctccaaaccactgattgggtccatcaaacattttacagggacctctcgggcgttcgcagtgcgttaggttgcacaccgttgcgttgcgttcgacggcacacctgtcagagaatcgacaccgggtcatatatttactttgcatacctgccacagtatatggacatgttttccctatagtttttacatgctcctgatattaataacgctgtccatcgcccgttctgtttggtcatgacaaatacccaaatcgccatatagctacagactcgatgtgtgtgaaatttctatatattaaagcaggaaagaaatctgttctcagattcagc

SEQ ID NO: 32626 - DNA, 2758 bp, Zea Mays
ctactagctagcttccttccaagttccatccatatccacatcgcaagctgaggttttgcctggtagcttccctgccaagtgcaagaccgccaaccacgtccggctgcttgaaacccacggacgatcgaggctacaaccgtgcgtgtggagcgcgacgtacgctgctcagctggtgccctgaagtttcggtacgatggagttcaccggcaccaagaaggacgtcgagatggccgggcagctgaacaccgagctgtcgtcgagagaacacgcgctcccggcgctcctgatcaaggttccgtcgcaggccatcgccggcttcgactgcgtgcccgccgccgccgacgccgccgtcgtctccctgaacgagccgggtgacagggcggaggacgtcgccatcagcatcctccccgcgccggcgagagcctacggcggcgacgcgcacggcgtcccgtactccgtctcgctcagcatgccggcgtcgccgtcggggttccacctgtcgtcgcacttcatgtgcgcgggcgacgcgcccgtggcgacggccgacgtccgcccggtgctgctggaggatcagcggcaggcggcggcggcggcgcactcgccgcggctgatcaagcagacgcggttccactcgcagcccatcctcaacctgcacccgccgtccaagaacgtcgtcgacgaggctgcggcacggcggtgggacagcgcgcgcgacacgcggttcgacccgttcaagaccttctcgggccgcctcgagcgccagctgtccaacctgcgcggccgcccgcaggagcccgtcgacggcatatccccggactccaagatctccgaggaggagaccgaccaggtccccgccgccgaccgctacttcgatgccttggaaggccccgagctcgacacgctcagagtaagcactaaagcttcaagcttgacgacgtgtcggagtggactggagaaccaaaaaaaaaaaacgtgtctaagcagtaagcaccacgatctttcgtcttttgcattgcaggccacggaggtgccggtgctgccgaaagacgagaagtggccattccttctgcggttcccgatcagcgcgttcggtatgtgcctgggcgtgagcagccaggccatcctgtggaagaccctggcgtcggcggcgccgacggcgttcctgcacgtgagccccgcggtgagccacgcgctgtggtacgcggcgctggcgctgacggtgctggtgtccggcatctacctgctgaaggtggtgttctacttcgaggcggtgcggcgcgagttctaccacccgatccgcgccaacttcttcttcgcgccgtggatcgcgtgcctgttcctggcgctgggcgcgccgcggctggtggcggagatgcaccacggcgtgtggtacgcgctgatggcgcccatcttctgcctggagctcaagatctacgggcagtggatgtccggcgggcagcggcggctgtccaaggtggccaacccgtccaaccacctgtccatcgtcggcaacttcgtgggcgcgctgctgggcgccaagatgggcctccgcgagggccccgtcttcttcttcgccgtcgggctggcgcactacatggtgctgttcgtgacgctataccagcggctgcccaccaacatgacgctccccaaggagctccaccccgtgttcttcctcttcgtcgccgcccccagcgtagcgtccatggcctgggccaagatcaacggccagttcgacgccggcgcccggatcgcctacttcatcgcgctcttcctctacatgtcactggcggtgcgcatcaacttcttccgtggtttccgcttctcgctggcgtggtgggcgtacacgttcccgatgaccggcgcgtccgtggcggcgatcacgtacgcgacggaggtggacaacgtgctgacccgggcgctctgcatcgggctgtcgggcatctccaccgtcaccgtcgccgggctcctggtgaccacggtgttccacgccttcgtcctcagggatctcttccccaacgacgtgtccatcgccatcacgaggaagaagcccaagttcagcaagatcctggcgcacttccgctcgtccagctccgacatgaaggagctcgtgctgtccctccccaggacggcgcagtctgactccggcgaaaccgagaccgagccgtccgtgaccgccaaatcccgagccgagccgtgagtgactagctcccggtcgcggtctcgttctctcatgtatagctgctacatcccttagctagctgcacacagagcgaggctactgtatagctactacgacgaagaagtcgccgataagcaagtgtgcagtgcaggcacgcgtccatcgatcggcctaaagcggctgcagcagtcggtcggtcggtcggtcggcgtggattaaatgatcggacatatacgaagggtgcacacggccggtatccttggagcattcctagtgatgatggggatatgatgacgtgaggaaaaaatatatactactcctaccactagtagattgattaattagtttgtataaatctacgtaccgacatattataagtagcttgtgtggactatttaagtaaaagaataaaaaccatgaacatgctctatggccttcaaagatctggaccttgcaaactgcgggcattccgcgcgtacgacgtcgcatttgccgttctgccaggcttggtccacgagcgcatcatcactggagaattggagaccatgtgtttgctgaccattgttgcggggtttcttc

SEQ ID NO: 32627 - DNA, 2749 bp, Zea Mays
ccgccctcgcgctccgctgagctgcgatttcttccattaagcggcctgcttcgagttcgagcgtagcttgcgtagggaacccccggttgcttgctcgtcagtcgtcactgtactagagtccagaaaccgctggaactttacgtagtaaaacaaaacataacaacacaggtaaggtgagcacagctaggagtttcgtactagatcgatcggtagatatggcgagcatcggcgtacgggattgccgagccgtgcttcggccgaattggtggatctggtgccctgaagtttcggtacgatggagttcaccggcaccaagaaggacgtcgagatggccgggcagctgaacaccgagctgtcgtcgagagaacacgcgctcccggcgctcctgatcaaggttccgtcgcaggccatcgccggcttcgactgcgtgcccgccgccgccgacgccgccgtcgtctccctgaacgagccgggtgacagggcggaggacgtcgccatcagcatcctccccgcgccggcgagagcctacggcggcgacgcgcacggcgtcccgtactccgtctcgctcagcatgccggcgtcgccgtcggggttccacctgtcgtcgcacttcatgtgcgcgggcgacgcgcccgtggcgacggccgacgtccgcccggtgctgctggaggatcagcggcaggcggcggcggcggcgcactcgccgcggctgatcaagcagacgcggttccactcgcagcccatcctcaacctgcacccgccgtccaagaacgtcgtcgacgaggctgcggcacggcggtgggacagcgcgcgcgacacgcggttcgacccgttcaagaccttctcgggccgcctcgagcgccagctgtccaacctgcgcggccgcccgcaggagcccgtcgacggcatatccccggactccaagatctccgaggaggagaccgaccaggtccccgccgccgaccgctacttcgatgccttggaaggccccgagctcgacacgctcagagccacggaggtgccggtgctgccgaaagacgagaagtggccattccttctgcggttcccgatcagcgcgttcggtatgtgcctgggcgtgagcagccaggccatcctgtggaagaccctggcgtcggcggcgccgacggcgttcctgcacgtgagccccgcggtgagccacgcgctgtggtacgcggcgctggcgctgacggtgctggtgtccggcatctacctgctgaaggtggtgttctacttcgaggcggtgcggcgcgagttctaccacccgatccgcgccaacttcttcttcgcgccgtggatcgcgtgcctgttcctggcgctgggcgcgccgcggctggtggcggagatgcaccacggcgtgtggtacgcgctgatggcgcccatcttctgcctggagctcaagatctacgggcagtggatgtccggcgggcagcggcggctgtccaaggtggccaacccgtccaaccacctgtccatcgtcggcaacttcgtgggcgcgctgctgggcgccaagatgggcctccgcgagggccccgtcttcttcttcgccgtcgggctggcgcactacatggtgctgttcgtgacgctataccagcggctgcccaccaacatgacgctccccaaggagctccaccccgtgttcttcctcttcgtcgccgcccccagcgtagcgtccatggcctgggccaagatcaacggccagttcgacgccggcgcccggatcgcctacttcatcgcgctcttcctctacatgtcactggcggtgcgcatcaacttcttccgtggtttccgcttctcgctggcgtggtgggcgtacacgttcccgatgaccggcgcgtccgtggcggcgatcacgtacgcgacggaggtggacaacgtgctgacccgggcgctctgcatcgggctgtcgggcatctccaccgtcaccgtcgccgggctcctggtgaccacggtgttccacgccttcgtcctcagggatctcttccccaacgacgtgtccatcgccatcacgaggaagaagcccaagttcagcaagatcctggcgcacttccgctcgtccagctccgacatgaaggagctcgtgctgtccctccccaggacggcgcagtctgactccggcgaaaccgagaccgagccgtccgtgaccgccaaatcccgagccgagccgtgagtgactagctcccggtcgcggtctcgttctctcatgtatagctgctacatcccttagctagctgcacacagagcgaggctactgtatagctactacgacgaagaagtcgccgataagcaagtgtgcagtgcaggcacgcgtccatcgatcggcctaaagcggctgcagcagtcggtcggtcggtcggtcggcgtggattaaatgatcggacatatacgaagggtgcacacggccggtatccttggagcattcctagtgatgatggggatatgatgacgtgaggaaaaaatatatactactcctaccactagtagattgattaattagtttgtataaatctacgtaccgacatattataagtagcttgtgtggactatttaagtaaaagaataaaaaccatgaacatgctctatggccttcaaagatctggaccttgcaaactgcgggcattccgcgcgtacgacgtcgcatttgccgttctgccaggcttggtccacgagcgcatcatcactggagaattggagaccatgtgtttgctgaccattgttgcggggtttcttc

SEQ ID NO: 32628 - DNA, 2619 bp, Zea Mays
cgatttcttccattaagcggcctgcttcgagttcgagcgtagcttgcgtagggaacccccggttgcttgctcgtcagtcgtcactgtactagagtccagaaaccgctggaactttacgtagtaaaacaaaacataacaacacaggtgccctgaagtttcggtacgatggagttcaccggcaccaagaaggacgtcgagatggccgggcagctgaacaccgagctgtcgtcgagagaacacgcgctcccggcgctcctgatcaaggttccgtcgcaggccatcgccggcttcgactgcgtgcccgccgccgccgacgccgccgtcgtctccctgaacgagccgggtgacagggcggaggacgtcgccatcagcatcctccccgcgccggcgagagcctacggcggcgacgcgcacggcgtcccgtactccgtctcgctcagcatgccggcgtcgccgtcggggttccacctgtcgtcgcacttcatgtgcgcgggcgacgcgcccgtggcgacggccgacgtccgcccggtgctgctggaggatcagcggcaggcggcggcggcggcgcactcgccgcggctgatcaagcagacgcggttccactcgcagcccatcctcaacctgcacccgccgtccaagaacgtcgtcgacgaggctgcggcacggcggtgggacagcgcgcgcgacacgcggttcgacccgttcaagaccttctcgggccgcctcgagcgccagctgtccaacctgcgcggccgcccgcaggagcccgtcgacggcatatccccggactccaagatctccgaggaggagaccgaccaggtccccgccgccgaccgctacttcgatgccttggaaggccccgagctcgacacgctcagagccacggaggtgccggtgctgccgaaagacgagaagtggccattccttctgcggttcccgatcagcgcgttcggtatgtgcctgggcgtgagcagccaggccatcctgtggaagaccctggcgtcggcggcgccgacggcgttcctgcacgtgagccccgcggtgagccacgcgctgtggtacgcggcgctggcgctgacggtgctggtgtccggcatctacctgctgaaggtggtgttctacttcgaggcggtgcggcgcgagttctaccacccgatccgcgccaacttcttcttcgcgccgtggatcgcgtgcctgttcctggcgctgggcgcgccgcggctggtggcggagatgcaccacggcgtgtggtacgcgctgatggcgcccatcttctgcctggagctcaagatctacgggcagtggatgtccggcgggcagcggcggctgtccaaggtggccaacccgtccaaccacctgtccatcgtcggcaacttcgtgggcgcgctgctgggcgccaagatgggcctccgcgagggccccgtcttcttcttcgccgtcgggctggcgcactacatggtgctgttcgtgacgctataccagcggctgcccaccaacatgacgctccccaaggagctccaccccgtgttcttcctcttcgtcgccgcccccagcgtagcgtccatggcctgggccaagatcaacggccagttcgacgccggcgcccggatcgcctacttcatcgcgctcttcctctacatgtcactggcggtgcgcatcaacttcttccgtggtttccgcttctcgctggcgtggtgggcgtacacgttcccgatgaccggcgcgtccgtggcggcgatcacgtacgcgacggaggtggacaacgtgctgacccgggcgctctgcatcgggctgtcgggcatctccaccgtcaccgtcgccgggctcctggtgaccacggtgttccacgccttcgtcctcagggatctcttccccaacgacgtgtccatcgccatcacgaggaagaagcccaagttcagcaagatcctggcgcacttccgctcgtccagctccgacatgaaggagctcgtgctgtccctccccaggacggcgcagtctgactccggcgaaaccgagaccgagccgtccgtgaccgccaaatcccgagccgagccgtgagtgactagctcccggtcgcggtctcgttctctcatgtatagctgctacatcccttagctagctgcacacagagcgaggctactgtatagctactacgacgaagaagtcgccgataagcaagtgtgcagtgcaggcacgcgtccatcgatcggcctaaagcggctgcagcagtcggtcggtcggtcggtcggcgtggattaaatgatcggacatatacgaagggtgcacacggccggtatccttggagcattcctagtgatgatggggatatgatgacgtgaggaaaaaatatatactactcctaccactagtagattgattaattagtttgtataaatctacgtaccgacatattataagtagcttgtgtggactatttaagtaaaagaataaaaaccatgaacatgctctatggccttcaaagatctggaccttgcaaactgcgggcattccgcgcgtacgacgtcgcatttgccgttctgccaggcttggtccacgagcgcatcatcactggagaattggagaccatgtgtttgctgaccattgttgcggggtttcttc

SEQ ID NO: 32629 - DNA, 1828 bp, Zea Mays
gtacaatgtcaagcacttgaagagcttcctgaggggcatctgcttgccttccagctagaatatcagcttagggagtgtagaaaaggtaaatgatgtaagacaaatagaatatcagctgcgtcatggaattgctaaaataataaagagaaaatttctaaaatacaagttgacaacatggtgcagctaacttatttgctccttcacctgtatagcaaaatagcagcaaaacatcacaattcacaatgcatattgatagtactgaaccacagtgatacaaatcatttaggaacataaagccctaaatagaattccaaacatacatatagaaccaacattgttaatttgtaggctgaacctattgctaaggtatgttattcatgacaggctttatagttgttggaccagcatatagatccatgctcatgaattgagggaagcaataaagcaagtgatcatgagtttagtatcttgcccatatatcagctcagctacctaaatttgtttccaatattgagattagactaagcaaagattgctcatatagaactattcacttcccttgaagttcttattcggaaacgtaagtgaacattcttacagtatggtgatttcacacaaaggaagaatttataaattctctactgatgcaaactttgcttgaggttccagcttttttcacttgttattcagcttttgctaggacacggtcatatggttgttcctttcatccaaacagagagcactacataatcaatacaggaacaggactgaatatataacaagatatgactgtaacttttgttcactaaatgactaaataataaccagtaaaagatcacctagcaaaaaaaagatagagaagactagcaatttactatatgcaattcaggtcgcctataaaagtgaaacagcgtgcagaaaaaaccagacaaaaagacagtagaagagctaaaaagtgtacataccatttaggcttacagctacataatatacagtggaattaaattaagcacactatttatagcaaaaacaacttcaagatgctggatctacttcagcaccttcaatttctccctccagcatattaatctacttaaaggttacatgtaggcagaaatctagcgctagaacatagcaatatgtattaaactttttgttagcttaaaacaatccgtcaatcaccaacatttttcaaaaaaaaaatctctaatgatatattttgaaatgatgtgaaaataataaggatggttttaacattgagcactctatgttgattatacattgggaaaaaagaaaggaaaacataagaatacataatcaagctgatctgtcacatttcaaattctaagtctactagtggtgctctcgtgaaatagttgacattatatatactgaagtccaggataagataaacaaagtcataaatcttttaaaaaaagaaaattacaggctaaccatctatcaaaaagtagttaattggtgaatcctgagatgcctttgtatctactgctgtcattacatacaggaattacactgatccttgtcttccctaatcaaacattttgaacttgaaaatacatttgtatgactgtggcaaatggacagaaccttcgatatctagtatcatgtcaccgtaataccatatacatctttaaacataagaccttccctcaaagatatgaaatgtgacatagtgaacagaatgagtactaaaactaaatgatcgcaaaacccaaaggtatgaaattttagtactagttaattgagtaaataatttcaactctgcaataaaaccaaactatattactgattattataccaaactgcc

SEQ ID NO: 32630 - DNA, 1897 bp, Zea Mays
gcggcaaaagctactgccgaacgaacgaacgtctcggccgtaagaatcaagatccatccaccacgaagcagaagcaccaaggcaagcagtagcagacagcctgaccgaccctggatcggcgatgaggctaggctaggctaggctacgactacgagcgagacgcctccactggcactggattccccaatccatcgtccggctgccggcacccgccaatcaaatcttgccgccactcctcgccccggttgactgactgactggatggacctcccactctaccataaagtttaccggcaagcggcaaccaccacctcgtcgccgtccggtccacctcacggcaccccactacctgcccatagtcccactcctgcactgcaccgagagagacgtcatcgtgccgttcgccgctacccgctagtagtagtacacaccacccggcactggcctacacctgggactgggaggctgggaatcccggcaggcaaagcgaaagcatccgcgcgagaggcgtcgcgtgttccttgcttcgtcctcacgtgccgtggcccttccgcttcccccgtatccgcccgtcctgttcccgccccgagcgaaccggcggcggcggaggcgatgcagcacgagccgtggcggcctggcgctgagcccgccgccggggctggggcgggccctgctcccaccaccgtcgacgaggcatccatggagcggagcatgagcttcgtcaaggcgcttcaggagctcaagaacctgcgcccgcagctctactcggcctccgagtactgcgagaagtcctacctccgcagcgaacagaaggtgctggacaacatgaaagattacgctgtcagggccctggtcaacgctgtcgaccatcttggcacagtggcctacaagctgacagacctatacgaagagcaggcttcagaaataacaaccctcgagttgaaagtagcatgcttgaaccagcaagtccgtacctgccagacatacacggacaaagaaggcctcagacaacagcagatgatgggggctgccagaagacaccataaccattacatcgtaccatatgcgggaaacaaaagaatgcaggccttctctgttacgcaagccgatgctgatttcgacccaacgccaaggcctttctcttcagcaaggacccttgagtggcatttggtttccgagaagaattccaaaaccagtagaccagatcagtctgaaattgccttaggagaaacaaaaactactaaggcttcgtcaagtggtttccgccttctcggcaaggaatcatctgcatctcccttgtccaggaatgtgcagtccaacataaccagtttggatattgtcagtgccggcatgaaggtaaacctacaacatgatacaaaatcgaccagtttccattatgtaaaaattagtccctagtaaccaaacactcccttatttgaacaccatagagaataatcatgtgctcccaagcgaaaccaatgaattccctggattttcaggatcagcccacgaccaggcacttgtcatcgttcagttctttggacaaccccaggggccgacaaatccagaaggctccgcttcgcacaaaaagtatgctagccgctttctttgtcaaacacagatcagcaaagatgaaaaacgtctctgtgcgttgatcaactgcaagccaagcctgtagtttgctccagccaaaccgacgtggaagtgttaagggcatgagatgtatacatgtttgtatatggtatttgggtcttgtatgctagtgctctagagataaacctttacggatgcgctttcaatctagagtctttggcatcttgctcatgaccttaatgtaatgatttatatggatatatattactagttttataatctagtgtcatctcactagccaaat

SEQ ID NO: 32631 - DNA, 967 bp, Zea Mays
cccctctgtccttttctcccggaatttccacggtgctggacaacatgaaagattacgctgtcagggccctggtcaacgctgtcgaccatcttggcacagtggcctacaagctgacagacctatacgaagagcaggcttcagaaataacaaccctcgagttgaaagtagcatgcttgaaccagcaagtccgtacctgccagacatacacggacaaagaaggcctcagacaacagcagatgatgggggctgccagaagacaccataaccattacatcgtaccatatgcgggaaacaaaagaatgcaggccttctctgttacgcaagccgatgctgatttcgacccaacgccaaggcctttctcttcagcaaggacccttgagtggcatttggtttccgagaagaattccaaaaccagtagaccagatcagtctgaaattgccttaggagaaacaaaaactactaaggcttcgtcaagtggtttccgccttctcggcaaggaatcatctgcatctcccttgtccaggaatgtgcagtccaacataaccagtttggatattgtcagtgccggcatgaagcccacgaccaggcacttgtcatcgttcagttctttggacaaccccaggggccgacaaatccagaaggctccgcttcgcacaaaaagtatgctagccgctttctttgtcaaacacagatcagcaaagatgaaaaacgtctctgtgcgttgatcaactgcaagccaagcctgtagtttgctccagccaaaccgacgtggaagtgttaagggcatgagatgtatacatgtttgtatatggtatttgggtcttgtatgctagtgctctagagataaacctttacggatgcgctttcaatctagagtctttggcatcttgctcatgaccttaatgtaatgatttatatggatatatattactagttttataatctagtgtcatctcactagccaaat

SEQ ID NO: 32632 - DNA, 3181 bp, Zea Mays
gtgtaacacctggcgtaccggacccgaaaattttcttcgaacgagctctgagcagtgtagccctcctgtccgctgttcggtgcccgctgcccacctccctctcctccttccgacctcgccgcctccctccctaaactctaaaccctccaccagccgaagctactgccgcggccgcaacagaggtcgcgacgacgaacgctgaagaagcgccggcgagggagagtcctttactttttcctatgctgtagcaaaacaagcctatatcatcttccaaatatactcgttccgtgccggcggcctcccctcctacgcccctgccgattcttcaatcttcaccaacgtctgcgcgtagcaggctagcagtcggcacgacttcctcagatctgccggacgacttgctgttcgtcaccgactcaccagcaaccaacgtcagccatcagccggcagcaggggaagctgggcggagggtcattgcggcacggcgtccaggcgtacagcaggcaccagcaacagcccatggcaaacgccgcagatgaccctatggcagatgaagccagagtagaagatgccttcacacaggagatcaccgattattcgtacgtccctagataccatgtgttgagttggatggaaactgtggaggggatggtggccggtgtggcggcgcttccgccggtgtatttgatactgaacagaggtgcgattttcttttatatttcttccagttcatgttctccttgtgtggctggtgctggattcaaccgatctagggaagagatgttagttgatttgctgtaaaaatcaatatgttaacagagatatatgatacatgctcctgcttgctcatgatgccggtttggtgccaaggctgtatgccccccttcctatctgtgttttttgttctataatttggaggtttcttagttttttactacagtatttgcctattacgtatcacgttgcatctaattagctcttcttcgttgcccatgccaagatcttcttgagacgggatggggatggaagaggctggtgccctacagacctggttatgttgagtggcatgtgttcaagaaataccttggggactatttcgaccataatcgtgaagcttttctttgtgccgagcagaagcctgatccatttggatggattattgctaaaaagagtgccctgattgctgcagccaaattggtatagttccccctacctctgcattactgaactgtggcctgccatacttgtttatattttatatattggttcagttgcaaattaacttgcaccattgcaaaaacaatcaaaatgctttccagtgcctcaagatggagaaggcacttctcaggtactgtgctagctttctcactcctgacgacaaaaggttgatcctccggatcaaggaccaggcaaagcaaatgatccaatcagagggtgatcaatctttggttgtaactatatgcttggaggttgtcggtgccgagcgcgcggtcgtcgtgcagctcgtgggaccagtccgccgagcggctgctagaggcggacgcagccctcgtgcggaagaagtgcgccgagaagagcgcgccgaggccgaggacgccgccgggcagcaggtcctccagcgcggcgaggtcttggtcttggtcttggagcagggtcttggtcttggagcactgcacgaggagcacatcggcatggtgcttcaagcaatggttcaaatgggtgtccttgttcctactggagatatgactgttgtcagaagaaccgctcaatttttccttaatagagtgcctaacagcacaaaggaaggagagagaaatggcaaccgcagaactgggtttcaaaaagcaattaactaaggaggagaagtttgaaaagaggaagcagagacttgctgcaatcggagaggatcttttggcgattgctgctgatcaaccatttcgcttccctgccacatttacatttgtggtcagagcattctcagttctagatggtactgggaaaggccttgatcctaggtttcatattacagagattgctaagccaaatgccaaggaattgctaagatttaatgacgctggtgttgaaatagttgtgaaggtgtgtggagagacatgtgtattcctcctatgacgaattccttaggctccatgaaggtaagcctgtcttaatgggcttgattgttgaacctgacttagtacttttatccatgtcacggcattgaactagacagtcactcatgtccttaggatattaacggtatacatcaacaattcattctattttaattgcttgcaaaacttttttggcccttcaaatgagttccacgcatcaagaagtcaagattccaggaggcctaaaataggagaggagggcgcagcttgattcaatccatgtcaagtcagaggctgctgcgaggtttgcacatgcaagtagaatttagatggtcctgcttcgctttcatgtggatttatcttgcaaatggtatgtggatccgttccagaggcaatgagccttgcagccagtttgcagtataaaaaacccaattatgtccactgttggttcgacgcagcgtgtgccgaggatttctactgccaagcataagaaagtatttgaaatcaagaacttgcattcattcaatcataatgtgtttcctatcaagcataagtgtgtgtgttttgtttgatatctgctttaataggagattgttcttgtcaccccaaaaatgttcccattctactttcgggcaggtgaattgcagataaatggtctgttcgcaactggtgctctcgggcgactccatcactgagcaacccttcgccccggtggctgcggtgtcgcactggctgacacctgctcgcagttgcattacaagttttactgactatgtattttcaggtttattcaatttcagttgtaatgcttctgacagcagttgtatcagtcctcttgttcagcttccataataatgtactaaacttcagtttggtgtctatctcagtgtacctacactcagttggaaaacttcaaccacactgcaacaaggtttataaaaggtttgctatgaggaaaaacaaatttatgggctcaaacaaagtgtgatagtgaaagtcattttgcttccagcttaaggttactgtagctgtctgcatcgagactgttttgtgtcttgaactaagaaaaaact

SEQ ID NO: 32633 - DNA, 4465 bp, Zea Mays
gtgtaacacctggcgtaccggacccgaaaattttcttcgaacgagctctgagcagtgtagccctcctgtccgctgttcggtgcccgctgcccacctccctctcctccttccgacctcgccgcctccctccctaaactctaaaccctccaccagccgaagctactgccgcggccgcaacagaggtcgcgacgacgaacgctgaagaagcgccggcgagggagagtcctttactttttcctatgctgtagcaaaacaagcctatatcatcttccaaatatactcgttccgtgccggcggcctcccctcctacgcccctgccgattcttcaatcttcaccaacgtctgcgcgtagcaggctagcagtcggcacgacttcctcagatctgccggacgacttgctgttcgtcaccgactcaccagcaaccaacgtcagccatcagccggcagcaggggaagctgggcggagggtcattgcggcacggcgtccaggcgtacagcaggcaccagcaacagcccatggcaaacgccgcagatgaccctatggcagatgaagccagagtagaagatgccttcacacaggagatcaccgattattcgtacgtccctagataccatgtgttgagttggatggaaactgtggaggggatggtggccggtgtggcggcgcttccgccggtgtatttgatactgaacagagatcttcttgagacgggatggggatggaagaggctggtgccctacagacctggttatgttgagtggcatgtgttcaagaaataccttggggactatttcgaccataatcgtgaagcttttctttgtgccgagcagaagcctgatccatttggatggattattgctaaaaagagtgccctgattgctgcagccaaattgtgcctcaagatggagaaggcacttctcaggtactgtgctagctttctcactcctgacgacaaaaggttgatcctccggatcaaggaccaggcaaagcaaatgatccaatcagagggtgatcaatctttggttgtaactatatgcttggaggttgtcggtgccgagcgcgcggtcgtcgtgcagctcgtgggaccagtccgccgagcggctgctagaggcggacgcagccctcgtgcggaagaagtgcgccgagaagagcgcgccgaggccgaggacgccgccgggcagcaggtcctccagcgcggcgaggtcttggtcttggtcttggagcagggtcttggtcttggagcactgcacgaggagcacatcggcatggtgcttcaagcaatggttcaaatgggtgtccttgttcctactggagatatgactgttgtcagaagaaccgctcaatttttccttaatagctttcaagagtgcctaacagcacaaaggaaggagagagaaatggcaaccgcagaactgggtttcaaaaagcaattaactaaggaggagaagtttgaaaagaggaagcagagacttgctgcaatcggagaggatcttttggcgattgctgctgatcaaccatttcgcttccctgccacatttacatttgtggtcagagcattctcagttctagatggtactgggaaaggccttgatcctaggtttcatattacagagattgctaagccgtgagtactttttgcattactagcatctgaatacttattcaaaaacacgcaaagcttgcacatcttcacttattatgtactgtctatattttcatcttgaacttttctggtactgacttgaaatgtctgttaaatttgctagaaatgccaaggaattgctaagatttaatgacgctggtgttgaaatagttgtgaaggcaagtttcaacatttggtcaaagctgttaacctatctctatgatagcacatctcctaagggttagggcttgtttggctaggagcggattgaaggggattggaggagcctattaagcattgaacaatttacccatgcttgtttcctattctttggtcgtgataacgtttgcaaccatgaatagtacatattgcttttccaggtgtgtggagagacatgtgtattcctcctatgacgaattccttaggctccatgaaggatattaacggtatacatcaacaattcattctattttaattgcttgcaaaacttttttggcccttcaaatgagttccacgcatcaagaagtcaagattccaggaggcctaaaataggtaaacttgctgttatatcttttgtgctctcagtagtcgcctattacttgttttaattcgctgatccatgtgcagtgtatcaatttgtcttagtatttttattcgtggggatgcctgactcaaatgaactcatgttcaacactgagcaacctacttataattttggagcctataaaatttctaagctaaaaaaggtaataaaaaggaatgatattatagtcacatcatctgaacaacagtgaagggaagggagggatagatggtctgaatgcctataaatgtcgttcccttggtctgcttcttaaatttgaaaccaagatactatagtcaaatacttctaaacttgaagcctgtaaattggaatcaccaagttaaataagaacaggggtaactattcatagctcagatggttgtcatccaatacgtgcgctaaggcacagacaggtgaggttgcatattcaatccccaagacagtaaaccattgaggcatattaaaacacattttccatgaggtttcctaagtgatcctttaggtaaacagaaccatacctagctccatatgaaactatttcccgatttgaagtacacctaagttaaggttcatacattggagctctggcagtaaaacaatagtccttaccttgagacagcttagattagaatgaggtggatggtaatatggcatgagcaacataccacagttcatgcatggaggaaatcatttttactttctttcctagccatggtagttgtgttgctccttaccaaggcactacatggagcatcatatggttcatgatgtaaacatggttttagatctgtctatactcacactcaagaaccagccaaaatgtgatattccacaacctgagagaaatcaaaatgaaatcatgtacaacatagtacatatgatgatgtgcggtgatgcgggtgcatgtgtgttgtgtgtgtaggagaggagggcgcagcttgattcaatccatgtcaagtcagaggctgctgcgaggtttgcacatgcaagtagaatttagatgacgtgaaatggtattttccagtatggactgtataaatgtaattatattcctatgctggtacgtctgtctaaccttgctattacacttctattatggctttgtgtttacccaaagttccaaacctttcaggtcctgcttcgctttcatgtggatttatcttgcaaatggtatgtggatccgttccagaggcaatgagccttgcagccagtttgcagtataaaaaacccaattatgtccactgttggttcgacgcagcgtgtgccgaggatttctactgccaagcataagaaagtatttgaaatcaagaacttgcattcattcaatcataatgtgtttcctatcaagcataagtgtgtgtgttttgtttgatatctgctttaataggagattgttcttgtcaccccaaaaatgttcccattctactttcgggcaggtgaattgcagataaatggtctgttcgcaactggtgctctcgggcgactccatcactgagcaacccttcgccccggtggctgcggtgtcgcactggctgacacctgctcgcagttgcattacaagttttactgactatgtattttcaggtttattcaatttcagttgtaatgcttctgacagcagttgtatcagtcctcttgttcagcttccattgtacctacactcagttggaaaacttcaaccacactgcaacaaggtttataaaaggtttgctatgaggaaaaacaaatttatgggctcaaacaaagtgtgatagtgaaagtcattttgcttccagcttaagaaccaagccaagaaaacagatatcaactgtgacgccacactcaaaagcttgtttggtgagagggataaggttgggatgctggagatctctaagcttttgagccgtggcttcccgaaaatctccaagcttttgtggtccatggagccagggatggctctttggtaaaagacttcgttgtggatggcctcttttatggtccatgttaagtcccaagtcccactaggtggttaagcagaaaaatcttgtgatggcattaagactttcagactttgtttttgggtctgatgcatgtaaaaaggattcccagtgtttctgttgctcttgcgatcctgtgaggacacatatgagagaaatatttagtttgttgatggcaaatcttgtcttatgttcatgcctgtacctatctgatcaagcgttatgatatgatcccatgcgtggtactgtgttctttagagatg

SEQ ID NO: 32634 - DNA, 4013 bp, Zea Mays
gtgtaacacctggcgtaccggacccgaaaattttcttcgaacgagctctgagcagtgtagccctcctgtccgctgttcggtgcccgctgcccacctccctctcctccttccgacctcgccgcctccctccctaaactctaaaccctccaccagccgaagctactgccgcggccgcaacagaggtcgcgacgacgaacgctgaagaagcgccggcgagggagagtcctttactttttcctatgctgtagcaaaacaagcctatatcatcttccaaatatactcgttccgtgccggcggcctcccctcctacgcccctgccgattcttcaatcttcaccaacgtctgcgcgtagcaggctagcagtcggcacgacttcctcagatctgccggacgacttgctgttcgtcaccgactcaccagcaaccaacgtcagccatcagccggcagcaggggaagctgggcggagggtcattgcggcacggcgtccaggcgtacagcaggcaccagcaacagcccatggcaaacgccgcagatgaccctatggcagatgaagccagagtagaagatgccttcacacaggagatcaccgattattcgtacgtccctagataccatgtgttgagttggatggaaactgtggaggggatggtggccggtgtggcggcgcttccgccggtgtatttgatactgaacagagatcttcttgagacgggatggggatggaagaggctggtgccctacagacctggttatgttgagtggcatgtgttcaagaaataccttggggactatttcgaccataatcgtgaagcttttctttgtgccgagcagaagcctgatccatttggatggattattgctaaaaagagtgccctgattgctgcagccaaattgtgcctcaagatggagaaggcacttctcaggtactgtgctagctttctcactcctgacgacaaaaggttgatcctccggatcaaggaccaggcaaagcaaatgatccaatcagagggtgatcaatctttggttgtaactatatgcttggaggttgtcggtgccgagcgcgcggtcgtcgtgcagctcgtgggaccagtccgccgagcggctgctagaggcggacgcagccctcgtgcggaagaagtgcgccgagaagagcgcgccgaggccgaggacgccgccgggcagcaggtcctccagcgcggcgaggtcttggtcttggtcttggagcagggtcttggtcttggagcactgcacgaggagcacatcggcatggtgcttcaagcaatggttcaaatgggtgtccttgttcctactggagatatgactgttgtcagaagaaccgctcaatttttccttaatagctttcaagagtgcctaacagcacaaaggaaggagagagaaatggcaaccgcagaactgggtttcaaaaagcaattaactaaggaggagaagtttgaaaagaggaagcagagacttgctgcaatcggagaggatcttttggcgattgctgctgatcaaccatttcgcttccctgccacatttacatttgtggtcagagcattctcagttctagatggtactgggaaaggccttgatcctaggtttcatattacagagattgctaagccaaatgccaaggaattgctaagatttaatgacgctggtgttgaaatagttgtgaaggagcggattgaaggggattggaggagcctattaagcattgaacaatttacccatgcttgtttcctattctttggtcgtgataacgtttgcaaccatgaatagtacatattgcttttccaggtgtgtggagagacatgtgtattcctcctatgacgaattccttaggctccatgaaggtaagcctgtcttaatgggcttgattgttgaacctgacttagtacttttatccatgtcacggcattgaactagacagtcactcatgtccttaggatattaacggtatacatcaacaattcattctattttaattgcttgcaaaacttttttggcccttcaaatgagttccacgcatcaagaagtcaagattccaggaggcctaaaataggtaaacttgctgttatatcttttgtgctctcagtagtcgcctattacttgttttaattcgctgatccatgtgcagtgtatcaatttgtcttagtatttttattcgtggggatgcctgactcaaatgaactcatgttcaacactgagcaacctacttataattttggagcctataaaatttctaagctaaaaaaggtaataaaaaggaatgatattatagtcacatcatctgaacaacagtgaagggaagggagggatagatggtctgaatgcctataaatgtcgttcccttggtctgcttcttaaatttgaaaccaagatactatagtcaaatacttctaaacttgaagcctgtaaattggaatcaccaagttaaataagaacaggggtaactattcatagctcagatggttgtcatccaatacgtgcgctaaggcacagacaggtgaggttgcatattcaatccccaagacagtaaaccattgaggcatattaaaacacattttccatgaggtttcctaagtgatcctttaggtaaacagaaccatacctagctccatatgaaactatttcccgatttgaagtacacctaagttaaggttcatacattggagctctggcagtaaaacaatagtccttaccttgagacagcttagattagaatgaggtggatggtaatatggcatgagcaacataccacagttcatgcatggaggaaatcatttttactttctttcctagccatggtagttgtgttgctccttaccaaggcactacatggagcatcatatggttcatgatgtaaacatggttttagatctgtctatactcacactcaagaaccagccaaaatgtgatattccacaacctgagagaaatcaaaatgaaatcatgtacaacatagtacatatgatgatgtgcggtgatgcgggtgcatgtgtgttgtgtgtgtaggagaggagggcgcagcttgattcaatccatgtcaagtcagaggctgctgcgaggtttgcacatgcaagtagaatttagatggtcctgcttcgctttcatgtggatttatcttgcaaatgcgtgtgccgaggatttctactgccaagcataagaaagtgaattgcagataaatggtctgttcgcaactggtgctctcgggcgactccatcactgagcaacccttcgccccggtggctgcggtgtcgcactggctgacacctgctcgcagttgcattacaagttttactgactatgtattttcaggtttattcaatttcagttgtaatgcttctgacagcagttgtatcagtcctcttgttcagcttccataataatgtactaaacttcagtttggtgtctatctcagtgtacctacactcagttggaaaacttcaaccacactgcaacaaggtttataaaaggtttgctatgaggaaaaacaaatttatgggctcaaacaaagtgtgatagtgaaagtcattttgcttccagcttaagaaccaagccaagaaaacagatatcaactgtgacgccacactcaaaagcttgtttggtgagagggataaggttgggatgctggagatctctaagcttttgagccgtggcttcccgaaaatctccaagcttttgtggtccatggagccagggatggctctttggtaaaagacttcgttgtggatggcctcttttatggtccatgttaagtcccaagtcccactaggtggttaagcagaaaaatcttgtgatggcattaagactttcagactttgtttttgggtctgatgcatgtaaaaaggattcccagtgtttctgttgctcttgcgatcctgtgaggacacatatgagagaaatatttagtttgttgatggcaaatcttgtcttatgttcatgcctgtacctatctgatcaagcgttatgatatgatcccatgcgtggtactgtgttctttagagatg

SEQ ID NO: 32635 - DNA, 3264 bp, Zea Mays
gtaacacctggcgtaccggacccgaaaattttcttcgaacgagctctgagcagtgtagccctcctgtccgctgttcggtgcccgctgcccacctccctctcctccttccgacctcgccgcctccctccctaaactctaaaccctccaccagccgaagctactgccgcggccgcaacagaggtcgcgacgacgaacgctgaagaagcgccggcgagggagagtcctttactttttcctatgctgtagcaaaacaagcctatatcatcttccaaatatactcgttccgtgccggcggcctcccctcctacgcccctgccgattcttcaatcttcaccaacgtctgcgcgtagcaggctagcagtcggcacgacttcctcagatctgccggacgacttgctgttcgtcaccgactcaccagcaaccaacgtcagccatcagccggcagcaggggaagctgggcggagggtcattgcggcacggcgtccaggcgtacagcaggcaccagcaacagcccatggcaaacgccgcagatgaccctatggcagatgaagccagagtagaagatgccttcacacaggagatcaccgattattcgtacgtccctagataccatgtgttgagttggatggaaactgtggaggggatggtggccggtgtggcggcgcttccgccggtgtatttgatactgaacagagatcttcttgagacgggatggggatggaagaggctggtgccctacagacctggttatgttgagtggcatgtgttcaagaaataccttggggactatttcgaccataatcgtgaagcttttctttgtgccgagcagaagcctgatccatttggatggattattgctaaaaagagtgccctgattgctgcagccaaattgtgcctcaagatggagaaggcacttctcaggtactgtgctagctttctcactcctgacgacaaaaggttgatcctccggatcaaggaccaggcaaagcaaatgatccaatcagagggtgatcaatctttggttgtaactatatgcttggaggtatgcttgctacaaactacaccaaactgttgccaaactagcgccagggattcgagccctccccgcgtttccttgagcatgagcctgtccgcgtgtaacacctggcggaccggacccgaaaattttcttcgaatgagctctgagccgtgtagccctccagtccgctgttcggtgcccgctgcccacctccctctcctccttccgacctcgccgcctccctccctaaactctaaaccttccaccagccgaagctactgccgcggccgcagcagaggtcgcgacgacgaacgctgaagaagcgccggcgagggagagctccgacgagtcctctctgtcggccaggttgtcggtgccgagcgcgcggtcgtcgtgcagctcgtgggaccagtccgccgagcggctgctagaggcggacgcagccctcgtgcggaagaagtgcgccgagaagagcgcgccgaggccgaggacgccgccgggcagcaggtcctccagcgcggcgaggtcttggtcttggtcttggagcagggtcttggtcttggagcactgcacgaggagcacatcggcatggtgcttcaagcaatggttcaaatgggtgtccttgttcctactggagatatgactgttgtcagaagaaccgctcaatttttccttaatagctttcaagagtgcctaacagcacaaaggaaggagagagaaatggcaaccgcagaactgggtttcaaaaagcaattaactaaggaggagaagtttgaaaagaggaagcagagacttgctgcaatcggagaggatcttttggcgattgctgctgatcaaccatttcgcttccctgccacatttacatttgtggtcagagcattctcagttctagatggtactgggaaaggccttgatcctaggtttcatattacagagattgctaagccaaatgccaaggaattgctaagatttaatgacgctggtgttgaaatagttgtgaaggtgtgtggagagacatgtgtattcctcctatgacgaattccttaggctccatgaaggtaagcctgtcttaatgggcttgattgttgaacctgacttagtacttttatccatgtcacggcattgaactagacagtcactcatgtccttaggatattaacggtatacatcaacaattcattctattttaattgcttgcaaaacttttttggcccttcaaatgagttccacgcatcaagaagtcaagattccaggaggcctaaaataggagaggagggcgcagcttgattcaatccatgtcaagtcagaggctgctgcgaggtttgcacatgcaagtagaatttagatggtcctgcttcgctttcatgtggatttatcttgcaaatggtatgtggatccgttccagaggcaatgagccttgcagccagtttgcagtataaaaaacccaattatgtccactgttggttcgacgcagcgtgtgccgaggatttctactgccaagcataagaaagtatttgaaatcaagaacttgcattcattcaatcataatgtgtttcctatcaagcataagtgtgtgtgttttgtttgatatctgctttaataggagattgttcttgtcaccccaaaaatgttcccattctactttcgggcaggtgaattgcagataaatggtctgttcgcaactggtgctctcgggcgactccatcactgagcaacccttcgccccggtggctgcggtgtcgcactggctgacacctgctcgcagttgcattacaagttttactgactatgtattttcaggtttattcaatttcagttgtaatgcttctgacagcagttgtatcagtcctcttgttcagcttccatgtatccctcgcatccttccttggatccacataagtgttaatgataattttgttgcatctcctctgctgatcagagctttcaaactcatgacagaataatgtactaaacttcagtttggtgtctatctcagtgtacctacactcagttggaaaacttcaaccacactgcaacaaggtttataaaaggtactgttactattgttaaaattagtcattttagctatccgcttctatttcaccgtgcttgcaggtttgctatgaggaaaaacaaatttatgggctcaaacaaagtgtgatagtgaaagtcattttgcttccagcttaaggttactgtagctgtctgcatcgagactgttttgtgtcttgaactaagaaaaaact

SEQ ID NO: 32636 - DNA, 4444 bp, Zea Mays
cgaaaattttcttcgaacgagctctgagcagtgtagccctcctgtccgctgttcggtgcccgctgcccacctccctctcctccttccgacctcgccgcctccctccctaaactctaaaccctccaccagccgaagctactgccgcggccgcaacagaggtcgcgacgacgaacgctgaagaagcgccggcgagggagagtcctttactttttcctatgctgtagcaaaacaagcctatatcatcttccaaatatactcgttccgtgccggcggcctcccctcctacgcccctgccgattcttcaatcttcaccaacgtctgcgcgtagcaggctagcagtcggcacgacttcctcagatctgccggacgacttgctgttcgtcaccgactcaccagcaaccaacgtcagccatcagccggcagcaggggaagctgggcggagggtcattgcggcacggcgtccaggcgtacagcaggcaccagcaacagcccatggcaaacgccgcagatgaccctatggcagatgaagccagagtagaagatgccttcacacaggagatcaccgattattcgtacgtccctagataccatgtgttgagttggatggaaactgtggaggggatggtggccggtgtggcggcgcttccgccggtgtatttgatactgaacagagatcttcttgagacgggatggggatggaagaggctggtgccctacagacctggttatgttgagtggcatgtgttcaagaaataccttggggactatttcgaccataatcgtgaagcttttctttgtgccgagcagaagcctgatccatttggatggattattgctaaaaagagtgccctgattgctgcagccaaattgtgcctcaagatggagaaggcacttctcaggtactgtgctagctttctcactcctgacgacaaaaggttgatcctccggatcaaggaccaggcaaagcaaatgatccaatcagagggtgatcaatctttggttgtaactatatgcttggaggtgcttcaagcaatggttcaaatgggtgtccttgttcctactggagatatgactgttgtcagaagaaccgctcaatttttccttaatagctttcaagagtgcctaacagcacaaaggaaggagagagaaatggcaaccgcagaactgggtttcaaaaagcaattaactaaggaggagaagtttgaaaagaggaagcagagacttgctgcaatcggagaggatcttttggcgattgctgctgatcaaccatttcgcttccctgccacatttacatttgtggtcagagcattctcagttctagatggtactgggaaaggccttgatcctaggtttcatattacagagattgctaagccgtgagtactttttgcattactagcatctgaatacttattcaaaaacacgcaaagcttgcacatcttcacttattatgtactgtctatattttcatcttgaacttttctggtactgacttgaaatgtctgttaaatttgctagaaatgccaaggaattgctaagatttaatgacgctggtgttgaaatagttgtgaaggcaagtttcaacatttggtcaaagctgttaacctatctctatgatagcacatctcctaagggttagggcttgtttggctaggagcggattgaaggggattggaggagcctattaagcattgaacaatttacccatgcttgtttcctattctttggtcgtgataacgtttgcaaccatgaatagtacatattgcttttccaggtgtgtggagagacatgtgtattcctcctatgacgaattccttaggctccatgaaggtaagcctgtcttaatgggcttgattgttgaacctgacttagtacttttatccatgtcacggcattgaactagacagtcactcatgtccttaggatattaacggtatacatcaacaattcattctattttaattgcttgcaaaacttttttggcccttcaaatgagttccacgcatcaagaagtcaagattccaggaggcctaaaataggtaaacttgctgttatatcttttgtgctctcagtagtcgcctattacttgttttaattcgctgatccatgtgcagtgtatcaatttgtcttagtatttttattcgtggggatgcctgactcaaatgaactcatgttcaacactgagcaacctacttataattttggagcctataaaatttctaagctaaaaaaggtaataaaaaggaatgatattatagtcacatcatctgaacaacagtgaagggaagggagggatagatggtctgaatgcctataaatgtcgttcccttggtctgcttcttaaatttgaaaccaagatactatagtcaaatacttctaaacttgaagcctgtaaattggaatcaccaagttaaataagaacaggggtaactattcatagctcagatggttgtcatccaatacgtgcgctaaggcacagacaggtgaggttgcatattcaatccccaagacagtaaaccattgaggcatattaaaacacattttccatgaggtttcctaagtgatcctttaggtaaacagaaccatacctagctccatatgaaactatttcccgatttgaagtacacctaagttaaggttcatacattggagctctggcagtaaaacaatagtccttaccttgagacagcttagattagaatgaggtggatggtaatatggcatgagcaacataccacagttcatgcatggaggaaatcatttttactttctttcctagccatggtagttgtgttgctccttaccaaggcactacatggagcatcatatggttcatgatgtaaacatggttttagatctgtctatactcacactcaagaaccagccaaaatgtgatattccacaacctgagagaaatcaaaatgaaatcatgtacaacatagtacatatgatgatgtgcggtgatgcgggtgcatgtgtgttgtgtgtgtaggagaggagggcgcagcttgattcaatccatgtcaagtcagaggctgctgcgaggtttgcacatgcaagtagaatttagatgaaaagacgtgaaatggtattttccagtatggactgtataaatgtaattatattcctatgctggtacgtctgtctaaccttgctattacacttctattatggctttgtgtttacccaaagttccaaacctttcaggtcctgcttcgctttcatgtggatttatcttgcaaatggtatgtggatccgttccagaggcaatgagccttgcagccagtttgcagtataaaaaacccaattatgtccactgttggttcgacgcagcgtgtgccgaggatttctactgccaagcataagaaagtatttgaaatcaagaacttgcattcattcaatcataatgtgtttcctatcaagcataagtgtgtgtgttttgtttgatatctgctttaataggagattgttcttgtcaccccaaaaatgttcccattctactttcgggcaggtgaattgcagataaatggtctgttcgcaactggtgctctcgggcgactccatcactgagcaacccttcgccccggtggctgcggtgtcgcactggctgacacctgctcgcagttgcattacaagttttactgactatgtattttcaggtttattcaatttcagttgtaatgcttctgacagcagttgtatcagtcctcttgttcagcttccatgtatccctcgcatccttccttggatccacataagtgttaatgataattttgttgcatctcctctgctgatcagagctttcaaactcatgacagaataatgtactaaacttcagtttggtgtctatctcagtgtacctacactcagttggaaaacttcaaccacactgcaacaaggtttataaaaggtttgctatgaggaaaaacaaatttatgggctcaaacaaagtgtgatagtgaaagtcattttgcttccagcttaagaaccaagccaagaaaacagatatcaactgtgacgccacactcaaaagcttgtttggtgagagggataaggttgggatgctggagatctctaagcttttgagccgtggcttcccgaaaatctccaagcttttgtggtccatggagccagggatggctctttggtaaaagacttcgttgtggatggcctcttttatggtccatgttaagtcccaagtcccactaggtggttaagcagaaaaatcttgtgatggcattaagactttcagactttgtttttgggtctgatgcatgtaaaaaggattcccagtgtttctgttgctcttgcgatcctgtgaggacacatatgagagaaatatttagtttgttgatggcaaatcttgtcttatgttcatgcctgtacctatctgatcaagcgttatgatatgatcccatgcgtggtactgtgttctttagagatg

SEQ ID NO: 32637 - DNA, 4516 bp, Zea Mays
gttcggtgcccgctgcccacctccctctcctccttccgacctcgccgcctccctccctaaactctaaaccctccaccagccgaagctactgccgcggccgcaacagaggtcgcgacgacgaacgctgaagaagcgccggcgagggagagtcctttactttttcctatgctgtagcaaaacaagcctatatcatcttccaaatatactcgttccgtgccggcggcctcccctcctacgcccctgccgattcttcaatcttcaccaacgtctgcgcgtagcaggctagcagtcggcacgacttcctcagatctgccggacgacttgctgttcgtcaccgactcaccagcaaccaacgtcagccatcagccggcagcaggggaagctgggcggagggtcattgcggcacggcgtccaggcgtacagcaggcaccagcaacagcccatggcaaacgccgcagatgaccctatggcagatgaagccagagtagaagatgccttcacacaggagatcaccgattattcgtacgtccctagataccatgtgttgagttggatggaaactgtggaggggatggtggccggtgtggcggcgcttccgccggtgtatttgatactgaacagaggtgcgattttcttttatatttcttccagttcatgttctccttgtgtggctggtgctggattcaaccgatctagggaagagatgttagttgatttgctgtaaaaatcaatatgttaacagagatatatgatacatgctcctgcttgctcatgatgccggtttggtgccaaggctgtatgccccccttcctatctgtgttttttgttctataatttggaggtttcttagttttttactacagtatttgcctattacgtatcacgttgcatctaattagctcttcttcgttgcccatgccaagatcttcttgagacgggatggggatggaagaggctggtgccctacagacctggttatgttgagtggcatgtgttcaagaaataccttggggactatttcgaccataatcgtgaagcttttctttgtgccgagcagaagcctgatccatttggatggattattgctaaaaagagtgccctgattgctgcagccaaattggtatagttccccctacctctgcattactgaactgtggcctgccatacttgtttatattttatatattggttcagttgcaaattaacttgcaccattgcaaaaacaatcaaaatgctttccagtgcctcaagatggagaaggcacttctcaggtactgtgctagctttctcactcctgacgacaaaaggttgatcctccggatcaaggaccaggcaaagcaaatgatccaatcagagggtgatcaatctttggttgtaactatatgcttggaggtgcttcaagcaatggttcaaatgggtgtccttgttcctactggagatatgactgttgtcagaagaaccgctcaatttttccttaatagctttcaagagtgcctaacagcacaaaggaaggagagagaaatggcaaccgcagaactgggtttcaaaaagcaattaactaaggaggagaagtttgaaaagaggaagcagagacttgctgcaatcggagaggatcttttggcgattgctgctgatcaaccatttcgcttccctgccacatttacatttgtggtcagagcattctcagttctagatggtactgggaaaggccttgatcctaggtttcatattacagagattgctaagccgtgagtactttttgcattactagcatctgaatacttattcaaaaacacgcaaagcttgcacatcttcacttattatgtactgtctatattttcatcttgaacttttctggtactgacttgaaatgtctgttaaatttgctagaaatgccaaggaattgctaagatttaatgacgctggtgttgaaatagttgtgaaggcaagtttcaacatttggtcaaagctgttaacctatctctatgatagcacatctcctaagggttagggcttgtttggctaggagcggattgaaggggattggaggagcctattaagcattgaacaatttacccatgcttgtttcctattctttggtcgtgataacgtttgcaaccatgaatagtacatattgcttttccaggtgtgtggagagacatgtgtattcctcctatgacgaattccttaggctccatgaaggatattaacggtatacatcaacaattcattctattttaattgcttgcaaaacttttttggcccttcaaatgagttccacgcatcaagaagtcaagattccaggaggcctaaaataggtaaacttgctgttatatcttttgtgctctcagtagtcgcctattacttgttttaattcgctgatccatgtgcagtgtatcaatttgtcttagtatttttattcgtggggatgcctgactcaaatgaactcatgttcaacactgagcaacctacttataattttggagcctataaaatttctaagctaaaaaaggtaataaaaaggaatgatattatagtcacatcatctgaacaacagtgaagggaagggagggatagatggtctgaatgcctataaatgtcgttcccttggtctgcttcttaaatttgaaaccaagatactatagtcaaatacttctaaacttgaagcctgtaaattggaatcaccaagttaaataagaacaggggtaactattcatagctcagatggttgtcatccaatacgtgcgctaaggcacagacaggtgaggttgcatattcaatccccaagacagtaaaccattgaggcatattaaaacacattttccatgaggtttcctaagtgatcctttaggtaaacagaaccatacctagctccatatgaaactatttcccgatttgaagtacacctaagttaaggttcatacattggagctctggcagtaaaacaatagtccttaccttgagacagcttagattagaatgaggtggatggtaatatggcatgagcaacataccacagttcatgcatggaggaaatcatttttactttctttcctagccatggtagttgtgttgctccttaccaaggcactacatggagcatcatatggttcatgatgtaaacatggttttagatctgtctatactcacactcaagaaccagccaaaatgtgatattccacaacctgagagaaatcaaaatgaaatcatgtacaacatagtacatatgatgatgtgcggtgatgcgggtgcatgtgtgttgtgtgtgtaggagaggagggcgcagcttgattcaatccatgtcaagtcagaggctgctgcgaggtttgcacatgcaagtagaatttagatgacgtgaaatggtattttccagtatggactgtataaatgtaattatattcctatgctggtcctgcttcgctttcatgtggatttatcttgcaaatggtatgtggatccgttccagaggcaatgagccttgcagccagtttgcagtataaaaaacccaattatgtccactgttggttcgacgcagcgtgtgccgaggatttctactgccaagcataagaaagtatttgaaatcaagaacttgcattcattcaatcataatgtgtttcctatcaagcataagtgtgtgtgttttgtttgatatctgctttaataggagattgttcttgtcaccccaaaaatgttcccattctactttcgggcaggtgaattgcagataaatggtctgttcgcaactggtgctctcgggcgactccatcactgagcaacccttcgccccggtggctgcggtgtcgcactggctgacacctgctcgcagttgcattacaagttttactgactatgtattttcaggtttattcaatttcagttgtaatgcttctgacagcagttgtatcagtcctcttgttcagcttccattgtacctacactcagttggaaaacttcaaccacactgcaacaaggtttataaaaggtttgctatgaggaaaaacaaatttatgggctcaaacaaagtgtgatagtgaaagtcattttgcttccagcttaagaaccaagccaagaaaacagatatcaactgtgacgccacactcaaaagcttgtttggtgagagggataaggttgggatgctggagatctctaagcttttgagccgtggcttcccgaaaatctccaagcttttgtggtccatggagccagggatggctctttggtaaaagacttcgttgtggatggcctcttttatggtccatgttaagtcccaagtcccactaggtggttaagcagaaaaatcttgtgatggcattaagactttcagactttgtttttgggtctgatgcatgtaaaaaggattcccagtgtttctgttgctcttgcgatcctgtgaggacacatatgagagaaatatttagtttgttgatggcaaatcttgtcttatgttcatgcctgtacctatctgatcaagcgttatgatatgatcccatgcgtggtactgtgttctttagagatg

SEQ ID NO: 32638 - DNA, 2729 bp, Zea Mays
gttcggtgcccgctgcccacctccctctcctccttccgacctcgccgcctccctccctaaactctaaaccctccaccagccgaagctactgccgcggccgcaacagaggtcgcgacgacgaacgctgaagaagcgccggcgagggagagtcctttactttttcctatgctgtagcaaaacaagcctatatcatcttccaaatatactcgttccgtgccggcggcctcccctcctacgcccctgccgattcttcaatcttcaccaacgtctgcgcgtagcaggctagcagtcggcacgacttcctcagatctgccggacgacttgctgttcgtcaccgactcaccagcaaccaacgtcagccatcagccggcagcaggggaagctgggcggagggtcattgcggcacggcgtccaggcgtacagcaggcaccagcaacagcccatggcaaacgccgcagatgaccctatggcagatgaagccagagtagaagatgccttcacacaggagatcaccgattattcgtacgtccctagataccatgtgttgagttggatggaaactgtggaggggatggtggccggtgtggcggcgcttccgccggtgtatttgatactgaacagagatcttcttgagacgggatggggatggaagaggctggtgccctacagacctggttatgttgagtggcatgtgttcaagaaataccttggggactatttcgaccataatcgtgaagcttttctttgtgccgagcagaagcctgatccatttggatggattattgctaaaaagagtgccctgattgctgcagccaaattgtgcctcaagatggagaaggcacttctcaggtactgtgctagctttctcactcctgacgacaaaaggttgatcctccggatcaaggaccaggcaaagcaaatgatccaatcagagggtgatcaatctttggttgtaactatatgcttggaggtgcttcaagcaatggttcaaatgggtgtccttgttcctactggagatatgactgttgtcagaagaaccgctcaatttttccttaatagctttcaagagtgcctaacagcacaaaggaaggagagagaaatggcaaccgcagaactgggtttcaaaaagcaattaactaaggaggagaagtttgaaaagaggaagcagagacttgctgcaatcggagaggatcttttggcgattgctgctgatcaaccatttcgcttccctgccacatttacatttgtggtcagagcattctcagttctagatggtactgggaaaggccttgatcctaggtttcatattacagagattgctaagccaaatgccaaggaattgctaagatttaatgacgctggtgttgaaatagttgtgaaggtgtgtggagagacatgtgtattcctcctatgacgaattccttaggctccatgaaggtaagcctgtcttaatgggcttgattgttgaacctgacttagtacttttatccatgtcacggcattgaactagacagtcactcatgtccttaggatattaacggtatacatcaacaattcattctattttaattgcttgcaaaacttttttggcccttcaaatgagttccacgcatcaagaagtcaagattccaggaggcctaaaataggagaggagggcgcagcttgattcaatccatgtcaagtcagaggctgctgcgaggtttgcacatgcaagtagaatttagatggtcctgcttcgctttcatgtggatttatcttgcaaatggtatgtggatccgttccagaggcaatgagccttgcagccagtttgcagtataaaaaacccaattatgtccactgttggttcgacgcagcgtgtgccgaggatttctactgccaagcataagaaagtgaattgcagataaatggtctgttcgcaactggtgctctcgggcgactccatcactgagcaacccttcgccccggtggctgcggtgtcgcactggctgacacctgctcgcagttgcattacaagttttactgactatgtattttcaggtttattcaatttcagttgtaatgcttctgacagcagttgtatcagtcctcttgttcagcttccataataatgtactaaacttcagtttggtgtctatctcagtgtacctacactcagttggaaaacttcaaccacactgcaacaaggtttataaaaggtttgctatgaggaaaaacaaatttatgggctcaaacaaagtgtgatagtgaaagtcattttgcttccagcttaagaaccaagccaagaaaacagatatcaactgtgacgccacactcaaaagcttgtttggtgagagggataaggttgggatgctggagatctctaagcttttgagccgtggcttcccgaaaatctccaagcttttgtggtccatggagccagggatggctctttggtaaaagacttcgttgtggatggcctcttttatggtccatgttaagtcccaagtcccactaggtggttaagcagaaaaatcttgtgatggcattaagactttcagactttgtttttgggtctgatgcatgtaaaaaggattcccagtgtttctgttgctcttgcgatcctgtgaggacacatatgagagaaatatttagtttgttgatggcaaatcttgtcttatgttcatgcctgtacctatctgatcaagcgttatgatatgatcccatgcgtggtactgtgttctttagagatg

SEQ ID NO: 32639 - DNA, 3051 bp, Zea Mays
cccacctccctctcctccttccgacctcgccgcctccctccctaaactctaaaccctccaccagccgaagctactgccgcggccgcaacagaggtcgcgacgacgaacgctgaagaagcgccggcgagggagagtcctttactttttcctatgctgtagcaaaacaagcctatatcatcttccaaatatactcgttccgtgccggcggcctcccctcctacgcccctgccgattcttcaatcttcaccaacgtctgcgcgtagcaggctagcagtcggcacgacttcctcagatctgccggacgacttgctgttcgtcaccgactcaccagcaaccaacgtcagccatcagccggcagcaggggaagctgggcggagggtcattgcggcacggcgtccaggcgtacagcaggcaccagcaacagcccatggcaaacgccgcagatgaccctatggcagatgaagccagagtagaagatgccttcacacaggagatcaccgattattcgtacgtccctagataccatgtgttgagttggatggaaactgtggaggggatggtggccggtgtggcggcgcttccgccggtgtatttgatactgaacagagatcttcttgagacgggatggggatggaagaggctggtgccctacagacctggttatgttgagtggcatgtgttcaagaaataccttggggactatttcgaccataatcgtgaagcttttctttgtgccgagcagaagcctgatccatttggatggattattgctaaaaagagtgccctgattgctgcagccaaattgtgcctcaagatggagaaggcacttctcaggtactgtgctagctttctcactcctgacgacaaaaggttgatcctccggatcaaggaccaggcaaagcaaatgatccaatcagagggtgatcaatctttggttgtaactatatgcttggaggtgcttcaagcaatggttcaaatgggtgtccttgttcctactggagatatgactgttgtcagaagaaccgctcaatttttccttaatagctttcaagagtgcctaacagcacaaaggaaggagagagaaatggcaaccgcagaactgggtttcaaaaagcaattaactaaggaggagaagtttgaaaagaggaagcagagacttgctgcaatcggagaggatcttttggcgattgctgctgatcaaccatttcgcttccctgccacatttacatttgtggtcagagcattctcagatggtactgggaaaggccttgatcctaggtttcatattacagagattgctaagccaaatgccaaggaattgctaagatttaatgacgctggtgttgaaatagttgtgaaggcaagtttcaacatttggtcaaagctgttaacctatctctatgatagcacatctcctaagggttagggcttgtttggctaggagcggattgaaggggattggaggagcctattaagcattgaacaatttacccatgcttgtttcctattctttggtcgtgataacgtttgcaaccatgaatagtacatattgcttttccaggtgtgtggagagacatgtgtattcctcctatgacgaattccttaggctccatgaaggtaagcctgtcttaatgggcttgattgttgaacctgacttagtacttttatccatgtcacggcattgaactagacagtcactcatgtccttaggatattaacggtatacatcaacaattcattctattttaattgcttgcaaaacttttttggcccttcaaatgagttccacgcatcaagaagtcaagattccaggaggcctaaaataggagaggagggcgcagcttgattcaatccatgtcaagtcagaggctgctgcgaggtttgcacatgcaagtagaatttagatggtcctgcttcgctttcatgtggatttatcttgcaaatggtatgtggatccgttccagaggcaatgagccttgcagccagtttgcagtataaaaaacccaattatgtccactgttggttcgacgcagcgtgtgccgaggatttctactgccaagcataagaaagtatttgaaatcaagaacttgcattcattcaatcataatgtgtttcctatcaagcataagtgtgtgtgttttgtttgatatctgctttaataggagattgttcttgtcaccccaaaaatgttcccattctactttcgggcaggtgaattgcagataaatggtctgttcgcaactggtgctctcgggcgactccatcactgagcaacccttcgccccggtggctgcggtgtcgcactggctgacacctgctcgcagttgcattacaagttttactgactatgtattttcaggtttattcaatttcagttgtaatgcttctgacagcagttgtatcagtcctcttgttcagcttccataataatgtactaaacttcagtttggtgtctatctcagtgtacctacactcagttggaaaacttcaaccacactgcaacaaggtttataaaaggtttgctatgaggaaaaacaaatttatgggctcaaacaaagtgtgatagtgaaagtcattttgcttccagcttaagaaccaagccaagaaaacagatatcaactgtgacgccacactcaaaagcttgtttggtgagagggataaggttgggatgctggagatctctaagcttttgagccgtggcttcccgaaaatctccaagcttttgtggtccatggagccagggatggctctttggtaaaagacttcgttgtggatggcctcttttatggtccatgttaagtcccaagtcccactaggtggttaagcagaaaaatcttgtgatggcattaagactttcagactttgtttttgggtctgatgcatgtaaaaaggattcccagtgtttctgttgctcttgcgatcctgtgaggacacatatgagagaaatatttagtttgttgatggcaaatcttgtcttatgttcatgcctgtacctatctgatcaagcgttatgatatgatcccatgcgtggtactgtgttctttagagatg

SEQ ID NO: 32640 - DNA, 4016 bp, Zea Mays
cccacctccctctcctccttccgacctcgccgcctccctccctaaactctaaaccctccaccagccgaagctactgccgcggccgcaacagaggtcgcgacgacgaacgctgaagaagcgccggcgagggagagtcctttactttttcctatgctgtagcaaaacaagcctatatcatcttccaaatatactcgttccgtgccggcggcctcccctcctacgcccctgccgattcttcaatcttcaccaacgtctgcgcgtagcaggctagcagtcggcacgacttcctcagatctgccggacgacttgctgttcgtcaccgactcaccagcaaccaacgtcagccatcagccggcagcaggggaagctgggcggagggtcattgcggcacggcgtccaggcgtacagcaggcaccagcaacagcccatggcaaacgatgaccctatggcagatgaagccagagtagaagatgccttcacacaggagatcaccgattattcgtacgtccctagataccatgtgttgagttggatggaaactgtggaggggatggtggccggtgtggcggcgcttccgccggtgtatttgatactgaacagaggtgcgattttcttttatatttcttccagttcatgttctccttgtgtggctggtgctggattcaaccgatctagggaagagatgttagttgatttgctgtaaaaatcaatatgttaacagagatatatgatacatgctcctgcttgctcatgatgccggtttggtgccaaggctatcttcttgagacgggatggggatggaagaggctggtgccctacagacctggttatgttgagtggcatgtgttcaagaaataccttggggactatttcgaccataatcgtgaagcttttctttgtgccgagcagaagcctgatccatttggatggattattgctaaaaagagtgccctgattgctgcagccaaattggtgcttcaagcaatggttcaaatgggtgtccttgttcctactggagatatgactgttgtcagaagaaccgctcaatttttccttaatagctttcaagagtgcctaacagcacaaaggaaggagagagaaatggcaaccgcagaactgggtttcaaaaagcaattaactaaggaggagaagtttgaaaagaggaagcagagacttgctgcaatcggagaggatcttttggcgattgctgctgatcaaccatttcgcttccctgccacatttacatttgtggtcagagcattctcagttctagatggtactgggaaaggccttgatcctaggtttcatattacagagattgctaagccgtgagtactttttgcattactagcatctgaatacttattcaaaaacacgcaaagcttgcacatcttcacttattatgtactgtctatattttcatcttgaacttttctggtactgacttgaaatgtctgttaaatttgctagaaatgccaaggaattgctaagatttaatgacgctggtgttgaaatagttgtgaaggcaagtttcaacatttggtcaaagctgttaacctatctctatgatagcacatctcctaagggttagggcttgtttggctaggagcggattgaaggggattggaggagcctattaagcattgaacaatttacccatgcttgtttcctattctttggtcgtgataacgtttgcaaccatgaatagtacatattgcttttccaggtgtgtggagagacatgtgtattcctcctatgacgaattccttaggctccatgaaggtaagcctgtcttaatgggcttgattgttgaacctgacttagtacttttatccatgtcacggcattgaactagacagtcactcatgtccttaggatattaacggtatacatcaacaattcattctattttaattgcttgcaaaacttttttggcccttcaaatgagttccacgcatcaagaagtcaagattccaggaggcctaaaataggtaaacttgctgttatatcttttgtgctctcagtagtcgcctattacttgttttaattcgctgatccatgtgcagtgtatcaatttgtcttagtatttttattcgtggggatgcctgactcaaatgaactcatgttcaacactgagcaacctacttataattttggagcctataaaatttctaagctaaaaaaggtaataaaaaggaatgatattatagtcacatcatctgaacaacagtgaagggaagggagggatagatggtctgaatgcctataaatgtcgttcccttggtctgcttcttaaatttgaaaccaagatactatagtcaaatacttctaaacttgaagcctgtaaattggaatcaccaagttaaataagaacaggggtaactattcatagctcagatggttgtcatccaatacgtgcgctaaggcacagacaggtgaggttgcatattcaatccccaagacagtaaaccattgaggcatattaaaacacattttccatgaggtttcctaagtgatcctttaggtaaacagaaccatacctagctccatatgaaactatttcccgatttgaagtacacctaagttaaggttcatacattggagctctggcagtaaaacaatagtccttaccttgagacagcttagattagaatgaggtggatggtaatatggcatgagcaacataccacagttcatgcatggaggaaatcatttttactttctttcctagccatggtagttgtgttgctccttaccaaggcactacatggagcatcatatggttcatgatgtaaacatggttttagatctgtctatactcacactcaagaaccagccaaaatgtgatattccacaacctgagagaaatcaaaatgaaatcatgtacaacatagtacatatgatgatgtgcggtgatgcgggtgcatgtgtgttgtgtgtgtaggagaggagggcgcagcttgattcaatccatgtcaagtcagaggctgctgcgaggtttgcacatgcaagtagaatttagatggtcctgcttcgctttcatgtggatttatcttgcaaatggtatgtggatccgttccagaggcaatgagccttgcagccagtttgcagtataaaaaacccaattatgtccactgttggttcgacgcagcgtgtgccgaggatttctactgccaagcataagaaagtgaattgcagataaatggtctgttcgcaactggtgctctcgggcgactccatcactgagcaacccttcgccccggtggctgcggtgtcgcactggctgacacctgctcgcagttgcattacaagttttactgactatgtattttcaggtttattcaatttcagttgtaatgcttctgacagcagttgtatcagtcctcttgttcagcttccataataatgtactaaacttcagtttggtgtctatctcagtgtacctacactcagttggaaaacttcaaccacactgcaacaaggtttgctatgaggaaaaacaaatttatgggctcaaacaaagtgtgatagtgaaagtcattttgcttccagcttaagaaccaagccaagaaaacagatatcaactgtgacgccacactcaaaagcttgtttggtgagagggataaggttgggatgctggagatctctaagcttttgagccgtggcttcccgaaaatctccaagcttttgtggtccatggagccagggatggctctttggtaaaagacttcgttgtggatggcctcttttatggtccatgttaagtcccaagtcccactaggtggttaagcagaaaaatcttgtgatggcattaagactttcagactttgtttttgggtctgatgcatgtaaaaaggattcccagtgtttctgttgctcttgcgatcctgtgaggacacatatgagagaaatatttagtttgttgatggcaaatcttgtcttatgttcatgcctgtacctatctgatcaagcgttatgatatgatcccatgcgtggtactgtgttctttagagatg

SEQ ID NO: 32641 - DNA, 3346 bp, Zea Mays
cccacctccctctcctccttccgacctcgccgcctccctccctaaactctaaaccctccaccagccgaagctactgccgcggccgcaacagaggtcgcgacgacgaacgctgaagaagcgccggcgagggagagtcctttactttttcctatgctgtagcaaaacaagcctatatcatcttccaaatatactcgttccgtgccggcggcctcccctcctacgcccctgccgattcttcaatcttcaccaacgtctgcgcgtagcaggctagcagtcggcacgacttcctcagatctgccggacgacttgctgttcgtcaccgactcaccagcaaccaacgtcagccatcagccggcagcaggggaagctgggcggagggtcattgcggcacggcgtccaggcgtacagcaggcaccagcaacagcccatggcaaacgccgcagatgaccctatggcagatgaagccagagtagaagatgccttcacacaggagatcaccgattattcgtacgtccctagataccatgtgttgagttggatggaaactgtggaggggatggtggccggtgtggcggcgcttccgccggtgtatttgatactgaacagagatcttcttgagacgggatggggatggaagaggctggtgccctacagacctggttatgttgagtggcatgtgttcaagaaataccttggggactatttcgaccataatcgtgaagcttttctttgtgccgagcagaagcctgatccatttggatggattattgctaaaaagagtgccctgattgctgcagccaaattgtgcctcaagatggagaaggcacttctcaggtactgtgctagctttctcactcctgacgacaaaaggttgatcctccggatcaaggaccaggcaaagcaaatgatccaatcagagggtgatcaatctttggttgtaactatatgcttggaggttgtcggtgccgagcgcgcggtcgtcgtgcagctcgtgggaccagtccgccgagcggctgctagaggcggacgcagccctcgtgcggaagaagtgcgccgagaagagcgcgccgaggccgaggacgccgccgggcagcaggtcctccagcgcggcgaggtcttggtcttggtcttggagcagggtcttggtcttggagcactgcacgaggagcacatcggcatggtgcttcaagcaatggttcaaatgggtgtccttgttcctactggagatatgactgttgtcagaagaaccgctcaatttttccttaatagctttcaagagtgcctaacagcacaaaggaaggagagagaaatggcaaccgcagaactgggtttcaaaaagcaattaactaaggaggagaagtttgaaaagaggaagcagagacttgctgcaatcggagaggatcttttggcgattgctgctgatcaaccatttcgcttccctgccacatttacatttgtggtcagagcattctcagttctagatggtactgggaaaggccttgatcctaggtttcatattacagagattgctaagccaaatgccaaggaattgctaagatttaatgacgctggtgttgaaatagttgtgaaggcaagtttcaacatttggtcaaagctgttaacctatctctatgatagcacatctcctaagggttagggcttgtttggctaggagcggattgaaggggattggaggagcctattaagcattgaacaatttacccatgcttgtttcctattctttggtcgtgataacgtttgcaaccatgaatagtacatattgcttttccaggtgtgtggagagacatgtgtattcctcctatgacgaattccttaggctccatgaaggtaagcctgtcttaatgggcttgattgttgaacctgacttagtacttttatccatgtcacggcattgaactagacagtcactcatgtccttaggatattaacggtatacatcaacaattcattctattttaattgcttgcaaaacttttttggcccttcaaatgagttccacgcatcaagaagtcaagattccaggaggcctaaaataggagaggagggcgcagcttgattcaatccatgtcaagtcagaggctgctgcgaggtttgcacatgcaagtagaatttagatggtcctgcttcgctttcatgtggatttatcttgcaaatggtatgtggatccgttccagaggcaatgagccttgcagccagtttgcagtataaaaaacccaattatgtccactgttggttcgacgcagcgtgtgccgaggatttctactgccaagcataagaaagagattgttcttgtcaccccaaaaatgttcccattctactttcgggcaggtgaattgcagataaatggtctgttcgcaactggtgctctcgggcgactccatcactgagcaacccttcgccccggtggctgcggtgtcgcactggctgacacctgctcgcagttgcattacaagttttactgactatgtattttcaggtttattcaatttcagttgtaatgcttctgacagcagttgtatcagtcctcttgttcagcttccatgtatccctcgcatccttccttggatccacataagtgttaatgataattttgttgcatctcctctgctgatcagagctttcaaactcatgacagaataatgtactaaacttcagtttggtgtctatctcagtgtacctacactcagttggaaaacttcaaccacactgcaacaaggtttataaaaggtactgttactattgttaaaattagtcattttagctatccgcttctatttcaccgtgcttgcaggtttgctatgaggaaaaacaaatttatgggctcaaacaaagtgtgatagtgaaagtcattttgcttccagcttaagaaccaagccaagaaaacagatatcaactgtgacgccacactcaaaagcttgtttggtgagagggataaggttgggatgctggagatctctaagcttttgagccgtggcttcccgaaaatctccaagcttttgtggtccatggagccagggatggctctttggtaaaagacttcgttgtggatggcctcttttatggtccatgttaagtcccaagtcccactaggtggttaagcagaaaaatcttgtgatggcattaagactttcagactttgtttttgggtctgatgcatgtaaaaaggattcccagtgtttctgttgctcttgcgatcctgtgaggacacatatgagagaaatatttagtttgttgatggcaaatcttgtcttatgttcatgcctgtacctatctgatcaagcgttatgatatgatcccatgcgtggtactgtgttctttagagatg

SEQ ID NO: 32642 - DNA, 3780 bp, Zea Mays
cccacctccctctcctccttccgacctcgccgcctccctccctaaactctaaaccctccaccagccgaagctactgccgcggccgcaacagaggtcgcgacgacgaacgctgaagaagcgccggcgagggagagtcctttactttttcctatgctgtagcaaaacaagcctatatcatcttccaaatatactcgttccgtgccggcggcctcccctcctacgcccctgccgattcttcaatcttcaccaacgtctgcgcgtagcaggctagcagtcggcacgacttcctcagatctgccggacgacttgctgttcgtcaccgactcaccagcaaccaacgtcagccatcagccggcagcaggggaagctgggcggagggtcattgcggcacggcgtccaggcgtacagcaggcaccagcaacagcccatggcaaacgccgcagatgaccctatggcagatgaagccagagtagaagatgccttcacacaggagatcaccgattattcgtacgtccctagataccatgtgttgagttggatggaaactgtggaggggatggtggccggtgtggcggcgcttccgccggtgtatttgatactgaacagaggtgcgattttcttttatatttcttccagttcatgttctccttgtgtggctggtgctggattcaaccgatctagggaagagatgttagttgatttgctgtaaaaatcaatatgttaacagagatatatgatacatgctcctgcttgctcatgatgccggtttggtgccaaggctatcttcttgagacgggatggggatggaagaggctggtgccctacagacctggttatgttgagtggcatgtgttcaagaaataccttggggactatttcgaccataatcgtgaagcttttctttgtgccgagcagaagcctgatccatttggatggattattgctaaaaagagtgccctgattgctgcagccaaattgtgcctcaagatggagaaggcacttctcaggtactgtgctagctttctcactcctgacgacaaaaggttgatcctccggatcaaggaccaggcaaagcaaatgatccaatcagagggtgatcaatctttggttgtaactatatgcttggaggtgcttcaagcaatggttcaaatgggtgtccttgttcctactggagatatgactgttgtcagaagaaccgctcaatttttccttaatagctttcaagagtgcctaacagcacaaaggaaggagagagaaatggcaaccgcagaactgggtttcaaaaagcaattaactaaggaggagaagtttgaaaagaggaagcagagacttgctgcaatcggagaggatcttttggcgattgctgctgatcaaccatttcgcttccctgccacatttacatttgtggtcagagcattctcagttctagatggtactgggaaaggccttgatcctaggtttcatattacagagattgctaagccgtgtgtggagagacatgtgtattcctcctatgacgaattccttaggctccatgaaggtaagcctgtcttaatgggcttgattgttgaacctgacttagtacttttatccatgtcacggcattgaactagacagtcactcatgtccttaggatattaacggtatacatcaacaattcattctattttaattgcttgcaaaacttttttggcccttcaaatgagttccacgcatcaagaagtcaagattccaggaggcctaaaataggtaaacttgctgttatatcttttgtgctctcagtagtcgcctattacttgttttaattcgctgatccatgtgcagtgtatcaatttgtcttagtatttttattcgtggggatgcctgactcaaatgaactcatgttcaacactgagcaacctacttataattttggagcctataaaatttctaagctaaaaaaggtaataaaaaggaatgatattatagtcacatcatctgaacaacagtgaagggaagggagggatagatggtctgaatgcctataaatgtcgttcccttggtctgcttcttaaatttgaaaccaagatactatagtcaaatacttctaaacttgaagcctgtaaattggaatcaccaagttaaataagaacaggggtaactattcatagctcagatggttgtcatccaatacgtgcgctaaggcacagacaggtgaggttgcatattcaatccccaagacagtaaaccattgaggcatattaaaacacattttccatgaggtttcctaagtgatcctttaggtaaacagaaccatacctagctccatatgaaactatttcccgatttgaagtacacctaagttaaggttcatacattggagctctggcagtaaaacaatagtccttaccttgagacagcttagattagaatgaggtggatggtaatatggcatgagcaacataccacagttcatgcatggaggaaatcatttttactttctttcctagccatggtagttgtgttgctccttaccaaggcactacatggagcatcatatggttcatgatgtaaacatggttttagatctgtctatactcacactcaagaaccagccaaaatgtgatattccacaacctgagagaaatcaaaatgaaatcatgtacaacatagtacatatgatgatgtgcggtgatgcgggtgcatgtgtgttgtgtgtgtaggagaggagggcgcagcttgattcaatccatgtcaagtcagaggctgctgcgaggtttgcacatgcaagtagaatttagatggtcctgcttcgctttcatgtggatttatcttgcaaatggtatgtggatccgttccagaggcaatgagccttgcagccagtttgcagtataaaaaacccaattatgtccactgttggttcgacgcagcgtgtgccgaggatttctactgccaagcataagaaagtatttgaaatcaagaacttgcattcattcaatcataatgtgtttcctatcaagcataagtgtgaattgcagataaatggtctgttcgcaactggtgctctcgggcgactccatcactgagcaacccttcgccccggtggctgcggtgtcgcactggctgacacctgctcgcagttgcattacaagttttactgactatgtattttcagaataatgtactaaacttcagtttggtgtctatctcagtgtacctacactcagttggaaaacttcaaccacactgcaacaaggtttataaaaggtttgctatgaggaaaaacaaatttatgggctcaaacaaagtgtgatagtgaaagtcattttgcttccagcttaagaaccaagccaagaaaacagatatcaactgtgacgccacactcaaaagcttgtttggtgagagggataaggttgggatgctggagatctctaagcttttgagccgtggcttcccgaaaatctccaagcttttgtggtccatggagccagggatggctctttggtaaaagacttcgttgtggatggcctcttttatggtccatgttaagtcccaagtcccactaggtggttaagcagaaaaatcttgtgatggcattaagactttcagactttgtttttgggtctgatgcatgtaaaaaggattcccagtgtttctgttgctcttgcgatcctgtgaggacacatatgagagaaatatttagtttgttgatggcaaatcttgtcttatgttcatgcctgtacctatctgatcaagcgttatgatatgatcccatgcgtggtactgtgttctttagagatg

SEQ ID NO: 32643 - DNA, 4269 bp, Zea Mays
cccacctccctctcctccttccgacctcgccgcctccctccctaaactctaaaccctccaccagccgaagctactgccgcggccgcaacagaggtcgcgacgacgaacgctgaagaagcgccggcgagggagagtcctttactttttcctatgctgtagcaaaacaagcctatatcatcttccaaatatactcgttccgtgccggcggcctcccctcctacgcccctgccgattcttcaatcttcaccaacgtctgcgcgtagcaggctagcagtcggcacgacttcctcagatctgccggacgacttgctgttcgtcaccgactcaccagcaaccaacgtcagccatcagccggcagcaggggaagctgggcggagggtcattgcggcacggcgtccaggcgtacagcaggcaccagcaacagcccatggcaaacgccgcagatgaccctatggcagatgaagccagagtagaagatgccttcacacaggagatcaccgattattcgtacgtccctagataccatgtgttgagttggatggaaactgtggaggggatggtggccggtgtggcggcgcttccgccggtgtatttgatactgaacagaggtgcgattttcttttatatttcttccagttcatgttctccttgtgtggctggtgctggattcaaccgatctagggaagagatgttagttgatttgctgtaaaaatcaatatgttaacagagatatatgatacatgctcctgcttgctcatgatgccggtttggtgccaaggctatcttcttgagacgggatggggatggaagaggctggtgccctacagacctggttatgttgagtggcatgtgttcaagaaataccttggggactatttcgaccataatcgtgaagcttttctttgtgccgagcagaagcctgatccatttggatggattattgctaaaaagagtgccctgattgctgcagccaaattgtgcctcaagatggagaaggcacttctcaggtactgtgctagctttctcactcctgacgacaaaaggttgatcctccggatcaaggaccaggcaaagcaaatgatccaatcagagggtgatcaatctttggttgtaactatatgcttggagcaatggttcaaatgggtgtccttgttcctactggagatatgactgttgtcagaagaaccgctcaatttttccttaatagcacaaaggaaggagagagaaatggcaaccgcagaactgggtttcaaaaagcaattaactaaggaggagaagtttgaaaagaggaagcagagacttgctgcaatcggagaggatcttttggcgattgctgctgatcaaccatttcgcttccctgccacatttacatttgtggtcagagcattctcagttctagatggtactgggaaaggccttgatcctaggtttcatattacagagattgctaagccgtgagtactttttgcattactagcatctgaatacttattcaaaaacacgcaaagcttgcacatcttcacttattatgtactgtctatattttcatcttgaacttttctggtactgacttgaaatgtctgttaaatttgctagaaatgccaaggaattgctaagatttaatgacgctggtgttgaaatagttgtgaaggcaagtttcaacatttggtcaaagctgttaacctatctctatgatagcacatctcctaagggttagggcttgtttggctaggagcggattgaaggggattggaggagcctattaagcattgaacaatttacccatgcttgtttcctattctttggtcgtgataacgtttgcaaccatgaatagtacatattgcttttccaggtgtgtggagagacatgtgtattcctcctatgacgaattccttaggctccatgaaggtaagcctgtcttaatgggcttgattgttgaacctgacttagtacttttatccatgtcacggcattgaactagacagtcactcatgtccttaggatattaacggtatacatcaacaattcattctattttaattgcttgcaaaacttttttggcccttcaaatgagttccacgcatcaagaagtcaagattccaggaggcctaaaataggtaaacttgctgttatatcttttgtgctctcagtagtcgcctattacttgttttaattcgctgatccatgtgcagtgtatcaatttgtcttagtatttttattcgtggggatgcctgactcaaatgaactcatgttcaacactgagcaacctacttataattttggagcctataaaatttctaagctaaaaaaggtaataaaaaggaatgatattatagtcacatcatctgaacaacagtgaagggaagggagggatagatggtctgaatgcctataaatgtcgttcccttggtctgcttcttaaatttgaaaccaagatactatagtcaaatacttctaaacttgaagcctgtaaattggaatcaccaagttaaataagaacaggggtaactattcatagctcagatggttgtcatccaatacgtgcgctaaggcacagacaggtgaggttgcatattcaatccccaagacagtaaaccattgaggcatattaaaacacattttccatgaggtttcctaagtgatcctttaggtaaacagaaccatacctagctccatatgaaactatttcccgatttgaagtacacctaagttaaggttcatacattggagctctggcagtaaaacaatagtccttaccttgagacagcttagattagaatgaggtggatggtaatatggcatgagcaacataccacagttcatgcatggaggaaatcatttttactttctttcctagccatggtagttgtgttgctccttaccaaggcactacatggagcatcatatggttcatgatgtaaacatggttttagatctgtctatactcacactcaagaaccagccaaaatgtgatattccacaacctgagagaaatcaaaatgaaatcatgtacaacatagtacatatgatgatgtgcggtgatgcgggtgcatgtgtgttgtgtgtgtaggagaggagggcgcagcttgattcaatccatgtcaagtcagaggctgctgcgaggtttgcacatgcaagtagaatttagatgacgtgaaatggtattttccagtatggactgtataaatgtaattatattcctatgctggtcctgcttcgctttcatgtggatttatcttgcaaatggtatgtggatccgttccagaggcaatgagccttgcagccagtttgcagtataaaaaacccaattatgtccactgttggttcgacgcagcgtgtgccgaggatttctactgccaagcataagaaagtatttgaaatcaagaacttgcattcattcaatcataatgtgtttcctatcaagcataagtgtgaattgcagataaatggtctgttcgcaactggtgctctcgggcgactccatcactgagcaacccttcgccccggtggctgcggtgtcgcactggctgacacctgctcgcagttgcattacaagttttactgactatgtattttcaggtttattcaatttcagttgtaatgcttctgacagcagttgtatcagtcctcttgttcagcttccatgtatccctcgcatccttccttggatccacataagttgtacctacactcagttggaaaacttcaaccacactgcaacaaggtttataaaaggtttgctatgaggaaaaacaaatttatgggctcaaacaaagtgtgatagtgaaagtcattttgcttccagcttaagaaccaagccaagaaaacagatatcaactgtgacgccacactcaaaagcttgtttggtgagagggataaggttgggatgctggagatctctaagcttttgagccgtggcttcccgaaaatctccaagcttttgtggtccatggagccagggatggctctttggtaaaagacttcgttgtggatggcctcttttatggtccatgttaagtcccaagtcccactaggtggttaagcagaaaaatcttgtgatggcattaagactttcagactttgtttttgggtctgatgcatgtaaaaaggattcccagtgtttctgttgctcttgcgatcctgtgaggacacatatgagagaaatatttagtttgttgatggcaaatcttgtcttatgttcatgcctgtacctatctgatcaagcgttatgatatgatcccatgcgtggtactgtgttctttagagatg

SEQ ID NO: 32644 - DNA, 3747 bp, Zea Mays
cccacctccctctcctccttccgacctcgccgcctccctccctaaactctaaaccctccaccagccgaagctactgccgcggccgcaacagaggtcgcgacgacgaacgctgaagaagcgccggcgagggagagtcctttactttttcctatgctgtagcaaaacaagcctatatcatcttccaaatatactcgttccgtgccggcggcctcccctcctacgcccctgccgattcttcaatcttcaccaacgtctgcgcgtagcaggctagcagtcggcacgacttcctcagatctgccggacgacttgctgttcgtcaccgactcaccagcaaccaacgtcagccatcagccggcagcaggggaagctgggcggagggtcattgcggcacggcgtccaggcgtacagcaggcaccagcaacagcccatggcaaacgccgcagatgaccctatggcagatgaagccagagtagaagatgccttcacacaggagatcaccgattattcgtacgtccctagataccatgtgttgagttggatggaaactgtggaggggatggtggccggtgtggcggcgcttccgccggtgtatttgatactgaacagaggtgcgattttcttttatatttcttccagttcatgttctccttgtgtggctggtgctggattcaaccgatctagggaagagatgttagttgatttgctgtaaaaatcaatatgttaacagagatatatgatacatgctcctgcttgctcatgatgccggtttggtgccaaggctatcttcttgagacgggatggggatggaagaggctggtgccctacagacctggttatgttgagtggcatgtgttcaagaaataccttggggactatttcgaccataatcgtgaagcttttctttgtgccgagcagaagcctgatccatttggatggattattgctaaaaagagtgccctgattgctgcagccaaattggtgcttcaagcaatggttcaaatgggtgtccttgttcctactggagatatgactgttgtcagaagaaccgctcaatttttccttaatagctttcaagagtgcctaacagcacaaaggaaggagagagaaatggcaaccgcagaactgggtttcaaaaagcaattaactaaggaggagaagtttgaaaagaggaagcagagacttgctgcaatcggagaggatcttttggcgattgctgctgatcaaccatttcgcttccctgccacatttacatttgtggtcagagcattctcagttctagatggtactgggaaaggccttgatcctaggtttcatattacagagattgctaagccaaatgccaaggaattgctaagatttaatgacgctggtgttgaaatagttgtgaaggtgtgtggagagacatgtgtattcctcctatgacgaattccttaggctccatgaaggtaagcctgtcttaatgggcttgattgttgaacctgacttagtacttttatccatgtcacggcattgaactagacagtcactcatgtccttaggatattaacggtatacatcaacaattcattctattttaattgcttgcaaaacttttttggcccttcaaatgagttccacgcatcaagaagtcaagattccaggaggcctaaaataggtaaacttgctgttatatcttttgtgctctcagtagtcgcctattacttgttttaattcgctgatccatgtgcagtgtatcaatttgtcttagtatttttattcgtggggatgcctgactcaaatgaactcatgttcaacactgagcaacctacttataattttggagcctataaaatttctaagctaaaaaaggtaataaaaaggaatgatattatagtcacatcatctgaacaacagtgaagggaagggagggatagatggtctgaatgcctataaatgtcgttcccttggtctgcttcttaaatttgaaaccaagatactatagtcaaatacttctaaacttgaagcctgtaaattggaatcaccaagttaaataagaacaggggtaactattcatagctcagatggttgtcatccaatacgtgcgctaaggcacagacaggtgaggttgcatattcaatccccaagacagtaaaccattgaggcatattaaaacacattttccatgaggtttcctaagtgatcctttaggtaaacagaaccatacctagctccatatgaaactatttcccgatttgaagtacacctaagttaaggttcatacattggagctctggcagtaaaacaatagtccttaccttgagacagcttagattagaatgaggtggatggtaatatggcatgagcaacataccacagttcatgcatggaggaaatcatttttactttctttcctagccatggtagttgtgttgctccttaccaaggcactacatggagcatcatatggttcatgatgtaaacatggttttagatctgtctatactcacactcaagaaccagccaaaatgtgatattccacaacctgagagaaatcaaaatgaaatcatgtacaacatagtacatatgatgatgtgcggtgatgcgggtgcatgtgtgttgtgtgtgtaggagaggagggcgcagcttgattcaatccatgtcaagtcagaggctgctgcgaggtttgcacatgcaagtagaatttagatgacgtgaaatggtattttccagtatggactgtataaatgtaattatattcctatgctggtcctgcttcgctttcatgtggatttatcttgcaaatggtatgtggatccgttccagaggcaatgagccttgcagccagtttgcagtataaaaaacccaattatgtccactgttggttcgacgcagcgtgtgccgaggatttctactgccaagcataagaaagtgaattgcagataaatggtctgttcgcaactggtgctctcgggcgactccatcactgagcaacccttcgccccggtggctgcggtgtcgcactggctgacacctgctcgcagttgcattacaagttttactgactatgtattttcaggtttattcaatttcagttgtaatgcttctgacagcagttgtatcagtcctcttgttcagcttccataataatgtactaaacttcagtttggtgtctatctcagtgtacctacactcagttggaaaacttcaaccacactgcaacaaggtttataaaaggtttgctatgaggaaaaacaaatttatgggctcaaacaaagtgtgatagtgaaagtcattttgcttccagcttaagaaccaagccaagaaaacagatatcaactgtgacgccacactcaaaagcttgtttggtgagagggataaggttgggatgctggagatctctaagcttttgagccgtggcttcccgaaaatctccaagcttttgtggtccatggagccagggatggctctttggtaaaagacttcgttgtggatggcctcttttatggtccatgttaagtcccaagtcccactaggtggttaagcagaaaaatcttgtgatggcattaagactttcagactttgtttttgggtctgatgcatgtaaaaaggattcccagtgtttctgttgctcttgcgatcctgtgaggacacatatgagagaaatatttagtttgttgatggcaaatcttgtcttatgttcatgcctgtacctatctgatcaagcgttatgatatgatcccatgcgtggtactgtgttctttagagatg

SEQ ID NO: 32645 - DNA, 3563 bp, Zea Mays
cccacctccctctcctccttccgacctcgccgcctccctccctaaactctaaaccctccaccagccgaagctactgccgcggccgcaacagaggtcgcgacgacgaacgctgaagaagcgccggcgagggagagtcctttactttttcctatgctgtagcaaaacaagcctatatcatcttccaaatatactcgttccgtgccggcggcctcccctcctacgcccctgccgattcttcaatcttcaccaacgtctgcgcgtagcaggctagcagtcggcacgacttcctcagatctgccggacgacttgctgttcgtcaccgactcaccagcaaccaacgtcagccatcagccggcagcaggggaagctgggcggagggtcattgcggcacggcgtccaggcgtacagcaggcaccagcaacagcccatggcaaacgccgcagatgaccctatggcagatgaagccagagtagaagatgccttcacacaggagatcaccgattattcgtacgtccctagataccatgtgttgagttggatggaaactgtggaggggatggtggccggtgtggcggcgcttccgccggtgtatttgatactgaacagagctcttcttcgttgcccatgccaagatcttcttgagacgggatggggatggaagaggctggtgccctacagacctggttatgttgagtggcatgtgttcaagaaataccttggggactatttcgaccataatcgtgaagcttttctttgtgccgagcagaagcctgatccatttggatggattattgctaaaaagagtgccctgattgctgcagccaaattgttgcaaattaacttgcaccattgcaaaaacaatcaaaatgctttccagtgcctcaagatggagaaggcacttctcaggtactgtgctagctttctcactcctgacgacaaaaggttgatcctccggatcaaggaccaggcaaagcaaatgatccaatcagagggtgatcaatctttggttgtaactatatgcttggaggttgtcggtgccgagcgcgcggtcgtcgtgcagctcgtgggaccagtccgccgagcggctgctagaggcggacgcagccctcgtgcggaagaagtgcgccgagaagagcgcgccgaggccgaggacgccgccgggcagcaggtcctccagcgcggcgaggtcttggtcttggtcttggagcagggtcttggtcttggagcactgcacgaggagcacatcggcatggtgcttcaagcaatggttcaaatgggtgtccttgttcctactggagatatgactgttgtcagaagaaccgctcaatttttccttaatagctttcaagagtgcctaacagcacaaaggaaggagagagaaatggcaaccgcagaactgggtttcaaaaagcaattaactaaggaggagaagtttgaaaagaggaagcagagacttgctgcaatcggagaggatcttttggcgattgctgctgatcaaccatttcgcttccctgccacatttacatttgtggtcagagcattctcagttctagatggtactgggaaaggccttgatcctaggtttcatattacagagattgctaagccaaatgccaaggaattgctaagatttaatgacgctggtgttgaaatagttgtgaaggcaagtttcaacatttggtcaaagctgttaacctatctctatgatagcacatctcctaagggttagggcttgtttggctaggagcggattgaaggggattggaggagcctattaagcattgaacaatttacccatgcttgtttcctattctttggtcgtgataacgtttgcaaccatgaatagtacatattgcttttccaggtgtgtggagagacatgtgtattcctcctatgacgaattccttaggctccatgaaggtaagcctgtcttaatgggcttgattgttgaacctgacttagtacttttatccatgtcacggcattgaactagacagtcactcatgtccttaggatattaacggtatacatcaacaattcattctattttaattgcttgcaaaacttttttggcccttcaaatgagttccacgcatcaagaagtcaagattccaggaggcctaaaataggagaggagggcgcagcttgattcaatccatgtcaagtcagaggctgctgcgaggtttgcacatgcaagtagaatttagatgatctctgttaggcatctaactgaataaatgatctccattatggactggttatattattttctgtgcgatcggatgggttaaagaaaagacgtgaaatggtattttccagtatggactgtataaatgtaattatattcctatgctggtcctgcttcgctttcatgtggatttatcttgcaaatggtatgtggatccgttccagaggcaatgagccttgcagccagtttgcagtataaaaaacccaattatgtccactgttggttcgacgcagcgtgtgccgaggatttctactgccaagcataagaaagtatttgaaatcaagaacttgcattcattcaatcataatgtgtttcctatcaagcataagtgtgtgtgttttgtttgatatctgctttaataggagattgttcttgtcaccccaaaaatgttcccattctactttcgggcaggtgaattgcagataaatggtctgttcgcaactggtgctctcgggcgactccatcactgagcaacccttcgccccggtggctgcggtgtcgcactggctgacacctgctcgcagttgcattacaagttttactgactatgtattttcaggtttattcaatttcagttgtaatgcttctgacagcagttgtatcagtcctcttgttcagcttccataataatgtactaaacttcagtttggtgtctatctcagtgtacctacactcagttggaaaacttcaaccacactgcaacaaggtttataaaaggtactgttactattgttaaaattagtcattttagctatccgcttctatttcaccgtgcttgcaggtttgctatgaggaaaaacaaatttatgggctcaaacaaagtgtgatagtgaaagtcattttgcttccagcttaagaaccaagccaagaaaacagatatcaactgtgacgccacactcaaaagcttgtttggtgagagggataaggttgggatgctggagatctctaagcttttgagccgtggcttcccgaaaatctccaagcttttgtggtccatggagccagggatggctctttggtaaaagacttcgttgtggatggcctcttttatggtccatgttaagtcccaagtcccactaggtggttaagcagaaaaatcttgtgatggcattaagactttcagactttgtttttgggtctgatgcatgtaaaaaggattcccagtgtttctgttgctcttgcgatcctgtgaggacacatatgagagaaatatttagtttgttgatggcaaatcttgtcttatgttcatgcctgtacctatctgatcaagcgttatgatatgatcccatgcgtggtactgtgttctttagagatg

SEQ ID NO: 32646 - DNA, 4542 bp, Zea Mays
cccacctccctctcctccttccgacctcgccgcctccctccctaaactctaaaccctccaccagccgaagctactgccgcggccgcaacagaggtcgcgacgacgaacgctgaagaagcgccggcgagggagagtcctttactttttcctatgctgtagcaaaacaagcctatatcatcttccaaatatactcgttccgtgccggcggcctcccctcctacgcccctgccgattcttcaatcttcaccaacgtctgcgcgtagcaggctagcagtcggcacgacttcctcagatctgccggacgacttgctgttcgtcaccgactcaccagcaaccaacgtcagccatcagccggcagcaggggaagctgggcggagggtcattgcggcacggcgtccaggcgtacagcaggcaccagcaacagcccatggcaaacgccgcagatgaccctatggcagatgaagccagagtagaagatgccttcacacaggagatcaccgattattcgtacgtccctagataccatgtgttgagttggatggaaactgtggaggggatggtggccggtgtggcggcgcttccgccggtgtatttgatactgaacagaggtgcgattttcttttatatttcttccagttcatgttctccttgtgtggctggtgctggattcaaccgatctagggaagagatgttagttgatttgctgtaaaaatcaatatgttaacagagatatatgatacatgctcctgcttgctcatgatgccggtttggtgccaaggctatcttcttgagacgggatggggatggaagaggctggtgccctacagacctggttatgttgagtggcatgtgttcaagaaataccttggggactatttcgaccataatcgtgaagcttttctttgtgccgagcagaagcctgatccatttggatggattattgctaaaaagagtgccctgattgctgcagccaaattgtgcctcaagatggagaaggcacttctcaggtactgtgctagctttctcactcctgacgacaaaaggttgatcctccggatcaaggaccaggcaaagcaaatgatccaatcagagggtgatcaatctttggttgtaactatatgcttggaggttgtcggtgccgagcgcgcggtcgtcgtgcagctcgtgggaccagtccgccgagcggctgctagaggcggacgcagccctcgtgcggaagaagtgcgccgagaagagcgcgccgaggccgaggacgccgccgggcagcaggtcctccagcgcggcgaggtcttggtcttggtcttggagcagggtcttggtcttggagcactgcacgaggagcacatcggcatggtgcttcaagcaatggttcaaatgggtgtccttgttcctactggagatatgactgttgtcagaagaaccgctcaatttttccttaatagctttcaagagtgcctaacagcacaaaggaaggagagagaaatggcaaccgcagaactgggtttcaaaaagcaattaactaaggaggagaagtttgaaaagaggaagcagagacttgctgcaatcggagaggatcttttggcgattgctgctgatcaaccatttcgcttccctgccacatttacatttgtggtcagagcattctcagttctagatggtactgggaaaggccttgatcctaggtttcatattacagagattgctaagccgtgagtactttttgcattactagcatctgaatacttattcaaaaacacgcaaagcttgcacatcttcacttattatgtactgtctatattttcatcttgaacttttctggtactgacttgaaatgtctgttaaatttgctagaaatgccaaggaattgctaagatttaatgacgctggtgttgaaatagttgtgaaggcaagtttcaacatttggtcaaagctgttaacctatctctatgatagcacatctcctaagggttagggcttgtttggctaggagcggattgaaggggattggaggagcctattaagcattgaacaatttacccatgcttgtttcctattctttggtcgtgataacgtttgcaaccatgaatagtacatattgcttttccaggtgtgtggagagacatgtgtattcctcctatgacgaattccttaggctccatgaaggtaagcctgtcttaatgggcttgattgttgaacctgacttagtacttttatccatgtcacggcattgaactagacagtcactcatgtccttaggatattaacggtatacatcaacaattcattctattttaattgcttgcaaaacttttttggcccttcaaatgagttccacgcatcaagaagtcaagattccaggaggcctaaaataggtaaacttgctgttatatcttttgtgctctcagtagtcgcctattacttgttttaattcgctgatccatgtgcagtgtatcaatttgtcttagtatttttattcgtggggatgcctgactcaaatgaactcatgttcaacactgagcaacctacttataattttggagcctataaaatttctaagctaaaaaaggtaataaaaaggaatgatattatagtcacatcatctgaacaacagtgaagggaagggagggatagatggtctgaatgcctataaatgtcgttcccttggtctgcttcttaaatttgaaaccaagatactatagtcaaatacttctaaacttgaagcctgtaaattggaatcaccaagttaaataagaacaggggtaactattcatagctcagatggttgtcatccaatacgtgcgctaaggcacagacaggtgaggttgcatattcaatccccaagacagtaaaccattgaggcatattaaaacacattttccatgaggtttcctaagtgatcctttaggtaaacagaaccatacctagctccatatgaaactatttcccgatttgaagtacacctaagttaaggttcatacattggagctctggcagtaaaacaatagtccttaccttgagacagcttagattagaatgaggtggatggtaatatggcatgagcaacataccacagttcatgcatggaggaaatcatttttactttctttcctagccatggtagttgtgttgctccttaccaaggcactacatggagcatcatatggttcatgatgtaaacatggttttagatctgtctatactcacactcaagaaccagccaaaatgtgatattccacaacctgagagaaatcaaaatgaaatcatgtacaacatagtacatatgatgatgtgcggtgatgcgggtgcatgtgtgttgtgtgtgtaggagaggagggcgcagcttgattcaatccatgtcaagtcagaggctgctgcgaggtttgcacatgcaagtagaatttagatgaaaagacgtgaaatggtattttccagtatggactgtataaatgtaattatattcctatgctggtacgtctgtctaaccttgctattacacttctattatggctttgtgtttacccaaagttccaaacctttcaggtcctgcttcgctttcatgtggatttatcttgcaaatggtatgtggatccgttccagaggcaatgagccttgcagccagtttgcagtataaaaaacccaattatgtccactgttggttcgacgcagcgtgtgccgaggatttctactgccaagcataagaaagtgaattgcagataaatggtctgttcgcaactggtgctctcgggcgactccatcactgagcaacccttcgccccggtggctgcggtgtcgcactggctgacacctgctcgcagttgcattacaagttttactgactatgtattttcaggtttattcaatttcagttgtaatgcttctgacagcagttgtatcagtcctcttgttcagcttccataataatgtactaaacttcagtttggtgtctatctcagtgtacctacactcagttggaaaacttcaaccacactgcaacaaggtttataaaaggtttgctatgaggaaaaacaaatttatgggctcaaacaaagtgtgatagtgaaagtcattttgcttccagcttaagaaccaagccaagaaaacagatatcaactgtgacgccacactcaaaagcttgtttggtgagagggataaggttgggatgctggagatctctaagcttttgagccgtggcttcccgaaaatctccaagcttttgtggtccatggagccagggatggctctttggtaaaagacttcgttgtggatggcctcttttatggtccatgttaagtcccaagtcccactaggtggttaagcagaaaaatcttgtgatggcattaagactttcagactttgtttttgggtctgatgcatgtaaaaaggattcccagtgtttctgttgctcttgcgatcctgtgaggacacatatgagagaaatatttagtttgttgatggcaaatcttgtcttatgttcatgcctgtacctatctgatcaagcgttatgatatgatcccatgcgtggtactgtgttctttagagatg

SEQ ID NO: 32647 - DNA, 3823 bp, Zea Mays
cccacctccctctcctccttccgacctcgccgcctccctccctaaactctaaaccctccaccagccgaagctactgccgcggccgcaacagaggtcgcgacgacgaacgctgaagaagcgccggcgagggagagtcctttactttttcctatgctgtagcaaaacaagcctatatcatcttccaaatatactcgttccgtgccggcggcctcccctcctacgcccctgccgattcttcaatcttcaccaacgtctgcgcgtagcaggctagcagtcggcacgacttcctcagatctgccggacgacttgctgttcgtcaccgactcaccagcaaccaacgtcagccatcagccggcagcaggggaagctgggcggagggtcattgcggcacggcgtccaggcgtacagcaggcaccagcaacagcccatggcaaacgccgcagatgaccctatggcagatgaagccagagtagaagatgccttcacacaggagatcaccgattattcgtacgtccctagataccatgtgttgagttggatggaaactgtggaggggatggtggccggtgtggcggcgcttccgccggtgtatttgatactgaacagagatcttcttgagacgggatggggatggaagaggctggtgccctacagacctggttatgttgagtggcatgtgttcaagaaataccttggggactatttcgaccataatcgtgaagcttttctttgtgccgagcagaagcctgatccatttggatggattattgctaaaaagagtgccctgattgctgcagccaaattggtgcttcaagcaatggttcaaatgggtgtccttgttcctactggagatatgactgttgtcagaagaaccgctcaatttttccttaatagctttcaagagtgcctaacagcacaaaggaaggagagagaaatggcaaccgcagaactgggtttcaaaaagcaattaactaaggaggagaagtttgaaaagaggaagcagagacttgctgcaatcggagaggatcttttggcgattgctgctgatcaaccatttcgcttccctgccacatttacatttgtggtcagagcattctcagttctagatggtactgggaaaggccttgatcctaggtttcatattacagagattgctaagccgtgagtactttttgcattactagcatctgaatacttattcaaaaacacgcaaagcttgcacatcttcacttattatgtactgtctatattttcatcttgaacttttctggtactgacttgaaatgtctgttaaatttgctagaaatgccaaggaattgctaagatttaatgacgctggtgttgaaatagttgtgaaggcaagtttcaacatttggtcaaagctgttaacctatctctatgatagcacatctcctaagggttagggcttgtttggctaggagcggattgaaggggattggaggagcctattaagcattgaacaatttacccatgcttgtttcctattctttggtcgtgataacgtttgcaaccatgaatagtacatattgcttttccaggtgtgtggagagacatgtgtattcctcctatgacgaattccttaggctccatgaaggtaagcctgtcttaatgggcttgattgttgaacctgacttagtacttttatccatgtcacggcattgaactagacagtcactcatgtccttaggatattaacggtatacatcaacaattcattctattttaattgcttgcaaaacttttttggcccttcaaatgagttccacgcatcaagaagtcaagattccaggaggcctaaaataggtaaacttgctgttatatcttttgtgctctcagtagtcgcctattacttgttttaattcgctgatccatgtgcagtgtatcaatttgtcttagtatttttattcgtggggatgcctgactcaaatgaactcatgttcaacactgagcaacctacttataattttggagcctataaaatttctaagctaaaaaaggtaataaaaaggaatgatattatagtcacatcatctgaacaacagtgaagggaagggagggatagatggtctgaatgcctataaatgtcgttcccttggtctgcttcttaaatttgaaaccaagatactatagtcaaatacttctaaacttgaagcctgtaaattggaatcaccaagttaaataagaacaggggtaactattcatagctcagatggttgtcatccaatacgtgcgctaaggcacagacaggtgaggttgcatattcaatccccaagacagtaaaccattgaggcatattaaaacacattttccatgaggtttcctaagtgatcctttaggtaaacagaaccatacctagctccatatgaaactatttcccgatttgaagtacacctaagttaaggttcatacattggagctctggcagtaaaacaatagtccttaccttgagacagcttagattagaatgaggtggatggtaatatggcatgagcaacataccacagttcatgcatggaggaaatcatttttactttctttcctagccatggtagttgtgttgctccttaccaaggcactacatggagcatcatatggttcatgatgtaaacatggttttagatctgtctatactcacactcaagaaccagccaaaatgtgatattccacaacctgagagaaatcaaaatgaaatcatgtacaacatagtacatatgatgatgtgcggtgatgcgggtgcatgtgtgttgtgtgtgtaggagaggagggcgcagcttgattcaatccatgtcaagtcagaggctgctgcgaggtttgcacatgcaagtagaatttagatggtcctgcttcgctttcatgtggatttatcttgcaaatggtatgtggatccgttccagaggcaatgagccttgcagccagtttgcagtataaaaaacccaattatgtccactgttggttcgacgcagcgtgtgccgaggatttctactgccaagcataagaaagtgaattgcagataaatggtctgttcgcaactggtgctctcgggcgactccatcactgagcaacccttcgccccggtggctgcggtgtcgcactggctgacacctgctcgcagttgcattacaagttttactgactatgtattttcaggtttattcaatttcagttgtaatgcttctgacagcagttgtatcagtcctcttgttcagcttccattgtacctacactcagttggaaaacttcaaccacactgcaacaaggtttataaaaggtttgctatgaggaaaaacaaatttatgggctcaaacaaagtgtgatagtgaaagtcattttgcttccagcttaagaaccaagccaagaaaacagatatcaactgtgacgccacactcaaaagcttgtttggtgagagggataaggttgggatgctggagatctctaagcttttgagccgtggcttcccgaaaatctccaagcttttgtggtccatggagccagggatggctctttggtaaaagacttcgttgtggatggcctcttttatggtccatgttaagtcccaagtcccactaggtggttaagcagaaaaatcttgtgatggcattaagactttcagactttgtttttgggtctgatgcatgtaaaaaggattcccagtgtttctgttgctcttgcgatcctgtgaggacacatatgagagaaatatttagtttgttgatggcaaatcttgtcttatgttcatgcctgtacctatctgatcaagcgttatgatatgatcccatgcgtggtactgtgttctttagagatg

SEQ ID NO: 32648 - DNA, 3514 bp, Zea Mays
cccacctccctctcctccttccgacctcgccgcctccctccctaaactctaaaccctccaccagccgaagctactgccgcggccgcaacagaggtcgcgacgacgaacgctgaagaagcgccggcgagggagagtcctttactttttcctatgctgtagcaaaacaagcctatatcatcttccaaatatactcgttccgtgccggcggcctcccctcctacgcccctgccgattcttcaatcttcaccaacgtctgcgcgtagcaggctagcagtcggcacgacttcctcagatctgccggacgacttgctgttcgtcaccgactcaccagcaaccaacgtcagccatcagccggcagcaggggaagctgggcggagggtcattgcggcacggcgtccaggcgtacagcaggcaccagcaacagcccatggcaaacgccgcagatgaccctatggcagatgaagccagagtagaagatgccttcacacaggagatcaccgattattcgtacgtccctagataccatgtgttgagttggatggaaactgtggaggggatggtggccggtgtggcggcgcttccgccggtgtatttgatactgaacagaggtgcgattttcttttatatttcttccagttcatgttctccttgtgtggctggtgctggattcaaccgatctagggaagagatgttagttgatttgctgtaaaaatcaatatgttaacagagatatatgatacatgctcctgcttgctcatgatgccggtttggtgccaaggctgtatgccccccttcctatctgtgttttttgttctataatttggaggtttcttagttttttactacagtatttgcctattacgtatcacgttgcatctaattagctcttcttcgttgcccatgccaagatcttcttgagacgggatggggatggaagaggctggtgccctacagacctggttatgttgagtggcatgtgttcaagaaataccttggggactatttcgaccataatcgtgaagcttttctttgtgccgagcagaagcctgatccatttggatggattattgctaaaaagagtgccctgattgctgcagccaaattgtgcctcaagatggagaaggcacttctcaggtactgtgctagctttctcactcctgacgacaaaaggttgatcctccggatcaaggaccaggcaaagcaaatgatccaatcagagggtgatcaatctttggttgtaactatatgcttggaggtgcttcaagcaatggttcaaatgggtgtccttgttcctactggagatatgactgttgtcagaagaaccgctcaatttttccttaatagctttcaagagtgcctaacagcacaaaggaaggagagagaaatggcaaccgcagaactgggtttcaaaaagcaattaactaaggaggagaagtttgaaaagaggaagcagagacttgctgcaatcggagaggatcttttggcgattgctgctgatcaaccatttcgcttccctgccacatttacatttgtggtcagagcattctcagttctagatggtactgggaaaggccttgatcctaggtttcatattacagagattgctaagccgtgagtactttttgcattactagcatctgaatacttattcaaaaacacgcaaagcttgcacatcttcacttattatgtactgtctatattttcatcttgaacttttctggtactgacttgaaatgtctgttaaatttgctagaaatgccaaggaattgctaagatttaatgacgctggtgttgaaatagttgtgaaggcaagtttcaacatttggtcaaagctgttaacctatctctatgatagcacatctcctaagggttagggcttgtttggctaggagcggattgaaggggattggaggagcctattaagcattgaacaatttacccatgcttgtttcctattctttggtcgtgataacgtttgcaaccatgaatagtacatattgcttttccaggtgtgtggagagacatgtgtattcctcctatgacgaattccttaggctccatgaaggtaagcctgtcttaatgggcttgattgttgaacctgacttagtacttttatccatgtcacggcattgaactagacagtcactcatgtccttaggatattaacggtatacatcaacaattcattctattttaattgcttgcaaaacttttttggcccttcaaatgagttccacgcatcaagaagtcaagattccaggaggcctaaaataggagaggagggcgcagcttgattcaatccatgtcaagtcagaggctgctgcgaggtttgcacatgcaagtagaatttagatggtcctgcttcgctttcatgtggatttatcttgcaaatggtatgtggatccgttccagaggcaatgagccttgcagccagtttgcagtataaaaaacccaattatgtccactgttggttcgacgcagcgtgtgccgaggatttctactgccaagcataagaaagtgaattgcagataaatggtctgttcgcaactggtgctctcgggcgactccatcactgagcaacccttcgccccggtggctgcggtgtcgcactggctgacacctgctcgcagttgcattacaagttttactgactatgtattttcaggtttattcaatttcagttgtaatgcttctgacagcagttgtatcagtcctcttgttcagcttccatgtatccctcgcatccttccttggatccacataagtgttaatgataattttgttgcatctcctctgctgatcagagctttcaaactcatgacagaataatgtactaaacttcagtttggtgtctatctcagtgtacctacactcagttggaaaacttcaaccacactgcaacaaggtttataaaaggtactgttactattgttaaaattagtcattttagctatccgcttctatttcaccgtgcttgcaggtttgctatgaggaaaaacaaatttatgggctcaaacaaagtgtgatagtgaaagtcattttgcttccagcttaagaaccaagccaagaaaacagatatcaactgtgacgccacactcaaaagcttgtttggtgagagggataaggttgggatgctggagatctctaagcttttgagccgtggcttcccgaaaatctccaagcttttgtggtccatggagccagggatggctctttggtaaaagacttcgttgtggatggcctcttttatggtccatgttaagtcccaagtcccactaggtggttaagcagaaaaatcttgtgatggcattaagactttcagactttgtttttgggtctgatgcatgtaaaaaggattcccagtgtttctgttgctcttgcgatcctgtgaggacacatatgagagaaatatttagtttgttgatggcaaatcttgtcttatgttcatgcctgtacctatctgatcaagcgttatgatatgatcccatgcgtggtactgtgttctttagagatg

SEQ ID NO: 32649 - DNA, 4219 bp, Zea Mays
cccacctccctctcctccttccgacctcgccgcctccctccctaaactctaaaccctccaccagccgaagctactgccgcggccgcaacagaggtcgcgacgacgaacgctgaagaagcgccggcgagggagagtcctttactttttcctatgctgtagcaaaacaagcctatatcatcttccaaatatactcgttccgtgccggcggcctcccctcctacgcccctgccgattcttcaatcttcaccaacgtctgcgcgtagcaggctagcagtcggcacgacttcctcagatctgccggacgacttgctgttcgtcaccgactcaccagcaaccaacgtcagccatcagccggcagcaggggaagctgggcggagggtcattgcggcacggcgtccaggcgtacagcaggcaccagcaacagcccatggcaaacgccgcagatgaccctatggcagatgaagccagagtagaagatgccttcacacaggagatcaccgattattcgtacgtccctagataccatgtgttgagttggatggaaactgtggaggggatggtggccggtgtggcggcgcttccgccggtgtatttgatactgaacagagatcttcttgagacgggatggggatggaagaggctggtgccctacagacctggttatgttgagtggcatgtgttcaagaaataccttggggactatttcgaccataatcgtgaagcttttctttgtgccgagcagaagcctgatccatttggatggattattgctaaaaagagtgccctgattgctgcagccaaattgtgcctcaagatggagaaggcacttctcaggtactgtgctagctttctcactcctgacgacaaaaggttgatcctccggatcaaggaccaggcaaagcaaatgatccaatcagagggtgatcaatctttggttgtaactatatgcttggaggttgtcggtgccgagcgcgcggtcgtcgtgcagctcgtgggaccagtccgccgagcggctgctagaggcggacgcagccctcgtgcggaagaagtgcgccgagaagagcgcgccgaggccgaggacgccgccgggcagcaggtcctccagcgcggcgaggtcttggtcttggtcttggagcagggtcttggtcttggagcactgcacgaggagcacatcggcatggtgcttcaagcaatggttcaaatgggtgtccttgttcctactggagatatgactgttgtcagaagaaccgctcaatttttccttaatagctttcaagagtgcctaacagcacaaaggaaggagagagaaatggcaaccgcagaactgggtttcaaaaagcaattaactaaggaggagaagtttgaaaagaggaagcagagacttgctgcaatcggagaggatcttttggcgattgctgctgatcaaccatttcgcttccctgccacatttacatttgtggtcagagcattctcagttctagatggtactgggaaaggccttgatcctaggtttcatattacagagattgctaagccaaatgccaaggaattgctaagatttaatgacgctggtgttgaaatagttgtgaaggcaagtttcaacatttggtcaaagctgttaacctatctctatgatagcacatctcctaagggttagggcttgtttggctaggagcggattgaaggggattggaggagcctattaagcattgaacaatttacccatgcttgtttcctattctttggtcgtgataacgtttgcaaccatgaatagtacatattgcttttccaggtgtgtggagagacatgtgtattcctcctatgacgaattccttaggctccatgaaggtaagcctgtcttaatgggcttgattgttgaacctgacttagtacttttatccatgtcacggcattgaactagacagtcactcatgtccttaggatattaacggtatacatcaacaattcattctattttaattgcttgcaaaacttttttggcccttcaaatgagttccacgcatcaagaagtcaagattccaggaggcctaaaataggtaaacttgctgttatatcttttgtgctctcagtagtcgcctattacttgttttaattcgctgatccatgtgcagtgtatcaatttgtcttagtatttttattcgtggggatgcctgactcaaatgaactcatgttcaacactgagcaacctacttataattttggagcctataaaatttctaagctaaaaaaggtaataaaaaggaatgatattatagtcacatcatctgaacaacagtgaagggaagggagggatagatggtctgaatgcctataaatgtcgttcccttggtctgcttcttaaatttgaaaccaagatactatagtcaaatacttctaaacttgaagcctgtaaattggaatcaccaagttaaataagaacaggggtaactattcatagctcagatggttgtcatccaatacgtgcgctaaggcacagacaggtgaggttgcatattcaatccccaagacagtaaaccattgaggcatattaaaacacattttccatgaggtttcctaagtgatcctttaggtaaacagaaccatacctagctccatatgaaactatttcccgatttgaagtacacctaagttaaggttcatacattggagctctggcagtaaaacaatagtccttaccttgagacagcttagattagaatgaggtggatggtaatatggcatgagcaacataccacagttcatgcatggaggaaatcatttttactttctttcctagccatggtagttgtgttgctccttaccaaggcactacatggagcatcatatggttcatgatgtaaacatggttttagatctgtctatactcacactcaagaaccagccaaaatgtgatattccacaacctgagagaaatcaaaatgaaatcatgtacaacatagtacatatgatgatgtgcggtgatgcgggtgcatgtgtgttgtgtgtgtaggagaggagggcgcagcttgattcaatccatgtcaagtcagaggctgctgcgaggtttgcacatgcaagtagaatttagatgaaaagacgtgaaatggtattttccagtatggactgtataaatgtaattatattcctatgctggtcctgcttcgctttcatgtggatttatcttgcaaatggtatgtggatccgttccagaggcaatgagccttgcagccagtttgcagtataaaaaacccaattatgtccactgttggttcgacgcagcgtgtgccgaggatttctactgccaagcataagaaagtgaattgcagataaatggtctgttcgcaactggtgctctcgggcgactccatcactgagcaacccttcgccccggtggctgcggtgtcgcactggctgacacctgctcgcagttgcattacaagttttactgactatgtattttcaggtttattcaatttcagttgtaatgcttctgacagcagttgtatcagtcctcttgttcagcttccataataatgtactaaacttcagtttggtgtctatctcagtgtacctacactcagttggaaaacttcaaccacactgcaacaaggtttataaaaggtactgttactattgttaaaattagtcattttagctatccgcttctatttcaccgtgcttgcaggtttgctatgaggaaaaacaaatttatgggctcaaacaaagtgtgatagtgaaagtcattttgcttccagcttaagaaccaagccaagaaaacagatatcaactgtgacgccacactcaaaagcttgtttggtgagagggataaggttgggatgctggagatctctaagcttttgagccgtggcttcccgaaaatctccaagcttttgtggtccatggagccagggatggctctttggtaaaagacttcgttgtggatggcctcttttatggtccatgttaagtcccaagtcccactaggtggttaagcagaaaaatcttgtgatggcattaagactttcagactttgtttttgggtctgatgcatgtaaaaaggattcccagtgtttctgttgctcttgcgatcctgtgaggacacatatgagagaaatatttagtttgttgatggcaaatcttgtcttatgttcatgcctgtacctatctgatcaagcgttatgatatgatcccatgcgtggtactgtgttctttagagatg

SEQ ID NO: 32650 - DNA, 2982 bp, Zea Mays
cccacctccctctcctccttccgacctcgccgcctccctccctaaactctaaaccctccaccagccgaagctactgccgcggccgcaacagaggtcgcgacgacgaacgctgaagaagcgccggcgagggagagtcctttactttttcctatgctgtagcaaaacaagcctatatcatcttccaaatatactcgttccgtgccggcggcctcccctcctacgcccctgccgattcttcaatcttcaccaacgtctgcgcgtagcaggctagcagtcggcacgacttcctcagatctgccggacgacttgctgttcgtcaccgactcaccagcaaccaacgtcagccatcagccggcagcaggggaagctgggcggagggtcattgcggcacggcgtccaggcgtacagcaggcaccagcaacagcccatggcaaacgccgcagatgaccctatggcagatgaagccagagtagaagatgccttcacacaggagatcaccgattattcgtacgtccctagataccatgtgttgagttggatggaaactgtggaggggatggtggccggtgtggcggcgcttccgccggtgtatttgatactgaacagagatcttcttgagacgggatggggatggaagaggctggtgccctacagacctggttatgttgagtggcatgtgttcaagaaataccttggggactatttcgaccataatcgtgaagcttttctttgtgccgagcagaagcctgatccatttggatggattattgctaaaaagagtgccctgattgctgcagccaaattgtgcctcaagatggagaaggcacttctcaggtactgtgctagctttctcactcctgacgacaaaaggttgatcctccggatcaaggaccaggcaaagcaaatgatccaatcagagggtgatcaatctttggttgtaactatatgcttggaggtgcttcaagcaatggttcaaatgggtgtccttgttcctactggagatatgactgttgtcagaagaaccgctcaatttttccttaatagctttcaagagtgcctaacagcacaaaggaaggagagagaaatggcaaccgcagaactgggtttcaaaaagcaattaactaaggaggagaagtttgaaaagaggaagcagagacttgctgcaatcggagaggatcttttggcgattgctgctgatcaaccatttcgcttccctgccacatttacatttgtggtcagagcattctcagttctagatggtactgggaaaggccttgatcctaggtttcatattacagagattgctaagccaaatgccaaggaattgctaagatttaatgacgctggtgttgaaatagttgtgaaggtgtgtggagagacatgtgtattcctcctatgacgaattccttaggctccatgaaggtaagcctgtcttaatgggcttgattgttgaacctgacttagtacttttatccatgtcacggcattgaactagacagtcactcatgtccttaggatattaacggtatacatcaacaattcattctattttaattgcttgcaaaacttttttggcccttcaaatgagttccacgcatcaagaagtcaagattccaggaggcctaaaataggagaggagggcgcagcttgattcaatccatgtcaagtcagaggctgctgcgaggtttgcacatgcaagtagaatttagatgaaaagacgtgaaatggtattttccagtatggactgtataaatgtaattatattcctatgctggtcctgcttcgctttcatgtggatttatcttgcaaatggtatgtggatccgttccagaggcaatgagccttgcagccagtttgcagtataaaaaacccaattatgtccactgttggttcgacgcagcgtgtgccgaggatttctactgccaagcataagaaagagattgttcttgtcaccccaaaaatgttcccattctactttcgggcaggtgaattgcagataaatggtctgttcgcaactggtgctctcgggcgactccatcactgagcaacccttcgccccggtggctgcggtgtcgcactggctgacacctgctcgcagttgcattacaagttttactgactatgtattttcaggtttattcaatttcagttgtaatgcttctgacagcagttgtatcagtcctcttgttcagcttccatgtatccctcgcatccttccttggatccacataagtgttaatgataattttgttgcatctcctctgctgatcagagctttcaaactcatgacagaataatgtactaaacttcagtttggtgtctatctcagtgtacctacactcagttggaaaacttcaaccacactgcaacaaggtttataaaaggtactgttactattgttaaaattagtcattttagctatccgcttctatttcaccgtgcttgcaggtttgctatgaggaaaaacaaatttatgggctcaaacaaagtgtgatagtgaaagtcattttgcttccagcttaagaaccaagccaagaaaacagatatcaactgtgacgccacactcaaaagcttgtttggtgagagggataaggttgggatgctggagatctctaagcttttgagccgtggcttcccgaaaatctccaagcttttgtggtccatggagccagggatggctctttggtaaaagacttcgttgtggatggcctcttttatggtccatgttaagtcccaagtcccactaggtggttaagcagaaaaatcttgtgatggcattaagactttcagactttgtttttgggtctgatgcatgtaaaaaggattcccagtgtttctgttgctcttgcgatcctgtgaggacacatatgagagaaatatttagtttgttgatggcaaatcttgtcttatgttcatgcctgtacctatctgatcaagcgttatgatatgatcccatgcgtggtactgtgttctttagagatg

SEQ ID NO: 32651 - DNA, 4024 bp, Zea Mays
cccacctccctctcctccttccgacctcgccgcctccctccctaaactctaaaccctccaccagccgaagctactgccgcggccgcaacagaggtcgcgacgacgaacgctgaagaagcgccggcgagggagagtcctttactttttcctatgctgtagcaaaacaagcctatatcatcttccaaatatactcgttccgtgccggcggcctcccctcctacgcccctgccgattcttcaatcttcaccaacgtctgcgcgtagcaggctagcagtcggcacgacttcctcagatctgccggacgacttgctgttcgtcaccgactcaccagcaaccaacgtcagccatcagccggcagcaggggaagctgggcggagggtcattgcggcacggcgtccaggcgtacagcaggcaccagcaacagcccatggcaaacgccgcagatgaccctatggcagatgaagccagagtagaagatgccttcacacaggagatcaccgattattcgtacgtccctagataccatgtgttgagttggatggaaactgtggaggggatggtggccggtgtggcggcgcttccgccggtgtatttgatactgaacagagatcttcttgagacgggatggggatggaagaggctggtgccctacagacctggttatgttgagtggcatgtgttcaagaaataccttggggactatttcgaccataatcgtgaagcttttctttgtgccgagcagaagcctgatccatttggatggattattgctaaaaagagtgccctgattgctgcagccaaattgtgcctcaagatggagaaggcacttctcaggtactgtgctagctttctcactcctgacgacaaaaggttgatcctccggatcaaggaccaggcaaagcaaatgatccaatcagagggtgatcaatctttggttgtaactatatgcttggaggtatgcttgctacaaactacaccaaactgttgccaaactagcgccagggattcgagccctccccgcgtttccttgagcatgagcctgtccgcgtgtaacacctggcggaccggacccgaaaattttcttcgaatgagctctgagccgtgtagccctccagtccgctgttcggtgcccgctgcccacctccctctcctccttccgacctcgccgcctccctccctaaactctaaaccttccaccagccgaagctactgccgcggccgcagcagaggtcgcgacgacgaacgctgaagaagcgccggcgagggagagctccgacgagtcctctctgtcggccaggttgtcggtgccgagcgcgcggtcgtcgtgcagctcgtgggaccagtccgccgagcggctgctagaggcggacgcagccctcgtgcggaagaagtgcgccgagaagagcgcgccgaggccgaggacgccgccgggcagcaggtcctccagcgcggcgaggtcttggtcttggtcttggagcagggtcttggtcttggagcactgcacgaggagcacatcggcatggtgcttcaagcaatggttcaaatgggtgtccttgttcctactggagatatgactgttgtcagaagaaccgctcaatttttccttaatagctttcaagagtgcctaacagcacaaaggaaggagagagaaatggcaaccgcagaactgggtttcaaaaagcaattaactaaggaggagaagtttgaaaagaggaagcagagacttgctgcaatcggagaggatcttttggcgattgctgctgatcaaccatttcgcttccctgccacatttacatttgtggtcagagcattctcagttctagatggtactgggaaaggccttgatcctaggtttcatattacagagattgctaagccaaatgccaaggaattgctaagatttaatgacgctggtgttgaaatagttgtgaaggcaagtttcaacatttggtgtgtggagagacatgtgtattcctcctatgacgaattccttaggctccatgaagtgtatcaatttgtcttagtatttttattcgtggggatgcctgactcaaatgaactcatgttcaacactgagcaacctacttataattttggagcctataaaatttctaagctaaaaaaggtaataaaaaggaatgatattatagtcacatcatctgaacaacagtgaagggaagggagggatagatggtctgaatgcctataaatgtcgttcccttggtctgcttcttaaatttgaaaccaagatactatagtcaaatacttctaaacttgaagcctgtaaattggaatcaccaagttaaataagaacaggggtaactattcatagctcagatggttgtcatccaatacgtgcgctaaggcacagacaggtgaggttgcatattcaatccccaagacagtaaaccattgaggcatattaaaacacattttccatgaggtttcctaagtgatcctttaggtaaacagaaccatacctagctccatatgaaactatttcccgatttgaagtacacctaagttaaggttcatacattggagctctggcagtaaaacaatagtccttaccttgagacagcttagattagaatgaggtggatggtaatatggcatgagcaacataccacagttcatgcatggaggaaatcatttttactttctttcctagccatggtagttgtgttgctccttaccaaggcactacatggagcatcatatggttcatgatgtaaacatggttttagatctgtctatactcacactcaagaaccagccaaaatgtgatattccacaacctgagagaaatcaaaatgaaatcatgtacaacatagtacatatgatgatgtgcggtgatgcgggtgcatgtgtgttgtgtgtgtaggagaggagggcgcagcttgattcaatccatgtcaagtcagaggctgctgcgaggtttgcacatgcaagtagaatttagatgacgtgaaatggtattttccagtatggactgtataaatgtaattatattcctatgctggtcctgcttcgctttcatgtggatttatcttgcaaatggtatgtggatccgttccagaggcaatgagccttgcagccagtttgcagtataaaaaacccaattatgtccactgttggttcgacgcagcgtgtgccgaggatttctactgccaagcataagaaagtgaattgcagataaatggtctgttcgcaactggtgctctcgggcgactccatcactgagcaacccttcgccccggtggctgcggtgtcgcactggctgacacctgctcgcagttgcattacaagttttactgactatgtattttcaggtttattcaatttcagttgtaatgcttctgacagcagttgtatcagtcctcttgttcagcttccataataatgtactaaacttcagtttggtgtctatctcagtgtacctacactcagttggaaaacttcaaccacactgcaacaaggtttataaaaggtttgctatgaggaaaaacaaatttatgggctcaaacaaagtgtgatagtgaaagtcattttgcttccagcttaagaaccaagccaagaaaacagatatcaactgtgacgccacactcaaaagcttgtttggtgagagggataaggttgggatgctggagatctctaagcttttgagccgtggcttcccgaaaatctccaagcttttgtggtccatggagccagggatggctctttggtaaaagacttcgttgtggatggcctcttttatggtccatgttaagtcccaagtcccactaggtggttaagcagaaaaatcttgtgatggcattaagactttcagactttgtttttgggtctgatgcatgtaaaaaggattcccagtgtttctgttgctcttgcgatcctgtgaggacacatatgagagaaatatttagtttgttgatggcaaatcttgtcttatgttcatgcctgtacctatctgatcaagcgttatgatatgatcccatgcgtggtactgtgttctttagagatg

SEQ ID NO: 32652 - DNA, 5535 bp, Zea Mays
cccacctccctctcctccttccgacctcgccgcctccctccctaaactctaaaccctccaccagccgaagctactgccgcggccgcaacagaggtcgcgacgacgaacgctgaagaagcgccggcgagggagagtcctttactttttcctatgctgtagcaaaacaagcctatatcatcttccaaatatactcgttccgtgccggcggcctcccctcctacgcccctgccgattcttcaatcttcaccaacgtctgcgcgtagcaggctagcagtcggcacgacttcctcagatctgccggacgacttgctgttcgtcaccgactcaccagcaaccaacgtcagccatcagccggcagcaggggaagctgggcggagggtcattgcggcacggcgtccaggcgtacagcaggcaccagcaacagcccatggcaaacgccgcagatgaccctatggcagatgaagccagagtagaagatgccttcacacaggagatcaccgattattcgtacgtccctagataccatgtgttgagttggatggaaactgtggaggggatggtggccggtgtggcggcgcttccgccggtgtatttgatactgaacagaggtgcgattttcttttatatttcttccagttcatgttctccttgtgtggctggtgctggattcaaccgatctagggaagagatgttagttgatttgctgtaaaaatcaatatgttaacagagatatatgatacatgctcctgcttgctcatgatgccggtttggtgccaaggctgtatgccccccttcctatctgtgttttttgttctataatttggaggtttcttagttttttactacagtatttgcctattacgtatcacgttgcatctaattagctcttcttcgttgcccatgccaagatcttcttgagacgggatggggatggaagaggctggtgccctacagacctggttatgttgagtggcatgtgttcaagaaataccttggggactatttcgaccataatcgtgaagcttttctttgtgccgagcagaagcctgatccatttggatggattattgctaaaaagagtgccctgattgctgcagccaaattggtgcttcaagcaatggttcaaatgggtgtccttgttcctactggagatatgactgttgtcagaagaaccgctcaatttttccttaatagctttcaagagtgcctaacagcacaaaggaaggagagagaaatggcaaccgcagaactgggtttcaaaaagcaattaactaaggaggagaagtttgaaaagaggaagcagagacttgctgcaatcggagaggatcttttggcgattgctgctgatcaaccatttcgcttccctgccacatttacatttgtggtcagagcattctcagttctagatggtactgggaaaggccttgatcctaggtttcatattacagagattgctaagccgtgagtactttttgcattactagcatctgaatacttattcaaaaacacgcaaagcttgcacatcttcacttattatgtactgtctatattttcatcttgaacttttctggtactgacttgaaatgtctgttaaatttgctagaaatgccaaggaattgctaagatttaatgacgctggtgttgaaatagttgtgaaggcaagtttcaacatttggtcaaagctgttaacctatctctatgatagcacatctcctaagggttagggcttgtttggctaggagcggattgaaggggattggaggagcctattaagcattgaacaatttacccatgcttgtttcctattctttggtcgtgataacgtttgcaaccatgaatagtacatattgcttttccaggtgtgtggagagacatgtgtattcctcctatgacgaattccttaggctccatgaagtgtatcaatttgtcttagtatttttattcgtggggatgcctgactcaaatgaactcatgttcaacactgagcaacctacttataattttggagcctataaaatttctaagctaaaaaaggtaataaaaaggaatgatattatagtcacatcatctgaacaacagtgaagggaagggagggatagatggtctgaatgcctataaatgtcgttcccttggtctgcttcttaaatttgaaaccaagatactatagtcaaatacttctaaacttgaagcctgtaaattggaatcaccaagttaaataagaacaggggtaactattcatagctcagatggttgtcatccaatacgtgcgctaaggcacagacaggtgaggttgcatattcaatccccaagacagtaaaccattgaggcatattaaaacacattttccatgaggtttcctaagtgatcctttaggtaaacagaaccatacctagctccatatgaaactatttcccgatttgaagtacacctaagttaaggttcatacattggagctctggcagtaaaacaatagtccttaccttgagacagcttagattagaatgaggtggatggtaatatggcatgagcaacataccacagttcatgcatggaggaaatcatttttactttctttcctagccatggtagttgtgttgctccttaccaaggcactacatggagcatcatatggttcatgatgtaaacatggttttagatctgtctatactcacactcaagaaccagccaaaatgtgatattccacaacctgagagaaatcaaaatgaaatcatgtacaacatagtacatatgatgatgtgcggtgatgcgggtgcatgtgtgttgtgtgtgtaggagaggagggcgcagcttgattcaatccatgtcaagtcagaggctgctgcgaggtttgcacatgcaagtagaatttagatggtcctgcttcgctttcatgtggatttatcttgcaaatggtatgtggatccgttccagaggcaatgagccttgcagccagtttgcagtataaaaaacccaattatgtccactgttggttcgacgcagcgtgtgccgaggatttctactgccaagcataagaaagtatttgaaatcaagaacttgcattcattcaatcataatgtgtttcctatcaagcataagtgtgtgtgttttgtttgatatctgctttaataggagattgttcttgtcaccccaaaaatgttcccattctactttcgggcaggtgaattgcagataaatggtctgttcgcaactggtgctctcgggcgactccatcactgagcaacccttcgccccggtggctgcggtgtcgcactggctgacacctgctcgcagttgcattacaagttttactgactatgtattttcaggtttattcaatttcagttgtaatgcttctgacagcagttgtatcagtcctcttgttcagcttccatgtatccctcgcatccttccttggatccacataagtgttaatgataattttgttgcatctcctctgctgatcagagctttcaaactcatgacagaataatgtactaaacttcagtttggtgtctatctcagtgtacctacactcagttggaaaacttcaaccacactgcaacaaggtttataaaaggtactgttactattgttaaaattagtcattttagctatccgcttctatttcaccgtgcttgcaggtttgctatgaggaaaaacaaatttatgggctcaaacaaagtgtgatagtgaaagtcattttgcttccagcttaagaaccaagccaagaaaacagatatcaactgtgacgccacactcaaaagcttgtttggtgagagggataaggtggtgtcatgtttgctaaattctcaccaaggcgaagccacggtaaccgccaccgtcatggtgcccccgacggccactgcgatgcccgtcttcctctccgcggcgccccctcctttttccacccgccgtcggcgcagccgccttcctgccatttccgcatccctttcgccgtccccttcctcttcggaggagccgctgctggtgcgcgcggcgcggggcgaggacggcctcccacgcccacccgcgtggatgatgcgacaggcagggcggtacatggcggagtaccaggcgctggccaagcgccacccctcgttccgggagcgctccgagaacacggacctcatcgtcgagatcacgctgcagccgtggcgtgccttcgcgcctgacggcgtcatcctgttctcagacatactcacgcccctaccggccatcggggtaccgttcgatatctcggactccaaggggcccgtgatccaatcgccagtgcggtccgaagggcaggtgagggagctcgtccccatcgaccttgatatgctccagttcgtcggagagtcactaaagattctgcgaaatgagattgatggaaaagctgctttgctaggatttgtgggggccccatggacaattgcaacttacattgttgaaggggggatgaccaacacatacacaaatataaagaacatgtgccatacagctcccgatgtcttgaggtgtcttctatctcatcttgcagaagcgatatctgactatatcatttaccaagttaactccggggcccagtgtatacagatatttgattcatggggtggacaacttccacctcatgtgtgggagcagtggtcaaaaccatatatcaaaaagattgtgaataggattaagaaagagtgccctcatgtaccccttgtgttgtatataaatggaaatggaggtttacttgagcgcatgaaggacacaagagttgatgttattgggcttgactggacagtggacatggctgatggaaggaagcgccttggtaatggaattagtgtacaagggaatgtggatccagcatttctgttctcaccattaccagtactgactgatgaaattcgtagggttgtgaaagcagctggtacaaaaggtcatatacttaacttgggccacggtgtacttcagaaaacacccgaagaagctgtagcacatttctttgatgtcacaaggagcttgagatatgacacccatttccaaggttctgttgctgaaggattgcagcctgttgcttgattcgtagtgttgtctgcattctacctttttaagacatactcattattgaagcctggatatgtcctgtggagatatcggcagcaaattaaatgtaattttattcattgtttatctgttagttttattcattgtttatctgttccattattcatgtgactgaagaagggatgcatgatgcatgcaacctggtttcgtaggagagccgggctacaggcacagtccgcttcagcggcgcctgtggctgttcaaatcagagctgctataattcctgtgaaaccgtccagtctcggtgccttctccgaggggagttcttctaggtgtttagttggttttactaactaaagttttgtatcgaatggttgaataataattataaggattactagttggatgcccgtacgttgctacggttccaactaatcatgcttaaacatttttgctcatgtttcttcttaatctcagtgtttccattttccatctggc

SEQ ID NO: 32653 - DNA, 4111 bp, Zea Mays
atctcctttcactagacttattaattggtgcttcaagcaatggttcaaatgggtgtccttgttcctactggagatatgactgttgtcagaagaaccgctcaatttttccttaatagctttcaagagtgcctaacagcacaaaggaaggagagagaaatggcaaccgcagaactgggtttcaaaaagcaattaactaaggaggagaagtttgaaaagaggaagcagagacttgctgcaatcggagaggatcttttggcgattgctgctgatcaaccatttcgcttccctgccacatttacatttgtggtcagagcattctcagttctagatggtactgggaaaggccttgatcctaggtttcatattacagagattgctaagccgtgagtactttttgcattactagcatctgaatacttattcaaaaacacgcaaagcttgcacatcttcacttattatgtactgtctatattttcatcttgaacttttctggtactgacttgaaatgtctgttaaatttgctagaaatgccaaggaattgctaagatttaatgacgctggtgttgaaatagttgtgaaggcaagtttcaacatttggtcaaagctgttaacctatctctatgatagcacatctcctaagggttagggcttgtttggctaggagcggattgaaggggattggaggagcctattaagcattgaacaatttacccatgcttgtttcctattctttggtcgtgataacgtttgcaaccatgaatagtacatattgcttttccaggtgtgtggagagacatgtgtattcctcctatgacgaattccttaggctccatgaaggtaagcctgtcttaatgggcttgattgttgaacctgacttagtacttttatccatgtcacggcattgaactagacagtcactcatgtccttaggatattaacggtatacatcaacaattcattctattttaattgcttgcaaaacttttttggcccttcaaatgagttccacgcatcaagaagtcaagattccaggaggcctaaaataggtaaacttgctgttatatcttttgtgctctcagtagtcgcctattacttgttttaattcgctgatccatgtgcagtgtatcaatttgtcttagtatttttattcgtggggatgcctgactcaaatgaactcatgttcaacactgagcaacctacttataattttggagcctataaaatttctaagctaaaaaaggtaataaaaaggaatgatattatagtcacatcatctgaacaacagtgaagggaagggagggatagatggtctgaatgcctataaatgtcgttcccttggtctgcttcttaaatttgaaaccaagatactatagtcaaatacttctaaacttgaagcctgtaaattggaatcaccaagttaaataagaacaggggtaactattcatagctcagatggttgtcatccaatacgtgcgctaaggcacagacaggtgaggttgcatattcaatccccaagacagtaaaccattgaggcatattaaaacacattttccatgaggtttcctaagtgatcctttaggtaaacagaaccatacctagctccatatgaaactatttcccgatttgaagtacacctaagttaaggttcatacattggagctctggcagtaaaacaatagtccttaccttgagacagcttagattagaatgaggtggatggtaatatggcatgagcaacataccacagttcatgcatggaggaaatcatttttactttctttcctagccatggtagttgtgttgctccttaccaaggcactacatggagcatcatatggttcatgatgtaaacatggttttagatctgtctatactcacactcaagaaccagccaaaatgtgatattccacaacctgagagaaatcaaaatgaaatcatgtacaacatagtacatatgatgatgtgcggtgatgcgggtgcatgtgtgttgtgtgtgtaggagaggagggcgcagcttgattcaatccatgtcaagtcagaggctgctgcgaggtttgcacatgcaagtagaatttagatggcatctaactgaataaatgatctccattatggactggttatattattttctgtgcgatcggatgggttaaagaaaagacgtgaaatggtattttccagtatggactgtataaatgtaattatattcctatgctggtcctgcttcgctttcatgtggatttatcttgcaaatggtatgtggatccgttccagaggcaatgagccttgcagccagtttgcagtataaaaaacccaattatgtccactgttggttcgacgcagcgtgtgccgaggatttctactgccaagcataagaaagtgaattgcagataaatggtctgttcgcaactggtgctctcgggcgactccatcactgagcaacccttcgccccggtggctgcggtgtcgcactggctgacacctgctcgcagttgcattacaagttttactgactatgtattttcaggtttattcaatttcagttgtaatgcttctgacagcagttgtatcagtcctcttgttcagcttccataataatgtactaaacttcagtttggtgtctatctcagtgtacctacactcagttggaaaacttcaaccacactgcaacaaggtttataaaaggtttgctatgaggaaaaacaaatttatgggctcaaacaaagtgtgatagtgaaagtcattttgcttccagcttaagaaccaagccaagaaaacagatatcaactgtgacgccacactcaaaagcttgtttggtgagagggataaggttgggatgctggagatctctaagcttttgagccgtggcttcccgaaaatctccaagcttttgtggtccatggagccagggatggctctttggtaaaagacttcgttgtggatggcctcttttatggtccatgttaagtcccaagtcccactaggtggtgtcatgtttgctaaattctcaccaaggcgaagccacggtaaccgccaccgtcatggtgcccccgacggccactgcgatgcccgtcttcctctccgcggcgccccctcctttttccacccgccgtcggcgcagccgccttcctgccatttccgcatccctttcgccgtccccttcctcttcggaggagccgctgctggtgcgcgcggcgcggggcgaggacggcctcccacgcccacccgcgtggatgatgcgacaggcagggcggtacatggcggagtaccaggcgctggccaagcgccacccctcgttccgggagcgctccgagaacacggacctcatcgtcgagatcacgctgcagccgtggcgtgccttcgcgcctgacggcgtcatcctgttctcagacatactcacgcccctaccggccatcggggtaccgttcgatatctcggactccaaggggcccgtgatccaatcgccagtgcggtccgaagggcaggtgagggagctcgtccccatcgaccttgatatgctccagttcgtcggagagtcactaaagattctgcgaaatgagattgatggaaaagctgctttgctaggatttgtgggggccccatggacaattgcaacttacattgttgaaggggggatgaccaacacatacacaaatataaagaacatgtgccatacagctcccgatgtcttgaggtgtcttctatctcatcttgcagaagcgatatctgactatatcatttaccaagttaactccggggcccagtgtatacagatatttgattcatggggtggacaacttccacctcatgtgtgggagcagtggtcaaaaccatatatcaaaaagattgtgaataggattaagaaagagtgccctcatgtaccccttgtgttgtatataaatggaaatggaggtttacttgagcgcatgaaggacacaagagttgatgttattgggcttgactggacagtggacatggctgatggaaggaagcgccttggtaatggaattagtgtacaagggaatgtggatccagcatttctgttctcaccattaccagtactgactgatgaaattcgtaggccaagttttttttatctctacttggattaata

SEQ ID NO: 32654 - DNA, 4901 bp, Zea Mays
gtagcagtagatcattaatctagtatcaatcaaaatattcgggaaggattgcttgaagtattctatggagtttatgaaaaggatcctgacaaagtgcttcaagcaatggttcaaatgggtgtccttgttcctactggagatatgactgttgtcagaagaaccgctcaatttttccttaatagctttcaagagtgcctaacagcacaaaggaaggagagagaaatggcaaccgcagaactgggtttcaaaaagcaattaactaaggaggagaagtttgaaaagaggaagcagagacttgctgcaatcggagaggatcttttggcgattgctgctgatcaaccatttcgcttccctgccacatttacatttgtggtcagagcattctcagatggtactgggaaaggccttgatcctaggtttcatattacagagattgctaagccaaatgccaaggaattgctaagatttaatgacgctggtgttgaaatagttgtgaaggtgtgtggagagacatgtgtattcctcctatgacgaattccttaggctccatgaaggtaagcctgtcttaatgggcttgattgttgaacctgacttagtacttttatccatgtcacggcattgaactagacagtcactcatgtccttaggatattaacggtatacatcaacaattcattctattttaattgcttgcaaaacttttttggcccttcaaatgagttccacgcatcaagaagtcaagattccaggaggcctaaaataggtaaacttgctgttatatcttttgtgctctcagtagtcgcctattacttgttttaattcgctgatccatgtgcagtgtatcaatttgtcttagtatttttattcgtggggatgcctgactcaaatgaactcatgttcaacactgagcaacctacttataattttggagcctataaaatttctaagctaaaaaaggtaataaaaaggaatgatattatagtcacatcatctgaacaacagtgaagggaagggagggatagatggtctgaatgcctataaatgtcgttcccttggtctgcttcttaaatttgaaaccaagatactatagtcaaatacttctaaacttgaagcctgtaaattggaatcaccaagttaaataagaacaggggtaactattcatagctcagatggttgtcatccaatacgtgcgctaaggcacagacaggtgaggttgcatattcaatccccaagacagtaaaccattgaggcatattaaaacacattttccatgaggtttcctaagtgatcctttaggtaaacagaaccatacctagctccatatgaaactatttcccgatttgaagtacacctaagttaaggttcatacattggagctctggcagtaaaacaatagtccttaccttgagacagcttagattagaatgaggtggatggtaatatggcatgagcaacataccacagttcatgcatggaggaaatcatttttactttctttcctagccatggtagttgtgttgctccttaccaaggcactacatggagcatcatatggttcatgatgtaaacatggttttagatctgtctatactcacactcaagaaccagccaaaatgtgatattccacaacctgagagaaatcaaaatgaaatcatgtacaacatagtacatatgatgatgtgcggtgatgcgggtgcatgtgtgttgtgtgtgtaggagaggagggcgcagcttgattcaatccatgtcaagtcagaggctgctgcgaggtttgcacatgcaagtagaatttagatggtcctgcttcgctttcatgtggatttatcttgcaaatggtatgtggatccgttccagaggcaatgagccttgcagccagtttgcagtataaaaaacccaattatgtccactgttggttcgacgcagcgtgtgccgaggatttctactgccaagcataagaaagtatttgaaatcaagaacttgcattcattcaatcataatgtgtttcctatcaagcataagtgaattgcagataaatggtctgttcgcaactggtgctctcgggcgactccatcactgagcaacccttcgccccggtggctgcggtgtcgcactggctgacacctgctcgcagttgcattacaagttttactgactatgtattttcaggtttattcaatttcagttgtaatgcttctgacagcagttgtatcagtcctcttgttcagcttccataataatgtactaaacttcagtttggtgtctatctcagtgtacctacactcagttggaaaacttcaaccacactgcaacaaggtttataaaaggtactgttactattgttaaaattagtcattttagctatccgcttctatttcaccgtgcttgcaggtttgctatgaggaaaaacaaatttatgggctcaaacaaagtgtgatagtgaaagtcattttgcttccagcttaagaaccaagccaagaaaacagatatcaactgtgacgccacactcaaaagcttgtttggtgagagggataaggttggtggtgtcatgtttgctaaattctcaccaaggcgaagccacggtaaccgccaccgtcatggtgcccccgacggccactgcgatgcccgtcttcctctccgcggcgccccctcctttttccacccgccgtcggcgcagccgccttcctgccatttccgcatccctttcgccgtccccttcctcttcggaggagccgctgctggtgcgcgcggcgcggggcgaggacggcctcccacgcccacccgcgtggatgatgcgacaggcagggcggtacatggcggagtaccaggcgctggccaagcgccacccctcgttccgggagcgctccgagaacacggacctcatcgtcgagatcacgctgcagccgtggcgtgccttcgcgcctgacggcgtcatcctgttctcagacatactcacgcccctaccggccatcggggtaccgttcgatatctcggactccaaggggcccgtgatccaatcgccagtgcggtccgaagggcaggtgagggagctcgtccccatcgaccttgatatgctccagttcgtcggagagtcactaaagattctgcgaaatgagattgatggaaaagctgctttgctaggatttgtgggggccccatggacaattgcaacttacattgttgaaggggggatgaccaacacatacacaaatataaagaacatgtgccatacagctcccgatgtcttgaggtgtcttctatctcatcttgcagaagcgatatctgactatatcatttaccaagttaactccggggcccagtgtatacagatatttgattcatggggtggacaacttccacctcatgtgtgggagcagtggtcaaaaccatatatcaaaaaggtgacttccttttcttgctttcatgtattaccaacttcatgattggcggtgctgctatgtatctgcactgtcttatagaacaacattgatggctcccactaaatgctctaaaggtcagtatctcctaagaaatacccttgttcttataccgaaatgattctcatatgattaattgcattacccccctacaatttctggtaccgcattgcaagaattgttatggttatgaccacaagttccttataaccacgaaagtgaaatttagagagaaaaaaccaatctctcaaaataatcagtagctggtgcttacatcagcagcatgttctcagtgcacatggatttggaattttttatactgtatgttactataatttggtttgcatatcttcaagactgcaactagcacagtgtataaaactgctttacttggtcataatggtaacttccacaagtttggtgtatttagagagagtgcccagaatttcatcttgaccttgaaaaatgtgcaaaatatcatatagcttgtagactattatttagagctcaattaaaagatttcatgcaaggttttgatttactgattctgttcattaagcttttatatttcttcgacagattgtgaataggattaagaaagagtgccctcatgtaccccttgtgttgtatataaatggaaatggaggtttacttgagcgcatgaaggacacaagagttgatgttattgggcttgactggacagtggacatggctgatggaaggaagcgccttggtaatggaattagtgtacaagggaatgtggatccagcatttctgttctcaccattaccagtactgactgatgaaattcgtagggttgtgaaagcagctggtacaaaaggtcatatacttaacttgggccacggtgtacttcagaaaacacccgaagaagctgtagcacatttctttgatgtcacaaggagcttgagatatgacacccatttccaaggttctgttgctgaaggattgcagcctgttgcttgattcgtagtgttgtctgcattctacctttttaagacatactcattattgaagcctggatatgtcctgtggagatatcggcagcaaattaaatgtaattttattcattgtttatctgttagttttattcattgtttatctgttccattattcatgtgactgaagaagggatgcatgatgcatgcaacctggtttcgtaggagagccgggctacaggcacagtccgcttcagcggcgcctgtggctgttcaaatcagagctgctataattcctgtgaaaccgtccagtctcggtgccttctccgaggggagttcttctaggtgtttagttggttttactaactaaagttttgtatcgaatggttgaataataattataaggattactagttggatgcccgtacgttgctacggttccaactaatcatgcttaaacatttttgctcatgtttcttcttaatctcagtgtttccattttccatctggc

SEQ ID NO: 32655 - DNA, 2520 bp, Zea Mays
tctagtatcaatcaaaatattcgggaaggattgcttgaagtattctatggagtttatgaaaaggatcctgacaaagtgcttcaagcaatggttcaaatgggtgtccttgttcctactggagatatgactgttgtcagaagaaccgctcaatttttccttaatagctttcaagagtgcctaacagcacaaaggaaggagagagaaatggcaaccgcagaactgggtttcaaaaagcaattaactaaggaggagaagtttgaaaagaggaagcagagacttgctgcaatcggagaggatcttttggcgattgctgctgatcaaccatttcgcttccctgccacatttacatttgtggtcagagcattctcagttctagatggtactgggaaaggccttgatcctaggtttcatattacagagattgctaagccaaatgccaaggaattgctaagatttaatgacgctggtgttgaaatagttgtgaaggcaagtttcaacatttggtgtgtggagagacatgtgtattcctcctatgacgaattccttaggctccatgaagtgtatcaatttgtcttagtatttttattcgtggggatgcctgactcaaatgaactcatgttcaacactgagcaacctacttataattttggagcctataaaatttctaagctaaaaaaggtaataaaaaggaatgatattatagtcacatcatctgaacaacagtgaagggaagggagggatagatggtctgaatgcctataaatgtcgttcccttggtctgcttcttaaatttgaaaccaagatactatagtcaaatacttctaaacttgaagcctgtaaattggaatcaccaagttaaataagaacaggggtaactattcatagctcagatggttgtcatccaatacgtgcgctaaggcacagacaggtgaggttgcatattcaatccccaagacagtaaaccattgaggcatattaaaacacattttccatgaggtttcctaagtgatcctttaggtaaacagaaccatacctagctccatatgaaactatttcccgatttgaagtacacctaagttaaggttcatacattggagctctggcagtaaaacaatagtccttaccttgagacagcttagattagaatgaggtggatggtaatatggcatgagcaacataccacagttcatgcatggaggaaatcatttttactttctttcctagccatggtagttgtgttgctccttaccaaggcactacatggagcatcatatggttcatgatgtaaacatggttttagatctgtctatactcacactcaagaaccagccaaaatgtgatattccacaacctgagagaaatcaaaatgaaatcatgtacaacatagtacatatgatgatgtgcggtgatgcgggtgcatgtgtgttgtgtgtgtaggagaggagggcgcagcttgattcaatccatgtcaagtcagaggctgctgcgaggtttgcacatgcaagtagaatttagatggtcctgcttcgctttcatgtggatttatcttgcaaatggtatgtggatccgttccagaggcaatgagccttgcagccagtttgcagtataaaaaacccaattatgtccactgttggttcgacgcagcgtgtgccgaggatttctactgccaagcataagaaagtgaattgcagataaatggtctgttcgcaactggtgctctcgggcgactccatcactgagcaacccttcgccccggtggctgcggtgtcgcactggctgacacctgctcgcagttgcattacaagttttactgactatgtattttcaggtttattcaatttcagttgtaatgcttctgacagcagttgtatcagtcctcttgttcagcttccataataatgtactaaacttcagtttggtgtctatctcagtgtacctacactcagttggaaaacttcaaccacactgcaacaaggtttataaaaggtttgctatgaggaaaaacaaatttatgggctcaaacaaagtgtgatagtgaaagtcattttgcttccagcttaagaaccaagccaagaaaacagatatcaactgtgacgccacactcaaaagcttgtttggtgagagggataaggttgggatgctggagatctctaagcttttgagccgtggcttcccgaaaatctccaagcttttgtggtccatggagccagggatggctctttggtaaaagacttcgttgtggatggcctcttttatggtccatgttaagtcccaagtcccactaggtggttaagcagaaaaatcttgtgatggcattaagactttcagactttgtttttgggtctgatgcatgtaaaaaggattcccagtgtttctgttgctcttgcgatcctgtgaggacacatatgagagaaatatttagtttgttgatggcaaatcttgtcttatgttcatgcctgtacctatctgatcaagcgttatgatatgatcccatgcgtggtactgtgttctttagagatg

SEQ ID NO: 32656 - DNA, 2880 bp, Zea Mays
tctagtatcaatcaaaatattcgggaaggattgcttgaagtattctatggagtttatgaaaaggatcctgacaaagtgcttcaagcaatggttcaaatgggtgtccttgttcctactggagatatgactgttgtcagaagaaccgctcaatttttccttaatagctttcaagagtgcctaacagcacaaaggaaggagagagaaatggcaaccgcagaactgggtttcaaaaagcaattaactaaggaggagaagtttgaaaagaggaagcagagacttgctgcaatcggagaggatcttttggcgattgctgctgatcaaccatttcgcttccctgccacatttacatttgtggtcagagcattctcagttctagatggtactgggaaaggccttgatcctaggtttcatattacagagattgctaagccaaatgccaaggaattgctaagatttaatgacgctggtgttgaaatagttgtgaaggtgtgtggagagacatgtgtattcctcctatgacgaattccttaggctccatgaaggtaagcctgtcttaatgggcttgattgttgaacctgacttagtacttttatccatgtcacggcattgaactagacagtcactcatgtccttaggatattaacggtatacatcaacaattcattctattttaattgcttgcaaaacttttttggcccttcaaatgagttccacgcatcaagaagtcaagattccaggaggcctaaaataggtaaacttgctgttatatcttttgtgctctcagtagtcgcctattacttgttttaattcgctgatccatgtgcagtgtatcaatttgtcttagtatttttattcgtggggatgcctgactcaaatgaactcatgttcaacactgagcaacctacttataattttggagcctataaaatttctaagctaaaaaaggtaataaaaaggaatgatattatagtcacatcatctgaacaacagtgaagggaagggagggatagatggtctgaatgcctataaatgtcgttcccttggtctgcttcttaaatttgaaaccaagatactatagtcaaatacttctaaacttgaagcctgtaaattggaatcaccaagttaaataagaacaggggtaactattcatagctcagatggttgtcatccaatacgtgcgctaaggcacagacaggtgaggttgcatattcaatccccaagacagtaaaccattgaggcatattaaaacacattttccatgaggtttcctaagtgatcctttaggtaaacagaaccatacctagctccatatgaaactatttcccgatttgaagtacacctaagttaaggttcatacattggagctctggcagtaaaacaatagtccttaccttgagacagcttagattagaatgaggtggatggtaatatggcatgagcaacataccacagttcatgcatggaggaaatcatttttactttctttcctagccatggtagttgtgttgctccttaccaaggcactacatggagcatcatatggttcatgatgtaaacatggttttagatctgtctatactcacactcaagaaccagccaaaatgtgatattccacaacctgagagaaatcaaaatgaaatcatgtacaacatagtacatatgatgatgtgcggtgatgcgggtgcatgtgtgttgtgtgtgtaggagaggagggcgcagcttgattcaatccatgtcaagtcagaggctgctgcgaggtttgcacatgcaagtagaatttagatggtcctgcttcgctttcatgtggatttatcttgcaaatggtatgtggatccgttccagaggcaatgagccttgcagccagtttgcagtataaaaaacccaattatgtccactgttggttcgacgcagcgtgtgccgaggatttctactgccaagcataagaaagtgaattgcagataaatggtctgttcgcaactggtgctctcgggcgactccatcactgagcaacccttcgccccggtggctgcggtgtcgcactggctgacacctgctcgcagttgcattacaagttttactgactatgtattttcaggtttattcaatttcagttgtaatgcttctgacagcagttgtatcagtcctcttgttcagcttccatgtatccctcgcatccttccttggatccacataagtgttaatgataattttgttgcatctcctctgctgatcagagctttcaaactcatgacagaataatgtactaaacttcagtttggtgtctatctcagtgtacctacactcagttggaaaacttcaaccacactgcaacaaggtttataaaaggtttgctatgaggaaaaacaaatttatgggctcaaacaaagtgtgatagtgaaagtcattttgcttccagcttaagaaccaagccaagaaaacagatatcaactgtgacgccacactcaaaagcttgtttggtgagagggataaggttgggatgctggagatctctaagcttttgagccgtggcttcccgaaaatctccaagcttttgtggtccatggagccagggatggctctttggtaaaagacttcgttgtggatggcctcttttatggtccatgttaagtcccaagtcccactaggtggttaagcagaaaaatcttgtgatggcattaagactttcagactttgtttttgggtctgatgcatgtaaaaaggattcccagtgtttctgttgctcttgcgatcctgtgaggacacatatgagagaaatatttagtttgttgatggcaaatcttgtcttatgttcatgcctgtacctatctgatcaagcgttatgatatgatcccatgcgtggtactgtgttctttagagatg

SEQ ID NO: 32657 - DNA, 2367 bp, Zea Mays
tctagtatcaatcaaaatattcgggaaggattgcttgaagtattctatggagtttatgaaaaggatcctgacaaagtgcttcaagcaatggttcaaatgggtgtccttgttcctactggagatatgactgttgtcagaagaaccgctcaatttttccttaatagctttcaagagtgcctaacagcacaaaggaaggagagagaaatggcaaccgcagaactgggtttcaaaaagcaattaactaaggaggagaagtttgaaaagaggaagcagagacttgctgcaatcggagaggatcttttggcgattgctgctgatcaaccatttcgcttccctgccacatttacatttgtggtcagagcattctcagttctagatggtactgggaaaggccttgatcctaggtttcatattacagagattgctaagccaaatgccaaggaattgctaagatttaatgacgctggtgttgaaatagttgtgaaggcaagtttcaacatttggtgtgtggagagacatgtgtattcctcctatgacgaattccttaggctccatgaagtgtatcaatttgtcttagtatttttattcgtggggatgcctgactcaaatgaactcatgttcaacactgagcaacctacttataattttggagcctataaaatttctaagctaaaaaaggtaataaaaaggaatgatattatagtcacatcatctgaacaacagtgaagggaagggagggatagatggtctgaatgcctataaatgtcgttcccttggtctgcttcttaaatttgaaaccaagatactatagtcaaatacttctaaacttgaagcctgtaaattggaatcaccaagttaaataagaacaggggtaactattcatagctcagatggttgtcatccaatacgtgcgctaaggcacagacaggtgaggttgcatattcaatccccaagacagtaaaccattgaggcatattaaaacacattttccatgaggtttcctaagtgatcctttaggtaaacagaaccatacctagctccatatgaaactatttcccgatttgaagtacacctaagttaaggttcatacattggagctctggcagtaaaacaatagtccttaccttgagacagcttagattagaatgaggtggatggtaatatggcatgagcaacataccacagttcatgcatggaggaaatcatttttactttctttcctagccatggtagttgtgttgctccttaccaaggcactacatggagcatcatatggttcatgatgtaaacatggttttagatctgtctatactcacactcaagaaccagccaaaatgtgatattccacaacctgagagaaatcaaaatgaaatcatgtacaacatagtacatatgatgatgtgcggtgatgcgggtgcatgtgtgttgtgtgtgtaggagaggagggcgcagcttgattcaatccatgtcaagtcagaggctgctgcgaggtttgcacatgcaagtagaatttagatggtttattcaatttcagttgtaatgcttctgacagcagttgtatcagtcctcttgttcagcttccatgtatccctcgcatccttccttggatccacataagtgttaatgataattttgttgcatctcctctgctgatcagagctttcaaactcatgacagaataatgtactaaacttcagtttggtgtctatctcagtgtacctacactcagttggaaaacttcaaccacactgcaacaaggtttataaaaggtactgttactattgttaaaattagtcattttagctatccgcttctatttcaccgtgcttgcaggtttgctatgaggaaaaacaaatttatgggctcaaacaaagtgtgatagtgaaagtcattttgcttccagcttaagaaccaagccaagaaaacagatatcaactgtgacgccacactcaaaagcttgtttggtgagagggataaggttgggatgctggagatctctaagcttttgagccgtggcttcccgaaaatctccaagcttttgtggtccatggagccagggatggctctttggtaaaagacttcgttgtggatggcctcttttatggtccatgttaagtcccaagtcccactaggtggttaagcagaaaaatcttgtgatggcattaagactttcagactttgtttttgggtctgatgcatgtaaaaaggattcccagtgtttctgttgctcttgcgatcctgtgaggacacatatgagagaaatatttagtttgttgatggcaaatcttgtcttatgttcatgcctgtacctatctgatcaagcgttatgatatgatcccatgcgtggtactgtgttctttagagatg

SEQ ID NO: 32658 - DNA, 1823 bp, Zea Mays
tctagtatcaatcaaaatattcgggaaggattgcttgaagtattctatggagtttatgaaaaggatcctgacaaagtgcttcaagcaatggttcaaatgggtgtccttgttcctactggagatatgactgttgtcagaagaaccgctcaatttttccttaatagctttcaagagtgcctaacagcacaaaggaaggagagagaaatggcaaccgcagaactgggtttcaaaaagcaattaactaaggaggagaagtttgaaaagaggaagcagagacttgctgcaatcggagaggatcttttggcgattgctgctgatcaaccatttcgcttccctgccacatttacatttgtggtcagagcattctcagatggtactgggaaaggccttgatcctaggtttcatattacagagattgctaagccaaatgccaaggaattgctaagatttaatgacgctggtgttgaaatagttgtgaaggtgtgtggagagacatgtgtattcctcctatgacgaattccttaggctccatgaaggtaagcctgtcttaatgggcttgattgttgaacctgacttagtacttttatccatgtcacggcattgaactagacagtcactcatgtccttaggatattaacggtatacatcaacaattcattctattttaattgcttgcaaaacttttttggcccttcaaatgagttccacgcatcaagaagtcaagattccaggaggcctaaaataggtcctgcttcgctttcatgtggatttatcttgcaaatggtatgtggatccgttccagaggcaatgagccttgcagccagtttgcagtataaaaaacccaattatgtccactgttggttcgacgcagcgtgtgccgaggatttctactgccaagcataagaaagtatttgaaatcaagaacttgcattcattcaatcataatgtgtttcctatcaagcataagtgtgtgtgttttgtttgatatctgctttaataggagattgttcttgtcaccccaaaaatgttcccattctactttcgggcaggtgaattgcagataaatggtctgttcgcaactggtgctctcgggcgactccatcactgagcaacccttcgccccggtggctgcggtgtcgcactggctgacacctgctcgcagttgcattacaagttttactgactatgtattttcagaataatgtactaaacttcagtttggtgtctatctcagtgtacctacactcagttggaaaacttcaaccacactgcaacaaggtttataaaaggtttgctatgaggaaaaacaaatttatgggctcaaacaaagtgtgatagtgaaagtcattttgcttccagcttaagaaccaagccaagaaaacagatatcaactgtgacgccacactcaaaagcttgtttggtgagagggataaggttgggatgctggagatctctaagcttttgagccgtggcttcccgaaaatctccaagcttttgtggtccatggagccagggatggctctttggtaaaagacttcgttgtggatggcctcttttatggtccatgttaagtcccaagtcccactaggtggttaagcagaaaaatcttgtgatggcattaagactttcagactttgtttttgggtctgatgcatgtaaaaaggattcccagtgtttctgttgctcttgcgatcctgtgaggacacatatgagagaaatatttagtttgttgatggcaaatcttgtcttatgttcatgcctgtacctatctgatcaagcgttatgatatgatcccatgcgtggtactgtgttctttagagatg

SEQ ID NO: 32659 - DNA, 3065 bp, Zea Mays
tctagtatcaatcaaaatattcgggaaggattgcttgaagtattctatggagtttatgaaaaggatcctgacaaagtgcttcaagcaatggttcaaatgggtgtccttgttcctactggagatatgactgttgtcagaagaaccgctcaatttttccttaatagctttcaagagtgcctaacagcacaaaggaaggagagagaaatggcaaccgcagaactgggtttcaaaaagcaattaactaaggaggagaagtttgaaaagaggaagcagagacttgctgcaatcggagaggatcttttggcgattgctgctgatcaaccatttcgcttccctgccacatttacatttgtggtcagagcattctcagatggtactgggaaaggccttgatcctaggtttcatattacagagattgctaagccaaatgccaaggaattgctaagatttaatgacgctggtgttgaaatagttgtgaagcggattgaaggggattggaggagcctattaagcattgaacaatttacccatgcttgtttcctattctttggtcgtgataacgtttgcaaccatgaatagtacatattgcttttccaggtgtgtggagagacatgtgtattcctcctatgacgaattccttaggctccatgaaggtaagcctgtcttaatgggcttgattgttgaacctgacttagtacttttatccatgtcacggcattgaactagacagtcactcatgtccttaggatattaacggtatacatcaacaattcattctattttaattgcttgcaaaacttttttggcccttcaaatgagttccacgcatcaagaagtcaagattccaggaggcctaaaataggtaaacttgctgttatatcttttgtgctctcagtagtcgcctattacttgttttaattcgctgatccatgtgcagtgtatcaatttgtcttagtatttttattcgtggggatgcctgactcaaatgaactcatgttcaacactgagcaacctacttataattttggagcctataaaatttctaagctaaaaaaggtaataaaaaggaatgatattatagtcacatcatctgaacaacagtgaagggaagggagggatagatggtctgaatgcctataaatgtcgttcccttggtctgcttcttaaatttgaaaccaagatactatagtcaaatacttctaaacttgaagcctgtaaattggaatcaccaagttaaataagaacaggggtaactattcatagctcagatggttgtcatccaatacgtgcgctaaggcacagacaggtgaggttgcatattcaatccccaagacagtaaaccattgaggcatattaaaacacattttccatgaggtttcctaagtgatcctttaggtaaacagaaccatacctagctccatatgaaactatttcccgatttgaagtacacctaagttaaggttcatacattggagctctggcagtaaaacaatagtccttaccttgagacagcttagattagaatgaggtggatggtaatatggcatgagcaacataccacagttcatgcatggaggaaatcatttttactttctttcctagccatggtagttgtgttgctccttaccaaggcactacatggagcatcatatggttcatgatgtaaacatggttttagatctgtctatactcacactcaagaaccagccaaaatgtgatattccacaacctgagagaaatcaaaatgaaatcatgtacaacatagtacatatgatgatgtgcggtgatgcgggtgcatgtgtgttgtgtgtgtaggagaggagggcgcagcttgattcaatccatgtcaagtcagaggctgctgcgaggtttgcacatgcaagtagaatttagatgaaaagacgtgaaatggtattttccagtatggactgtataaatgtaattatattcctatgctggtcctgcttcgctttcatgtggatttatcttgcaaatggtatgtggatccgttccagaggcaatgagccttgcagccagtttgcagtataaaaaacccaattatgtccactgttggttcgacgcagcgtgtgccgaggatttctactgccaagcataagaaagtatttgaaatcaagaacttgcattcattcaatcataatgtgtttcctatcaagcataagtgtgtgtgttttgtttgatatctgctttaataggagattgttcttgtcaccccaaaaatgttcccattctactttcgggcaggtgaattgcagataaatggtctgttcgcaactggtgctctcgggcgactccatcactgagcaacccttcgccccggtggctgcggtgtcgcactggctgacacctgctcgcagttgcattacaagttttactgactatgtattttcaggtttattcaatttcagttgtaatgcttctgacagcagttgtatcagtcctcttgttcagcttccattgtacctacactcagttggaaaacttcaaccacactgcaacaaggtttataaaaggtttgctatgaggaaaaacaaatttatgggctcaaacaaagtgtgatagtgaaagtcattttgcttccagcttaagaaccaagccaagaaaacagatatcaactgtgacgccacactcaaaagcttgtttggtgagagggataaggttgggatgctggagatctctaagcttttgagccgtggcttcccgaaaatctccaagcttttgtggtccatggagccagggatggctctttggtaaaagacttcgttgtggatggcctcttttatggtccatgttaagtcccaagtcccactaggtggttaagcagaaaaatcttgtgatggcattaagactttcagactttgtttttgggtctgatgcatgtaaaaaggattcccagtgtttctgttgctcttgcgatcctgtgaggacacatatgagagaaatatttagtttgttgatggcaaatcttgtcttatgttcatgcctgtacctatctgatcaagcgttatgatatgatcccatgcgtggtactgtgttctttagagatg

SEQ ID NO: 32660 - DNA, 2801 bp, Zea Mays
tctagtatcaatcaaaatattcgggaaggattgcttgaagtattctatggagtttatgaaaaggatcctgacaaagtgcttcaagcaatggttcaaatgggtgtccttgttcctactggagatatgactgttgtcagaagaaccgctcaatttttccttaatagctttcaagagtgcctaacagcacaaaggaaggagagagaaatggcaaccgcagaactgggtttcaaaaagcaattaactaaggaggagaagtttgaaaagaggaagcagagacttgctgcaatcggagaggatcttttggcgattgctgctgatcaaccatttcgcttccctgccacatttacatttgtggtcagagcattctcagatggtactgggaaaggccttgatcctaggtttcatattacagagattgctaagccaaatgccaaggaattgctaagatttaatgacgctggtgttgaaatagttgtgaaggtgtgtggagagacatgtgtattcctcctatgacgaattccttaggctccatgaaggtaagcctgtcttaatgggcttgattgttgaacctgacttagtacttttatccatgtcacggcattgaactagacagtcactcatgtccttaggatattaacggtatacatcaacaattcattctattttaattgcttgcaaaacttttttggcccttcaaatgagttccacgcatcaagaagtcaagattccaggaggcctaaaataggtaaacttgctgttatatcttttgtgctctcagtagtcgcctattacttgttttaattcgctgatccatgtgcagtgtatcaatttgtcttagtatttttattcgtggggatgcctgactcaaatgaactcatgttcaacactgagcaacctacttataattttggagcctataaaatttctaagctaaaaaaggtaataaaaaggaatgatattatagtcacatcatctgaacaacagtgaagggaagggagggatagatggtctgaatgcctataaatgtcgttcccttggtctgcttcttaaatttgaaaccaagatactatagtcaaatacttctaaacttgaagcctgtaaattggaatcaccaagttaaataagaacaggggtaactattcatagctcagatggttgtcatccaatacgtgcgctaaggcacagacaggtgaggttgcatattcaatccccaagacagtaaaccattgaggcatattaaaacacattttccatgaggtttcctaagtgatcctttaggtaaacagaaccatacctagctccatatgaaactatttcccgatttgaagtacacctaagttaaggttcatacattggagctctggcagtaaaacaatagtccttaccttgagacagcttagattagaatgaggtggatggtaatatggcatgagcaacataccacagttcatgcatggaggaaatcatttttactttctttcctagccatggtagttgtgttgctccttaccaaggcactacatggagcatcatatggttcatgatgtaaacatggttttagatctgtctatactcacactcaagaaccagccaaaatgtgatattccacaacctgagagaaatcaaaatgaaatcatgtacaacatagtacatatgatgatgtgcggtgatgcgggtgcatgtgtgttgtgtgtgtaggagaggagggcgcagcttgattcaatccatgtcaagtcagaggctgctgcgaggtttgcacatgcaagtagaatttagatgacgtgaaatggtattttccagtatggactgtataaatgtaattatattcctatgctggtcctgcttcgctttcatgtggatttatcttgcaaatggtatgtggatccgttccagaggcaatgagccttgcagccagtttgcagtataaaaaacccaattatgtccactgttggttcgacgcagcgtgtgccgaggatttctactgccaagcataagaaagtgaattgcagataaatggtctgttcgcaactggtgctctcgggcgactccatcactgagcaacccttcgccccggtggctgcggtgtcgcactggctgacacctgctcgcagttgcattacaagttttactgactatgtattttcaggtttattcaatttcagttgtaatgcttctgacagcagttgtatcagtcctcttgttcagcttccattgtacctacactcagttggaaaacttcaaccacactgcaacaaggtttataaaaggtttgctatgaggaaaaacaaatttatgggctcaaacaaagtgtgatagtgaaagtcattttgcttccagcttaagaaccaagccaagaaaacagatatcaactgtgacgccacactcaaaagcttgtttggtgagagggataaggttgggatgctggagatctctaagcttttgagccgtggcttcccgaaaatctccaagcttttgtggtccatggagccagggatggctctttggtaaaagacttcgttgtggatggcctcttttatggtccatgttaagtcccaagtcccactaggtggttaagcagaaaaatcttgtgatggcattaagactttcagactttgtttttgggtctgatgcatgtaaaaaggattcccagtgtttctgttgctcttgcgatcctgtgaggacacatatgagagaaatatttagtttgttgatggcaaatcttgtcttatgttcatgcctgtacctatctgatcaagcgttatgatatgatcccatgcgtggtactgtgttctttagagatg

SEQ ID NO: 32661 - DNA, 2865 bp, Zea Mays
tctagtatcaatcaaaatattcgggaaggattgcttgaagtattctatggagtttatgaaaaggatcctgacaaagtgcttcaagcaatggttcaaatgggtgtccttgttcctactggagatatgactgttgtcagaagaaccgctcaatttttccttaatagctttcaagagtgcctaacagcacaaaggaaggagagagaaatggcaaccgcagaactgggtttcaaaaagcaattaactaaggaggagaagtttgaaaagaggaagcagagacttgctgcaatcggagaggatcttttggcgattgctgctgatcaaccatttcgcttccctgccacatttacatttgtggtcagagcattctcagatggtactgggaaaggccttgatcctaggtttcatattacagagattgctaagccaaatgccaaggaattgctaagatttaatgacgctggtgttgaaatagttgtgaaggcaagtttcaacatttggtgtgtggagagacatgtgtattcctcctatgacgaattccttaggctccatgaagtgtatcaatttgtcttagtatttttattcgtggggatgcctgactcaaatgaactcatgttcaacactgagcaacctacttataattttggagcctataaaatttctaagctaaaaaaggtaataaaaaggaatgatattatagtcacatcatctgaacaacagtgaagggaagggagggatagatggtctgaatgcctataaatgtcgttcccttggtctgcttcttaaatttgaaaccaagatactatagtcaaatacttctaaacttgaagcctgtaaattggaatcaccaagttaaataagaacaggggtaactattcatagctcagatggttgtcatccaatacgtgcgctaaggcacagacaggtgaggttgcatattcaatccccaagacagtaaaccattgaggcatattaaaacacattttccatgaggtttcctaagtgatcctttaggtaaacagaaccatacctagctccatatgaaactatttcccgatttgaagtacacctaagttaaggttcatacattggagctctggcagtaaaacaatagtccttaccttgagacagcttagattagaatgaggtggatggtaatatggcatgagcaacataccacagttcatgcatggaggaaatcatttttactttctttcctagccatggtagttgtgttgctccttaccaaggcactacatggagcatcatatggttcatgatgtaaacatggttttagatctgtctatactcacactcaagaaccagccaaaatgtgatattccacaacctgagagaaatcaaaatgaaatcatgtacaacatagtacatatgatgatgtgcggtgatgcgggtgcatgtgtgttgtgtgtgtaggagaggagggcgcagcttgattcaatccatgtcaagtcagaggctgctgcgaggtttgcacatgcaagtagaatttagatgatctctgttaggcatctaactgaataaatgatctccattatggactggttatattattttctgtgcgatcggatgggttaaagaaaagacgtgaaatggtattttccagtatggactgtataaatgtaattatattcctatgctggtcctgcttcgctttcatgtggatttatcttgcaaatggtatgtggatccgttccagaggcaatgagccttgcagccagtttgcagtataaaaaacccaattatgtccactgttggttcgacgcagcgtgtgccgaggatttctactgccaagcataagaaagagattgttcttgtcaccccaaaaatgttcccattctactttcgggcaggtgaattgcagataaatggtctgttcgcaactggtgctctcgggcgactccatcactgagcaacccttcgccccggtggctgcggtgtcgcactggctgacacctgctcgcagttgcattacaagttttactgactatgtattttcaggtttattcaatttcagttgtaatgcttctgacagcagttgtatcagtcctcttgttcagcttccatgtatccctcgcatccttccttggatccacataagtgttaatgataattttgttgcatctcctctgctgatcagagctttcaaactcatgacagaataatgtactaaacttcagtttggtgtctatctcagtgtacctacactcagttggaaaacttcaaccacactgcaacaaggtttataaaaggtactgttactattgttaaaattagtcattttagctatccgcttctatttcaccgtgcttgcaggtttgctatgaggaaaaacaaatttatgggctcaaacaaagtgtgatagtgaaagtcattttgcttccagcttaagaaccaagccaagaaaacagatatcaactgtgacgccacactcaaaagcttgtttggtgagagggataaggttgggatgctggagatctctaagcttttgagccgtggcttcccgaaaatctccaagcttttgtggtccatggagccagggatggctctttggtaaaagacttcgttgtggatggcctcttttatggtccatgttaagtcccaagtcccactaggtggttaagcagaaaaatcttgtgatggcattaagactttcagactttgtttttgggtctgatgcatgtaaaaaggattcccagtgtttctgttgctcttgcgatcctgtgaggacacatatgagagaaatatttagtttgttgatggcaaatcttgtcttatgttcatgcctgtacctatctgatcaagcgttatgatatgatcccatgcgtggtactgtgttctttagagatg

SEQ ID NO: 32662 - DNA, 3264 bp, Zea Mays
tctagtatcaatcaaaatattcgggaaggattgcttgaagtattctatggagtttatgaaaaggatcctgacaaagtgcttcaagcaatggttcaaatgggtgtccttgttcctactggagatatgactgttgtcagaagaaccgctcaatttttccttaatagctttcaagagtgcctaacagcacaaaggaaggagagagaaatggcaaccgcagaactgggtttcaaaaagcaattaactaaggaggagaagtttgaaaagaggaagcagagacttgctgcaatcggagaggatcttttggcgattgctgctgatcaaccatttcgcttccctgccacatttacatttgtggtcagagcattctcagatggtactgggaaaggccttgatcctaggtttcatattacagagattgctaagccaaatgccaaggaattgctaagatttaatgacgctggtgttgaaatagttgtgaaggtgtgtggagagacatgtgtattcctcctatgacgaattccttaggctccatgaaggtaagcctgtcttaatgggcttgattgttgaacctgacttagtacttttatccatgtcacggcattgaactagacagtcactcatgtccttaggatattaacggtatacatcaacaattcattctattttaattgcttgcaaaacttttttggcccttcaaatgagttccacgcatcaagaagtcaagattccaggaggcctaaaataggtaaacttgctgttatatcttttgtgctctcagtagtcgcctattacttgttttaattcgctgatccatgtgcagtgtatcaatttgtcttagtatttttattcgtggggatgcctgactcaaatgaactcatgttcaacactgagcaacctacttataattttggagcctataaaatttctaagctaaaaaaggtaataaaaaggaatgatattatagtcacatcatctgaacaacagtgaagggaagggagggatagatggtctgaatgcctataaatgtcgttcccttggtctgcttcttaaatttgaaaccaagatactatagtcaaatacttctaaacttgaagcctgtaaattggaatcaccaagttaaataagaacaggggtaactattcatagctcagatggttgtcatccaatacgtgcgctaaggcacagacaggtgaggttgcatattcaatccccaagacagtaaaccattgaggcatattaaaacacattttccatgaggtttcctaagtgatcctttaggtaaacagaaccatacctagctccatatgaaactatttcccgatttgaagtacacctaagttaaggttcatacattggagctctggcagtaaaacaatagtccttaccttgagacagcttagattagaatgaggtggatggtaatatggcatgagcaacataccacagttcatgcatggaggaaatcatttttactttctttcctagccatggtagttgtgttgctccttaccaaggcactacatggagcatcatatggttcatgatgtaaacatggttttagatctgtctatactcacactcaagaaccagccaaaatgtgatattccacaacctgagagaaatcaaaatgaaatcatgtacaacatagtacatatgatgatgtgcggtgatgcgggtgcatgtgtgttgtgtgtgtaggagaggagggcgcagcttgattcaatccatgtcaagtcagaggctgctgcgaggtttgcacatgcaagtagaatttagatgacgtgaaatggtattttccagtatggactgtataaatgtaattatattcctatgctggtcctgcttcgctttcatgtggatttatcttgcaaatggtatgtggatccgttccagaggcaatgagccttgcagccagtttgcagtataaaaaacccaattatgtccactgttggttcgacgcagcgtgtgccgaggatttctactgccaagcataagaaagtatttgaaatcaagaacttgcattcattcaatcataatgtgtttcctatcaagcataagtgtgtgtgttttgtttgatatctgctttaataggagattgttcttgtcaccccaaaaatgttcccattctactttcgggcaggtgaattgcagataaatggtctgttcgcaactggtgctctcgggcgactccatcactgagcaacccttcgccccggtggctgcggtgtcgcactggctgacacctgctcgcagttgcattacaagttttactgactatgtattttcaggtttattcaatttcagttgtaatgcttctgacagcagttgtatcagtcctcttgttcagcttccataataatgtactaaacttcagtttggtgtctatctcagtgtacctacactcagttggaaaacttcaaccacactgcaacaaggtttataaaaggtttgctatgaggaaaaacaaatttatgggctcaaacaaagtgtgatagtgaaagtcattttgcttccagcttaagattgatggaaaagctgctttgctaggatttgtgggggccccatggacaattgcaacttacattgttgaaggggggatgaccaacacatacacaaatataaagaacatgtgccatacagctcccgatgtcttgaggtgtcttctatctcatcttgcagaagcgatatctgactatatcatttaccaagttaactccggggcccagtgtatacagatatttgattcatggggtggacaacttccacctcatgtgtgggagcagtggtcaaaaccatatatcaaaaagattgtgaataggattaagaaagagtgccctcatgtaccccttgtgttgtatataaatggaaatggaggtttacttgagcgcatgaaggacacaagagttgatgttattgggcttgactggacagtggacatggctgatggaaggaagcgccttggtaatggaattagtgtacaagggaatgtggatccagcatttctgttctcaccattaccagtactgactgatgaaattcgtaggttagttaagactaaaaaattcatttaatttatgttattttgagtttttggttaatgctcatgtgcaattcattaatgagataacataaaacgctgcctgagtagtatacatcttcatgttgggtatgattggttgcctgcactatgataaacctgcattacactctatgcagtgtaacccctgtatgacttcattgcaatgaggtgtgtttagttgcttg

SEQ ID NO: 32663 - DNA, 3636 bp, Zea Mays
tctagtatcaatcaaaatattcgggaaggattgcttgaagtattctatggagtttatgaaaaggatcctgacaaagtgcttcaagcaatggttcaaatgggtgtccttgttcctactggagatatgactgttgtcagaagaaccgctcaatttttccttaatagctttcaagagtgcctaacagcacaaaggaaggagagagaaatggcaaccgcagaactgggtttcaaaaagcaattaactaaggaggagaagtttgaaaagaggaagcagagacttgctgcaatcggagaggatcttttggcgattgctgctgatcaaccatttcgcttccctgccacatttacatttgtggtcagagcattctcagatggtactgggaaaggccttgatcctaggtttcatattacagagattgctaagccaaatgccaaggaattgctaagatttaatgacgctggtgttgaaatagttgtgaaggcaagtttcaacatttggtgtgtggagagacatgtgtattcctcctatgacgaattccttaggctccatgaagtgtatcaatttgtcttagtatttttattcgtggggatgcctgactcaaatgaactcatgttcaacactgagcaacctacttataattttggagcctataaaatttctaagctaaaaaaggtaataaaaaggaatgatattatagtcacatcatctgaacaacagtgaagggaagggagggatagatggtctgaatgcctataaatgtcgttcccttggtctgcttcttaaatttgaaaccaagatactatagtcaaatacttctaaacttgaagcctgtaaattggaatcaccaagttaaataagaacaggggtaactattcatagctcagatggttgtcatccaatacgtgcgctaaggcacagacaggtgaggttgcatattcaatccccaagacagtaaaccattgaggcatattaaaacacattttccatgaggtttcctaagtgatcctttaggtaaacagaaccatacctagctccatatgaaactatttcccgatttgaagtacacctaagttaaggttcatacattggagctctggcagtaaaacaatagtccttaccttgagacagcttagattagaatgaggtggatggtaatatggcatgagcaacataccacagttcatgcatggaggaaatcatttttactttctttcctagccatggtagttgtgttgctccttaccaaggcactacatggagcatcatatggttcatgatgtaaacatggttttagatctgtctatactcacactcaagaaccagccaaaatgtgatattccacaacctgagagaaatcaaaatgaaatcatgtacaacatagtacatatgatgatgtgcggtgatgcgggtgcatgtgtgttgtgtgtgtaggagaggagggcgcagcttgattcaatccatgtcaagtcagaggctgctgcgaggtttgcacatgcaagtagaatttagatgaaaagacgtgaaatggtattttccagtatggactgtataaatgtaattatattcctatgctggtacgtctgtctaaccttgctattacacttctattatggctttgtgtttacccaaagttccaaacctttcaggtcctgcttcgctttcatgtggatttatcttgcaaatggtatgtggatccgttccagaggcaatgagccttgcagccagtttgcagtataaaaaacccaattatgtccactgttggttcgacgcagcgtgtgccgaggatttctactgccaagcataagaaagtatttgaaatcaagaacttgcattcattcaatcataatgtgtttcctatcaagcataagtgtgtgtgttttgtttgatatctgctttaataggagattgttcttgtcaccccaaaaatgttcccattctactttcgggcaggtgaattgcagataaatggtctgttcgcaactggtgctctcgggcgactccatcactgagcaacccttcgccccggtggctgcggtgtcgcactggctgacacctgctcgcagttgcattacaagttttactgactatgtattttcaggtttattcaatttcagttgtaatgcttctgacagcagttgtatcagtcctcttgttcagcttccattgtacctacactcagttggaaaacttcaaccacactgcaacaaggtttataaaaggtttgctatgaggaaaaacaaatttatgggctcaaacaaagtgtgatagtgaaagtcattttgcttccagcttaagaaccaagccaagaaaacagatatcaactgtgacgccacactcaaaagcttgtttggtgagagggataaggttgggatgctggagatctctaagcttttgagccgtggcttcccgaaaatctccaagcttttgtggtccatggagccagggatggctctttggtaaaagacttcgttgtggatggcctcttttatggtccatgttaagtcccaagtcccactaggtggtgtcatgtttgctaaattctcaccaaggcgaagccacggtaaccgccaccgtcatggtgcccccgacggccactgcgatgcccgtcttcctctccgcggcgccccctcctttttccacccgccgtcggcgcagccgccttcctgccatttccgcatccctttcgccgtccccttcctcttcggaggagccgctgctggtgcgcgcggcgcggggcgaggacggcctcccacgcccacccgcgtggatgatgcgacaggcagggcggtacatggcggagtaccaggcgctggccaagcgccacccctcgttccgggagcgctccgagaacacggacctcatcgtcgagatcacgctgcagccgtggcgtgccttcgcgcctgacggcgtcatcctgttctcagacatactcacgcccctaccggccatcggggtaccgttcgatatctcggactccaaggggcccgtgatccaatcgccagtgcggtccgaagggcaggtgagggagctcgtccccatcgaccttgatatgctccagttcgtcggagagtcactaaagattctgcgaaatgagattgatggaaaagctgctttgctaggatttgtgggggccccatggacaattgcaacttacattgttgaaggggggatgaccaacacatacacaaatataaagaacatgtgccatacagctcccgatgtcttgaggtgtcttctatctcatcttgcagaagcgatatctgactatatcatttaccaagttaactccggggcccagtgtatacagatatttgattcatggggtggacaacttccacctcatgtgtgggagcagtggtcaaaaccatatatcaaaaagattgtgaataggattaagaaagagtgccctcatgtaccccttgtgttgtatataaatggaaatggaggtttacttgagcgcatgaaggacacaagagttgatgttattgggcttgactggacagtggacatggctgatggaaggaagcgccttggtaatggaattagtgtacaagggaatgtggatccagcatttctgttctcaccattaccagtactgactgatgaaattcgtaggaccttcgtacaggggaagtg

SEQ ID NO: 32664 - DNA, 4558 bp, Zea Mays
tctagtatcaatcaaaatattcgggaaggattgcttgaagtattctatggagtttatgaaaaggatcctgacaaagtgcttcaagcaatggttcaaatgggtgtccttgttcctactggagatatgactgttgtcagaagaaccgctcaatttttccttaatagctttcaagagtgcctaacagcacaaaggaaggagagagaaatggcaaccgcagaactgggtttcaaaaagcaattaactaaggaggagaagtttgaaaagaggaagcagagacttgctgcaatcggagaggatcttttggcgattgctgctgatcaaccatttcgcttccctgccacatttacatttgtggtcagagcattctcagatggtactgggaaaggccttgatcctaggtttcatattacagagattgctaagccaaatgccaaggaattgctaagatttaatgacgctggtgttgaaatagttgtgaaggtgtgtggagagacatgtgtattcctcctatgacgaattccttaggctccatgaaggtaagcctgtcttaatgggcttgattgttgaacctgacttagtacttttatccatgtcacggcattgaactagacagtcactcatgtccttaggatattaacggtatacatcaacaattcattctattttaattgcttgcaaaacttttttggcccttcaaatgagttccacgcatcaagaagtcaagattccaggaggcctaaaataggtaaacttgctgttatatcttttgtgctctcagtagtcgcctattacttgttttaattcgctgatccatgtgcagtgtatcaatttgtcttagtatttttattcgtggggatgcctgactcaaatgaactcatgttcaacactgagcaacctacttataattttggagcctataaaatttctaagctaaaaaaggtaataaaaaggaatgatattatagtcacatcatctgaacaacagtgaagggaagggagggatagatggtctgaatgcctataaatgtcgttcccttggtctgcttcttaaatttgaaaccaagatactatagtcaaatacttctaaacttgaagcctgtaaattggaatcaccaagttaaataagaacaggggtaactattcatagctcagatggttgtcatccaatacgtgcgctaaggcacagacaggtgaggttgcatattcaatccccaagacagtaaaccattgaggcatattaaaacacattttccatgaggtttcctaagtgatcctttaggtaaacagaaccatacctagctccatatgaaactatttcccgatttgaagtacacctaagttaaggttcatacattggagctctggcagtaaaacaatagtccttaccttgagacagcttagattagaatgaggtggatggtaatatggcatgagcaacataccacagttcatgcatggaggaaatcatttttactttctttcctagccatggtagttgtgttgctccttaccaaggcactacatggagcatcatatggttcatgatgtaaacatggttttagatctgtctatactcacactcaagaaccagccaaaatgtgatattccacaacctgagagaaatcaaaatgaaatcatgtacaacatagtacatatgatgatgtgcggtgatgcgggtgcatgtgtgttgtgtgtgtaggagaggagggcgcagcttgattcaatccatgtcaagtcagaggctgctgcgaggtttgcacatgcaagtagaatttagatggcatctaactgaataaatgatctccattatggactggttatattattttctgtgcgatcggatgggttaaagaaaagacgtgaaatggtattttccagtatggactgtataaatgtaattatattcctatgctggtcctgcttcgctttcatgtggatttatcttgcaaatggtatgtggatccgttccagaggcaatgagccttgcagccagtttgcagtataaaaaacccaattatgtccactgttggttcgacgcagcgtgtgccgaggatttctactgccaagcataagaaagtatttgaaatcaagaacttgcattcattcaatcataatgtgtttcctatcaagcataagtgtgtgtgttttgtttgatatctgctttaataggagattgttcttgtcaccccaaaaatgttcccattctactttcgggcaggtgaattgcagataaatggtctgttcgcaactggtgctctcgggcgactccatcactgagcaacccttcgccccggtggctgcggtgtcgcactggctgacacctgctcgcagttgcattacaagttttactgactatgtattttcaggtttattcaatttcagttgtaatgcttctgacagcagttgtatcagtcctcttgttcagcttccatgtatccctcgcatccttccttggatccacataagtgttaatgataattttgttgcatctcctctgctgatcagagctttcaaactcatgacagaataatgtactaaacttcagtttggtgtctatctcagtgtacctacactcagttggaaaacttcaaccacactgcaacaaggtttataaaaggtttgctatgaggaaaaacaaatttatgggctcaaacaaagtgtgatagtgaaagtcattttgcttccagcttaagaaccaagccaagaaaacagatatcaactgtgacgccacactcaaaagcttgtttggtgagagggataaggttgggatgctggagatctctaagcttttgagccgtggcttcccgaaaatctccaagcttttgtggtccatggagccagggatggctctttggtaaaagacttcgttgtggatggcctcttttatggtccatgttaagtcccaagtcccactaggtggtgtcatgtttgctaaattctcaccaaggcgaagccacggtaaccgccaccgtcatggtgcccccgacggccactgcgatgcccgtcttcctctccgcggcgccccctcctttttccacccgccgtcggcgcagccgccttcctgccatttccgcatccctttcgccgtccccttcctcttcggaggagccgctgctggtgcgcgcggcgcggggcgaggacggcctcccacgcccacccgcgtggatgatgcgacaggcagggcggtacatggcggagtaccaggcgctggccaagcgccacccctcgttccgggagcgctccgagaacacggacctcatcgtcgagatcacgctgcagccgtggcgtgccttcgcgcctgacggcgtcatcctgttctcagacatactcacgcccctaccggccatcggggtaccgttcgatatctcggactccaaggggcccgtgatccaatcgccagtgcggtccgaagggcaggtgagggagctcgtccccatcgaccttgatatgctccagttcgtcggagagtcactaaagattctgcgaaatgagattgatggaaaagctgctttgctaggatttgtgggggccccatggacaattgcaacttacattgttgaaggggggatgaccaacacatacacaaatataaagaacatgtgccatacagctcccgatgtcttgaggtgtcttctatctcatcttgcagaagcgatatctgactatatcatttaccaagttaactccggggcccagtgtatacagatatttgattcatggggtggacaacttccacctcatgtgtgggagcagtggtcaaaaccatatatcaaaaagattgtgaataggattaagaaagagtgccctcatgtaccccttgtgttgtatataaatggaaatggaggtttacttgagcgcatgaaggacacaagagttgatgttattgggcttgactggacagtggacatggctgatggaaggaagcgccttggtaatggaattagtgtacaagggaatgtggatccagcatttctgttctcaccattaccagtactgactgatgaaattcgtagggttgtgaaagcagctggtacaaaaggtcatatacttaacttgggccacggtgtacttcagaaaacacccgaagaagctgtagcacatttctttgatgtcacaaggagcttgagatatgacacccatttccaaggttctgttgctgaaggattgcagcctgttgcttgattcgtagtgttgtctgcattctacctttttaagacatactcattattgaagcctggatatgtcctgtggagatatcggcagcaaattaaatgagagccgggctacaggcacagtccgcttcagcggcgcctgtggctgttcaaatcagagctgctataattcctgtgaaaccgtccagtctcggtgccttctccgaggggagttcttctaggtgtttagttggttttactaactaaagttttgtatcgaatggttgaataataattataaggattactagttggatgcccgtacgttgctacggttccaactaatcatgcttaaacatttttgctcatgtttcttcttaatctcagtgtttccattttccatctggc

SEQ ID NO: 32665 - DNA, 1833 bp, Zea Mays
atgtttgctaaattctcaccaaggcgaagccacggtaaccgccaccgtcatggtgcccccgacggccactgcgatgcccgtcttcctctccgcggcgccccctcctttttccacccgccgtcggcgcagccgccttcctgccatttccgcatccctttcgccgtccccttcctcttcggaggagccgctgctggtgcgcgcggcgcggggcgaggacggcctcccacgcccacccgcgtggatgatgcgacaggcagggcggtacatggcggagtaccaggcgctggccaagcgccacccctcgttccgggagcgctccgagaacacggacctcatcgtcgagatcacgctgcagccgtggcgtgccttcgcgcctgacggcgtcatcctgttctcagacatactcacgcccctaccggccatcggggtaccgttcgatatctcggactccaaggggcccgtgatccaatcgccagtgcggtccgaagggcaggtgagggagctcgtccccatcgaccttgatatgctccagttcgtcggagagtcactaaagattctgcgaaatgagattgatggaaaagctgctttgctaggatttgtgggggccccatggacaattgcaacttacattgttgaaggggggatgaccaacacatacacaaatataaagaacatgtgccatacagctcccgatgtcttgaggtgtcttctatctcatcttgcagaagcgatatctgactatatcatttaccaagttaactccggggcccagtgtatacagatatttgattcatggggtggacaacttccacctcatgtgtgggagcagtggtcaaaaccatatatcaaaaaggtgacttccttttcttgctttcatgtattaccaacttcatgattggcggtgctgctatgtatctgcactgtcttatagaacaacattgatggctcccactaaatgctctaaaggtcagtatctcctaagaaatacccttgttcttataccgaaatgattctcatatgattaattgcattacccccctacaatttctggtaccgcattgcaagaattgttatggttatgaccacaagttccttataaccacgaaagtgaaatttagagagaaaaaaccaatctctcaaaataatcagtagctggtgcttacatcagcagcatgttctcagtgcacatggatttggaattttttatactgtatgttactataatttggtttgcatatcttcaagactgcaactagcacagtgtataaaactgctttacttggtcataatggtaacttccacaagtttggtgtatttagagagagtgcccagaatttcatcttgaccttgaaaaatgtgcaaaatatcatatagcttgtagactattatttagagctcaattaaaagatttcatgcaaggttttgatttactgattctgttcattaagcttttatatttcttcgacagattgtgaataggattaagaaagagtgccctcatgtaccccttgtgttgtatataaatggaaatggaggtttacttgagcgcatgaaggacacaagagttgatgttattgggcttgactggacagtggacatggctgatggaaggaagcgccttggtaatggaattagtgtacaagggaatgtggatccagcatttctgttctcaccattaccagtactgactgatgaaattcgtaggggtatcatcttcgtgatcgtggcactattgcagctccagaacgttatgggttttctcgtgctggtgcagtcattgctgaaccatcatcttataaagaggcttctggtatacttgagtggcagcttgct

SEQ ID NO: 32666 - DNA, 1854 bp, Zea Mays
atgtttgctaaattctcaccaaggcgaagccacggtaaccgccaccgtcatggtgcccccgacggccactgcgatgcccgtcttcctctccgcggcgccccctcctttttccacccgccgtcggcgcagccgccttcctgccatttccgcatccctttcgccgtccccttcctcttcggaggagccgctgctggtgcgcgcggcgcggggcgaggacggcctcccacgcccacccgcgtggatgatgcgacaggcagggcggtacatggcggagtaccaggcgctggccaagcgccacccctcgttccgggagcgctccgagaacacggacctcatcgtcgagatcacgctgcagccgtggcgtgccttcgcgcctgacggcgtcatcctgttctcagacatactcacgcccctaccggccatcggggtaccgttcgatatctcggactccaaggggcccgtgatccaatcgccagtgcggtccgaagggcaggtgagggagctcgtccccatcgaccttgatatgctccagttcgtcggagagtcactaaagattctgcgaaatgagattgatggaaaagctgctttgctaggatttgtgggggccccatggacaattgcaacttacattgttgaaggggggatgaccaacacatacacaaatataaagaacatgtgccatacagctcccgatgtcttgaggtgtcttctatctcatcttgcagaagcgatatctgactatatcatttaccaagttaactccggggcccagtgtatacagatatttgattcatggggtggacaacttccacctcatgtgtgggagcagtggtcaaaaccatatatcaaaaaggtgacttccttttcttgctttcatgtattaccaacttcatgattggcggtgctgctatgtatctgcactgtcttatagaacaacattgatggctcccactaaatgctctaaagattgtgaataggattaagaaagagtgccctcatgtaccccttgtgttgtatataaatggaaatggaggtttacttgagcgcatgaaggacacaagagttgatgttattgggcttgactggacagtggacatggctgatggaaggaagcgccttggtaatggaattagtgtacaagggaatgtggatccagcatttctgttctcaccattaccagtactgactgatgaaattcgtagggttgtgaaagcagctggtacaaaaggtcatatacttaacttgggccacggtgtacttcagaaaacacccgaagaagctgtagcacatttctttgatgtcacaaggagcttgagatatgacacccatttccaaggttctgttgctgaaggattgcagcctgttgcttgattcgtagtgttgtctgcattctacctttttaagacatactcattattgaagcctggatatgtcctgtggagatatcggcagcaaattaaatgtaattttattcattgtttatctgttagttttattcattgtttatctgttccattattcatgtgactgaagaagggatgcatgatgcatgcaacctggtttcgtaggagagccgggctacaggcacagtccgcttcagcggcgcctgtggctgttcaaatcagagctgctataattcctgtgaaaccgtccagtctcggtgccttctccgaggggagttcttctaggtgtttagttggttttactaactaaagttttgtatcgaatggttgaataataattataaggattactagttggatgcccgtacgttgctacggttccaactaatcatgcttaaacatttttgctcatgtttcttcttaatctcagtgtttccattttccatctggc

SEQ ID NO: 32667 - DNA, 1716 bp, Zea Mays
atgtttgctaaattctcaccaaggcgaagccacggtaaccgccaccgtcatggtgcccccgacggccactgcgatgcccgtcttcctctccgcggcgccccctcctttttccacccgccgtcggcgcagccgccttcctgccatttccgcatccctttcgccgtccccttcctcttcggaggagccgctgctggtgcgcgcggcgcggggcgaggacggcctcccacgcccacccgcgtggatgatgcgacaggcagggcggtacatggcggagtaccaggcgctggccaagcgccacccctcgttccgggagcgctccgagaacacggacctcatcgtcgagatcacgctgcagccgtggcgtgccttcgcgcctgacggcgtcatcctgttctcagacatactcacgcccctaccggccatcggggtaccgttcgatatctcggactccaaggggcccgtgatccaatcgccagtgcggtccgaagggcaggtgagggagctcgtccccatcgaccttgatatgctccagttcgtcggagagtcactaaagattctgcgaaatgaggatttgtgggggccccatggacaattgcaacttacattgttgaaggggggatgaccaacacatacacaaatataaagaacatgtgccatacagctcccgatgtcttgaggtgtcttctatctcatcttgcagaagcgatatctgactatatcatttaccaagttaactccggggcccagtgtatacagatatttgattcatggggtggacaacttccacctcatgtgtgggagcagtggtcaaaaccatatatcaaaaagattgtgaataggattaagaaagagtgccctcatgtaccccttgtgttgtatataaatggaaatggaggtttacttgagcgcatgaaggacacaagagttgatgttattgggcttgactggacagtggacatggctgatggaaggaagcgccttggtaatggaattagtgtacaagggaatgtggatccagcatttctgttctcaccattaccagtactgactgatgaaattcgtagggttgtgaaagcagctggtacaaaaggtcatatacttaacttgggccacggtgtacttcagaaaacacccgaagaagctgtagcacatttctttgatgtcacaaggagcttgagatatgacacccatttccaaggttctgttgctgaaggattgcagcctgttgcttgattcgtagtgttgtctgcattctacctttttaagacatactcattattgaagcctggatatgtcctgtggagatatcggcagcaaattaaatgtaattttattcattgtttatctgttagttttattcattgtttatctgttccattattcatgtgactgaagaagggatgcatgatgcatgcaacctggtttcgtaggagagccgggctacaggcacagtccgcttcagcggcgcctgtggctgttcaaatcagagctgctataattcctgtgaaaccgtccagtctcggtgccttctccgaggggagttcttctaggtgtttagttggttttactaactaaagttttgtatcgaatggttgaataataattataaggattactagttggatgcccgtacgttgctacggttccaactaatcatgcttaaacatttttgctcatgtttcttcttaatctcagtgtttccattttccatctggc

SEQ ID NO: 32668 - DNA, 1829 bp, Zea Mays
atgtttgctaaattctcaccaaggcgaagccacggtaaccgccaccgtcatggtgcccccgacggccactgcgatgcccgtcttcctctccgcggcgccccctcctttttccacccgccgtcggcgcagccgccttcctgccatttccgcatccctttcgccgtccccttcctcttcggaggagccgctgctggtgcgcgcggcgcggggcgaggacggcctcccacgcccacccgcgtggatgatgcgacaggcagggcggtacatggcggagtaccaggcgctggccaagcgccacccctcgttccgggagcgctccgagaacacggacctcatcgtcgagatcacgctgcagccgtggcgtgccttcgcgcctgacggcgtcatcctgttctcagacatactcacgcccctaccggccatcggggtaccgttcgatatctcggactccaaggggcccgtgatccaatcgccagtgcggtccgaagggcaggtgagggagctcgtccccatcgaccttgatatgctccagttcgtcggagagtcactaaagattctgcgaaatgaggatttgtgggggccccatggacaattgcaacttacattgttgaaggggggatgaccaacacatacacaaatataaagaacatgtgccatacagctcccgatgtcttgaggtgtcttctatctcatcttgcagaagcgatatctgactatatcatttaccaagttaactccggggcccagtgtatacagatatttgattcatggggtggacaacttccacctcatgtgtgggagcagtggtcaaaaccatatatcaaaaaggtgacttccttttcttgctttcatgtattaccaacttcatgattggcggtgctgctatgtatctgcactgtcttatagaacaacattgatggctcccactaaatgctctaaagattgtgaataggattaagaaagagtgccctcatgtaccccttgtgttgtatataaatggaaatggaggtttacttgagcgcatgaaggacacaagagttgatgttattgggcttgactggacagtggacatggctgatggaaggaagcgccttggtaatggaattagtgtacaagggaatgtggatccagcatttctgttctcaccattaccagtactgactgatgaaattcgtagggttgtgaaagcagctggtacaaaaggtcatatacttaacttgggccacggtgtacttcagaaaacacccgaagaagctgtagcacatttctttgatgtcacaaggagcttgagatatgacacccatttccaaggttctgttgctgaaggattgcagcctgttgcttgattcgtagtgttgtctgcattctacctttttaagacatactcattattgaagcctggatatgtcctgtggagatatcggcagcaaattaaatgtaattttattcattgtttatctgttagttttattcattgtttatctgttccattattcatgtgactgaagaagggatgcatgatgcatgcaacctggtttcgtaggagagccgggctacaggcacagtccgcttcagcggcgcctgtggctgttcaaatcagagctgctataattcctgtgaaaccgtccagtctcggtgccttctccgaggggagttcttctaggtgtttagttggttttactaactaaagttttgtatcgaatggttgaataataattataaggattactagttggatgcccgtacgttgctacggttccaactaatcatgcttaaacatttttgctcatgtttcttcttaatctcagtgtttccattttccatctggc

SEQ ID NO: 32669 - DNA, 3943 bp, Zea Mays
ccgcgagtgggggagcccgatgttggaccgttcgacctccatccgacgcccgcgcgcgcgccctgcttcgctcaacgcatcgtcctcggcccctgcccagtctcctctggtcggtcgtactcgtccttggcctccctccctcttagtctctctcctccgcaaacaagctcaacgaaacgcaacgcctcgctgcggaaatactcggagtaggtgcgccccgctctcgctcacgagtcctagcacagtcgcttcactgccaatccattgctctcgtatacacgaccaattgatgatggccgcggaaccctaggagcggcagcgcggctcagccttcgacatgggctccctcgaaaacggagccggagccggagccgcggcggcggcggggagctacaagcgcggcccgggcccggcgctgcgggctggcggcgcacgtaaggcgcgggcgagatccaggctcgcgcgcttcctgctgctggagaaggtggactatctccagtggatagccgccgccgctgccttcttcttcgtcgccatcgtctttgtcgcgttcctcccggggtcgggcgtcatcgagcggcccaggctgacgctcccctcgagccgcgcgggagagggacgcgtcggaggcggggttgaggaccgcagcggcctcgtccggtgggaggcgggcgcggcgttcgagttcgagccggccaggctgagggagaaatgggcgagggagcggagggaggaggccaagagcttggcggagctcgggacgcccgtaaggaggctcggggtacggaagccgcggcttgccatggtgttcggagacctgtatcccagcgcaatgcagcttcagatggttagcgtcgcctcggtgctggaggccatggggtacgaaatgaaggttttctcacttgaggatggcccatgtggtaacatctggggagccattggagtaccagtgagcatactacctgaggacgcaaacctacctatttcagtagattggttagactatgatggcatacttgtcaattctattgaggcaagaccagtattctcaagtcttctgcatgagcctttcaaatctatacctatcatttggactgtgcatgaatattctcttgcacatcgtgctaaagaatataatgtgagtggaatgattcagctcataaatgcttggaaagatgtattcagcaggacaaatgttatagttttcccaaactatatattaccggtgatgtatgctgcatttgattctggtaactatttcgtgattccaggccccccatcagaagcatttcaggttgacagctttattgctaaaagttaccacgaagacgtgaagatcagcttgggcttgaatcctaaagattttttaattgctattgttggtaattcattttcatacggtgataatttgatggaagaggcacttgtcttgcaagcattgagtcctctgttacagagatatcgctctgagaatagcgcacaatctgaactgaaagtaaagatcttcactgggaacataactgagaagcataggatggcccttgagtctgttgctctaagtgttggcttcccaagaggtgcagtggagcatgttgctgctgaagataaggacaacctccttggtacagctgaccttgttatatattattcttgtctcgaggagcaattattccccagtgtgctagtccaagccatgagtcttgagaagctggttatagccccagaccttgcaattattagaaaacatatcaatgatggagtaaacggacttctgtttccaagaaagaatattggcatgttagctcaagttcttcttcgagcagtgtcaaatagtaaagtgtctctttcagggcaaaaaattgcttcagctgggaaggctcatgccaagaatcttatggcttctgagaccattgaaggctatgctatgctattgaaaaatgttgtcaagctccccactgatgcactaagccctttaactgctgatgagatacctttagctctgaaacaagagtggaaatggcacctatttgacgacgtgaagcatttacaccgtgtgaatacgagtttgtctggctacaagatactccagaaactagagcaggagtggcatagcaaccaaatggaaaactcttctttgagtacaaaaaatatcaatgacgcattctctgcaattgcctgggaggaacagagagtaaatgaggttatggacatcaaaagaaaaatggaggaagacgagttgaaggacaggaatgaccaacctcatggaacatgggaggaggtgtacagaaatgtgaaaagggtagagaggttaaaaaatgaattgcatgaaagagatgacaaggagcttgagcggacaggtcagccactttgtatatacgaacctttctttggggaggggacctggccctttctgcaccagagctctctttatcgtggagttggtctgtcttcaaaaggtcgaagaccaggagcggacgatattgatgcttcttctcgtcttccacttctcaataatgtttactacagagatattcttggtgaatttggagctttctttgctcttgccaacagaattgacagaatacataaaaattcttggatagggtttcagtcctggagagctacagcaagaaaggcaaacttgtcaaccaatgccgaatctgcaatcttagaagccattcaatctcaaaagcatagagattccttttatttttgggttcggatggatcaagatccaagaaaccacgctaataaagatttttggtccttctgtgacgtgatcaatgctgggaactgcaggttagctgttctggaggcctttcaaaggatgtatggtgtacatcttgatcgtgacctggatactctgttacatatgcctaatgatggagacacgtggtctgtgatgcaaagttgggttttgcctacacggtcattcctagaatttgttatgttctcaagaatgtttgttgatgcactggatgcacaaatgtatgacaagcaccatcaaactgggcattgcatcttgagtctccacaaggaccagcactgctactcccgtcttctggagttgattgtgaatgtttgggcattccacagtgcacgacggatggtctatgttaatcctgcaactggtcaaatgcaggagcagcaccatctcagcggcaggagaggtcaaatgtctgtgcagtttttctcctacgccactctgaagagcatggacgaggagcttgcagaagagtttgacttggatcacccagacaggaggtggctctggccacaaactggagaggtcttctggcagggtctctatgagagggagcgtagcatgcggcagcatgagaaggagcggcggaagcagcagagcagagagaagatccagagaatcaagagtagagctcggcaaaagacgttggggaagtatataaagccaccacctgatgatacagttgtctcgaacgatacaacgactgtagatttatagcattttgaccatactttagggtgataattcttaccgtggaaaattttggttcattctttcattgttacggctaatgtcctcggtcctcactgagtacccccggcaggtgtgaatatttttggtcagttttatcgtgccctctggtgttcagggtgctttacaggcgattttgtaacatatctaggccattaagtttaaatttgggttcccgtagcgtagatgcttttgttcttttcgcttacgagcttctcaataacaggcaacagctgctccgcgtttgcagtctccttggtacaaattgagttgacttgattgtgtcagtctgtcagatatttggttgaacctgcgctattatctacgtttcggtgttgagaattttgttcaacatcctgtaacatgaaaaaccacattatatcttcgattgttttggtgtcttacacaaaatctgtcattatgaaaatc

SEQ ID NO: 32670 - DNA, 4454 bp, Zea Mays
gtcgtactcgtccttggcctccctccctcttagtctctctcctccgcaaacaagctcaacgaaacgcaacgcctcgctgcggaaatactcggagtaggtgcgccccgctctcgctcacgagtcctagcacagtcgcttcactgccaatccattgctctcgtatacacgaccaattgatgatggccgcggaaccctaggagcggcagcgcggctcagccttcgacatgggctccctcgaaaacggagccggagccggagccgcggcggcggcggggagctacaagcgcggcccgggcccggcgctgcgggctggcggcgcacgtaaggcgcgggcgagatccaggctcgcgcgcttcctgctgctggagaaggtggactatctccagtggatagccgccgccgctgccttcttcttcgtcgccatcgtctttgtcgcgttcctcccggggtcgggcgtcatcgagcggcccaggctgacgctcccctcgagccgcgcgggagagggacgcgtcggaggcggggttgaggaccgcagcggcctcgtccggtgggaggcgggcgcggcgttcgagttcgagccggccaggctgagggagaaatgggcgagggagcggagggaggaggccaagagcttggcggagctcgggacgcccgtaaggaggctcggggtacggaagccgcggcttgccatggtgttcggagacctgtatcccagcgcaatgcagcttcagatggttagcgtcgcctcggtgctggaggccatggggtacgaaatgaaggttttctcacttgaggatggcccatgtggtaacatctggggagccattggagtaccagtgagcatactacctgaggacgcaaacctacctatttcagtagattggttagactatgatggcatacttgtcaattctattgaggcaagaccagtattctcaagtcttctgcatgagcctttcaaatctatacctatcatttggactgtgcatgaatattctcttgcacatcgtgctaaagaatataatgtgagtggaatgattcagctcataaatgcttggaaagatgtattcagcaggacaaatgttatagttttcccaaactatatattaccggtgatgtatgctgcatttgattctggtaactatttcgtgattccaggccccccatcagaagcatttcaggttgacagctttattgctaaaagttaccacgaagacgtgaagatcagcttgggcttgaatcctaaagattttttaattgctattgttggtaattcattttcatacggtgataatttgatggaagaggcacttgtcttgcaagcattgagtcctctgttacagagatatcgctctgagaatagcgcacaatctgaactgaaagtaaagatcttcactgggaacataactgagaagcataggatggcccttgagtctgttgctctaagtgttggcttcccaagaggtgcagtggagcatgttgctgctgaagataaggacaacctccttggtacagctgaccttgttatatattattcttgtctcgaggagcaattattccccagtgtgctagtccaagccatgagtcttgagaagctggttatagccccagaccttgcaattattagaaaacatatcaatgatggagtaaacggacttctgtttccaagaaagaatattggcatgttagctcaagttcttcttcgagcagtgtcaaatagtaaagtgtctctttcagggcaaaaaattgcttcagctgggaaggctcatgccaagaatcttatggcttctgagaccattgaaggctatgctatgctattgaaaaatgttgtcaagctccccactgatgcactaagccctttaactgctgatgagatacctttagctctgaaacaagagtggaaatggcacctatttgacgacgtgaagcatttacaccgtgtgaatacgagtttgtctggctacaagatactccagaaactagagcaggagtggcatagcaaccaaatggaaaactcttctttgagtacaaaaaatatcaatgacgcattctctgcaattgcctgggaggaacagagagtaaatgaggttatggacatcaaaagaaaaatggaggaagacgagttgaaggacaggaatgaccaacctcatggaacatgggaggaggtgtacagaaatgtgaaaagggtagagaggttaaaaaatgaattgcatgaaagagatgacaaggagcttgagcggacaggtcagccactttgtatatacgaacctttctttggggaggggacctggccctttctgcaccagagctctctttatcgtggagttggtctgtcttcaaaaggtcgaagaccaggagcggacgatattgatgcttcttctcgtcttccacttctcaataatgtttactacagagatattcttggtgaatttggagctttctttgctcttgccaacagaattgacagaatacataaaaattcttggatagggtttcagtcctggagagctacagcaagaaaggcaaacttgtcaaccaatgccgaatctgcaatcttagaagccattcaatctcaaaagcatagagattccttttatttttgggttcggatggatcaagatccaagaaaccacgctaataaagatttttggtccttctgtgacgtgatcaatgctgggaactgcaggttagctgttctggaggcctttcaaaggatgtatggtgtacatcttgatcgtgacctggatactctgttacatatgcctaatgatggagacacgtggtctgtgatgcaaagttgggttttgcctacacggtcattcctagaatttgttatgttctcaaggtatgggttttgtttttaggaatcttactgacaatcaagcaagtgttattacatgtataactagataaaatatgtatgcactggtttattatctgatgttatatgcatatatcaaacatactgtgaatgagcacttggatatagctgatctaagcatatttatgtcagcattgctagcagtatattgctaatgataatttggggttgtgtactttgtggaaaaattacctgttaaagcacagccttgctttaattgactcggggtccaaaaaagattagttttcaactagtatctggtcatttgatcatttcgaaggattatgttgttataacaggcatccagcatcctagatgtcaacaaggttaaagtctttttggtcgctatttgcttgcttacattgttctatgttcattccttttacctgataggactgtcatatgccatagaaattcaggcttttctatatgcttcattagggctagtttgggaactccaattccccaagggatttctattttcttaaaggaaaataaactaatttcccttggaaaaatgaaaaccccttagaaaaatgaggttcccagattagcccttagtgtttacattatgctgttgattttcagaatgtttgttgatgcactggatgcacaaatgtatgacaagcaccatcaaactgggcattgcatcttgagtctccacaaggaccagcactgctactcccgtcttctggagttgattgtgaatgtttgggcattccacagtgcacgacggatggtctatgttaatcctgcaactggtcaaatgcaggagcagcaccatctcagcggcaggagaggtcaaatgtctgtgcagtttttctcctacgccactctgaagagcatggacgaggagcttgcagaagagtttgacttggatcacccagacaggaggtggctctggccacaaactggagaggtcttctggcagggtctctatgagagggagcgtagcatgcggcagcatgagaaggagcggcggaagcagcagagcagagagaagatccagagaatcaagagtagagctcggcaaaagacgttggggaagtatataaagccaccacctgatgatacagttgtctcgaacgatacaacgactgtagatttatagcattttgaccatactttagggtgataattcttaccgtggaaaattttggttcattctttcattgttacggctaatgtcctcggtcctcactgagtacccccggcaggtgtgaatatttttggtcagttttatcgtgccctctggtgttcagggtgctttacaggcgattttgtaacatatctaggccattaagtttaaatttgggttcccgtagcgtagatgcttttgttcttttcgcttacgagcttctcaataacaggcaacagctgctccgcgtttgcagtctccttggtacaaattgagttgacttgattgtgtcagtctgtcagatatttggttgaacctgcgctattatctacgtttcggtgttgagaattttgttcaacatcctgtaacatgaaaaaccacattatatcttcgattgttttggtgtcttacacaaaatctgtcattatgaaaatc

SEQ ID NO: 32671 - DNA, 3694 bp, Zea Mays
ggcctccctccctcttagtctctctcctccgcaaacaagctcaacgaaacgcaacgcctcgctgcggaaatactcggagtaggtgcgccccgctctcgctcacgagtcctagcacagtcgcttcactgccaatccattgctctcgtatacacgaccaattgatgatggccgcggaaccctaggagcggcagcgcggctcagccttcgacatgggctccctcgaaaacggagccggagccggagccgcggcggcggcggggagctacaagcgcggcccgggcccggcgctgcgggctggcggcgcacgtaaggcgcgggcgagatccaggctcgcgcgcttcctgctgctggagaaggtggactatctccagtggatagccgccgccgctgccttcttcttcgtcgccatcgtctttgtcgcgttcctcccggggtcgggcgtcatcgagcggcccaggctgacgctcccctcgagccgcgcgggagagggacgcgtcggaggcggggttgaggaccgcagcggcctcgtccggtgggaggcgggcgcggcgttcgagttcgagccggccaggctgagggagaaatgggcgagggagcggagggaggaggccaagagcttggcggagctcgggacgcccgtaaggaggctcggggtacggaagccgcggcttgccatggtgttcggagacctgtatcccagcgcaatgcagcttcagatggttagcgtcgcctcggtgctggaggccatggggtacgaaatgaaggttttctcacttgaggatggcccatgtggtaacatctggggagccattggagtaccagtgagcatactacctgaggacgcaaacctacctatttcagtagattggttagactatgatggcatacttgtcaattctattgaggcaagaccagtattctcaagatgtttgatttggaccatgtgtctgtggcttcctacagtcttctgcatgagcctttcaaatctatacctatcatttggactgtgcatgaatattctcttgcacatcgtgctaaagaatataatgtgagtggaatgattcagctcataaatgcttggaaagatgtattcagcaggacaaatgttatagttttcccaaactatatattaccggtgatgtatgctgcatttgattctggtaactatttcgtgattccaggccccccatcagaagcatttcaggttgacagctttattgctaaaagttaccacgaagacgtgaagatcagcttgggcttgaatcctaaagattttttaattgctattgttggtaattcattttcatacggtgataatttgatggaagaggcacttgtcttgcaagcattgagtcctctgttacagagatatcgctctgagaatagcgcacaatctgaactgaaagtaaagatcttcactgggaacataactgagaagcataggatggcccttgagtctgttgctctaagtgttggcttcccaagaggtgcagtggagcatgttgctgctgaagataaggacaacctccttggtacagctgaccttgttatatattattcttgtctcgaggagcaattattccccagtgtgctagtccaagccatgagtcttgagaagctggttatagccccagaccttgcaattattagaaaacatatcaatgatggagtaaacggacttctgtttccaagaaagaatattggcatgttagctcaagttcttcttcgagcagtgtcaaatagtaaagtgtctctttcagggcaaaaaattgcttcagctgggaaggctcatgccaagaatcttatggcttctgagaccattgaaggctatgctatgctattgaaaaatgttgtcaagctccccactgatgcactaagccctttaactgctgatgagatacctttagctctgaaacaagagtggaaatggcacctatttgacgacgtgaagcatttacaccgtgtgaatacgagtttgtctggctacaagatactccagaaactagagcaggagtggcatagcaaccaaatggaaaactcttctttgagtacaaaaaatatcaatgacgcattctctgcaattgcctgggaggaacagagagtaaatgaggttatggacatcaaaagaaaaatggaggaagacgagttgaaggacaggaatgaccaacctcatggaacatgggaggaggtgtacagaaatgtgaaaagggtagagaggttaaaaaatgaattgcatgaaagagatgacaaggagcttgagcggacaggtcagccactttgtatatacgaacctttctttggggaggggacctggccctttctgcaccagagctctctttatcgtggagttggtctgtcttcaaaaggtcgaagaccaggagcggacgatattgatgcttcttctcgtcttccacttctcaataatgtttactacagagatattcttggtgaatttggagctttctttgctcttgccaacagaattgacagaatacataaaaattcttggatagggtttcagtcctggagagctacagcaagaaaggcaaacttgtcaaccaatgccgaatctgcaatcttagaagccattcaatctcaaaagcatagagattccttttatttttgggttcggatggatcaagatccaagaaaccacgctaataaagatttttggtccttctgtgacgtgatcaatgctgggaactgcagaatgtttgttgatgcactggatgcacaaatgtatgacaagcaccatcaaactgggcattgcatcttgagtctccacaaggaccagcactgctactcccgtcttctggagttgattgtgaatgtttgggcattccacagtgcacgacggatggtctatgttaatcctgcaactggtcaaatgcaggagcagcaccatctcagcggcaggagaggtcaaatgtctgtgcagtttttctcctacgccactctgaagagcatggacgaggagcttgcagaagagtttgacttggatcacccagacaggaggtggctctggccacaaactggagaggtcttctggcagggtctctatgagagggagcgtagcatgcggcagcatgagaaggagcggcggaagcagcagagcagagagaagatccagagaatcaagagtagagctcggcaaaagacgttggggaagtatataaagccaccacctgatgatacagttgtctcgaacgatacaacgactgtagatttatagcattttgaccatactttagggtgataattcttaccgtggaaaattttggttcattctttcattgttacggctaatgtcctcggtcctcactgagtacccccggcaggtgtgaatatttttggtcagttttatcgtgccctctggtgttcagggtgctttacaggcgattttgtaacatatctaggccattaagtttaaatttgggttcccgtagcgtagatgcttttgttcttttcgcttacgagcttctcaataacaggcaacagctgctccgcgtttgcagtctccttggtacaaattgagttgacttgattgtgtcagtctgtcagatatttggttgaacctgcgctattatctacgtttcggtgttgagaattttgttcaacatcctgtaacatgaaaaaccacattatatcttcgattgttttggtgtcttacacaaaatctgtcattatgaaaatc

SEQ ID NO: 32672 - DNA, 3803 bp, Zea Mays
ccgcaaacaagctcaacgaaacgcaacgcctcgctgcggaaatactcggagtaggtgcgccccgctctcgctcacgagtcctagcacagtcgcttcactgccaatccattgctctcgtatacacgaccaattgatgatggccgcggaaccctaggagcggcagcgcggctcagccttcgacatgggctccctcgaaaacggagccggagccggagccgcggcggcggcggggagctacaagcgcggcccgggcccggcgctgcgggctggcggcgcacgtaaggcgcgggcgagatccaggctcgcgcgcttcctgctgctggagaaggtggactatctccagtggatagccgccgccgctgccttcttcttcgtcgccatcgtctttgtcgcgttcctcccggggtcgggcgtcatcgagcggcccaggctgacgctcccctcgagccgcgcgggagagggacgcgtcggaggcggggttgaggaccgcagcggcctcgtccggtgggaggcgggcgcggcgttcgagttcgagccggccaggctgagggagaaatgggcgagggagcggagggaggaggccaagagcttggcggagctcgggacgcccgtaaggaggctcggggtacggaagccgcggcttgccatggtgttcggagacctgtatcccagcgcaatgcagcttcagatggttagcgtcgcctcggtgctggaggccatggggtacgaaatgaaggttttctcacttgaggatggcccatgtggtaacatctggggagccattggagtaccagtgagcatactacctgaggacgcaaacctacctatttcagtagattggttagactatgatggcatacttgtcaattctattgaggcaagaccagtattctcaagtcttctgcatgagcctttcaaatctatacctatcatttggactgtgcatgaatattctcttgcacatcgtgctaaagaatataatgtgagtggaatgattcagctcataaatgcttggaaagatgtattcagcaggacaaatgttatagttttcccaaactatatattaccggtgatgtatgctgcatttgattctggtaactatttcgtgattccaggccccccatcagaagcatttcaggttgacagctttattgctaaaagttaccacgaagacgtgaagatcagcttgggcttgaatcctaaagattttttaattgctattgttggtaattcattttcatacggtgataatttgatggaagaggcacttgtcttgcaagcattgagtcctctgttacagagatatcgctctgagaatagcgcacaatctgaactgaaagtaaagatcttcactgggaacataactgagaagcataggatggcccttgaggtttatttatgtcttcatgccctgtctgatcaagtgaactgttacttacagtctgagtgctttaaattgtatctaaccgtgtattagttttctgatttctgatagtctgttgctctaagtgttggcttcccaagaggtgcagtggagcatgttgctgctgaagataaggacaacctccttggtacagctgaccttgttatatattattcttgtctcgaggagcaattattccccagtgtgctagtccaagccatgagtcttgagaagctggttatagccccagaccttgcaattattagaaaacatatcaatgatggagtaaacggacttctgtttccaagaaagaatattggcatgttagctcaagttcttcttcgagcagtgtcaaatagtaaagtgtctctttcagggcaaaaaattgcttcagctgggaaggctcatgccaagaatcttatggcttctgagaccattgaaggctatgctatgctattgaaaaatgttgtcaagctccccactgatgcactaagccctttaactgctgatgagatacctttagctctgaaacaagagtggaaatggcacctatttgacgacgtgaagcatttacaccgtgtgaatacgagtttgtctggctacaagatactccagaaactagagcaggagtggcatagcaaccaaatggaaaactcttctttgagtacaaaaaatatcaatgacgcattctctgcaattgcctgggaggaacagagagtaaatgaggttatggacatcaaaagaaaaatggaggaagacgagttgaaggacaggaatgaccaacctcatggaacatgggaggaggtgtacagaaatgtgaaaagggtagagaggttaaaaaatgaattgcatgaaagagatgacaaggagcttgagcggacagtcttcaaaaggtcgaagaccaggagcggacgatattgatgcttcttctcgtcttccacttctcaataatgtttactacagagatattcttggtgaatttggagctttctttgctcttgccaacagaattgacagaatacataaaaattcttggatagggtttcagtcctggagagctacagcaagaaaggcaaacttgtcaaccaatgccgaatctgcaatcttagaagccattcaatctcaaaagcatagagattccttttatttttgggttcggatggatcaagatccaagaaaccacgctaataaagatttttggtccttctgtgacgtgatcaatgctgggaactgcaggttagctgttctggaggcctttcaaaggatgtatggtgtacatcttgatcgtgacctggatactctgttacatatgcctaatgatggagacacgtggtctgtgatgcaaagttgggttttgcctacacggtcattcctagaatttgttatgttctcaagaatgtttgttgatgcactggatgcacaaatgtatgacaagcaccatcaaactgggcattgcatcttgagtctccacaaggaccagcactgctactcccgtcttctggagttgattgtgaatgtttgggcattccacagtgcacgacggatggtctatgttaatcctgcaactggtcaaatgcaggagcagcaccatctcagcggcaggagaggtcaaatgtctgtgcagtttttctcctacgccactctgaagagcatggacgaggagcttgcagaagagtttgacttggatcacccagacaggaggtggctctggccacaaactggagaggtcttctggcagggtctctatgagagggagcgtagcatgcggcagcatgagaaggagcggcggaagcagcagagcagagagaagatccagagaatcaagagtagagctcggcaaaagacgttggggaagtatataaagccaccacctgatgatacagttgtctcgaacgatacaacgactgtagatttatagcattttgaccatactttagggtgataattcttaccgtggaaaattttggttcattctttcattgttacggctaatgtcctcggtcctcactgagtacccccggcaggtgtgaatatttttggtcagttttatcgtgccctctggtgttcagggtgctttacaggcgattttgtaacatatctaggccattaagtttaaatttgggttcccgtagcgtagatgcttttgttcttttcgcttacgagcttctcaataacaggcaacagctgctccgcgtttgcagtctccttggtacaaattgagttgacttgattgtgtcagtctgtcagatatttggttgaacctgcgctattatctacgtttcggtgttgagaattttgttcaacatcctgtaacatgaaaaaccacattatatcttcgattgttttggtgtcttacacaaaatctgtcattatgaaaatc

SEQ ID NO: 32673 - DNA, 4298 bp, Zea Mays
ccgcaaacaagctcaacgaaacgcaacgcctcgctgcggaaatactcggagtaggtgcgccccgctctcgctcacgagtcctagcacagtcgcttcactgccaatccattgctctcgtatacacgaccaattgatgatggccgcggaaccctaggagcggcagcgcggctcagccttcgacatgggctccctcgaaaacggagccggagccggagccgcggcggcggcggggagctacaagcgcggcccgggcccggcgctgcgggctggcggcgcacgtaaggcgcgggcgagatccaggctcgcgcgcttcctgctgctggagaaggtggactatctccagtggatagccgccgccgctgccttcttcttcgtcgccatcgtctttgtcgcgttcctcccggggtcgggcgtcatcgagcggcccaggctgacgctcccctcgagccgcgcgggagagggacgcgtcggaggcggggttgaggaccgcagcggcctcgtccggtgggaggcgggcgcggcgttcgagttcgagccggccaggctgagggagaaatgggcgagggagcggagggaggaggccaagagcttggcggagctcgggacgcccgtaaggaggctcggggtacggaagccgcggcttgccatggtgttcggagacctgtatcccagcgcaatgcagcttcagatggttagcgtcgcctcggtgctggaggccatggggtacgaaatgaaggttttctcacttgaggatggcccatgtggtaacatctggggagccattggagtaccagtgagcatactacctgaggacgcaaacctacctatttcagtagattggttagactatgatggcatacttgtcaattctattgaggcaagaccagtattctcaaggccccccatcagaagcatttcaggttgacagctttattgctaaaagttaccacgaagacgtgaagatcagcttgggcttgaatcctaaagattttttaattgctattgttggtaattcattttcatacggtgataatttgatggaagaggcacttgtcttgcaagcattgagtcctctgttacagagatatcgctctgagaatagcgcacaatctgaactgaaagtaaagatcttcactgggaacataactgagaagcataggatggcccttgaggtttatttatgtcttcatgccctgtctgatcaagtgaactgttacttacagtctgagtgctttaaattgtatctaaccgtgtattagttttctgatttctgatagtctgttgctctaagtgttggcttcccaagaggtgcagtggagcatgttgctgctgaagataaggacaacctccttggtacagctgaccttgttatatattattcttgtctcgaggagcaattattccccagtgtgctagtccaagccatgagtcttgagaagctggttatagccccagaccttgcaattattagaaaacatatcaatgatggagtaaacggacttctgtttccaagaaagaatattggcatgttagctcaagttcttcttcgagcagtgtcaaatagtaaagtgtctctttcagggcaaaaaattgcttcagctgggaaggctcatgccaagaatcttatggcttctgagaccattgaaggctatgctatgctattgaaaaatgttgtcaagctccccactgatgcactaagccctttaactgctgatgagatacctttagctctgaaacaagagtggaaatggcacctatttgacgacgtgaagcatttacaccgtgtgaatacgagtttgtctggctacaagatactccagaaactagagcaggagtggcatagcaaccaaatggaaaactcttctttgagtacaaaaaatatcaatgacgcattctctgcaattgcctgggaggaacagagagtaaatgaggttatggacatcaaaagaaaaatggaggaagacgagttgaaggacaggaatgaccaacctcatggaacatgggaggaggtgtacagaaatgtgaaaagggtagagaggttaaaaaatgaattgcatgaaagagatgacaaggagcttgagcggacaggtcagccactttgtatatacgaacctttctttggggaggggacctggccctttctgcaccagagctctctttatcgtggagttggtctgtcttcaaaaggtcgaagaccaggagcggacgatattgatgcttcttctcgtcttccacttctcaataatgtttactacagagatattcttggtgaatttggagctttctttgctcttgccaacagaattgacagaatacataaaaattcttggatagggtttcagtcctggagagctacagcaagaaaggcaaacttgtcaaccaatgccgaatctgcaatcttagaagccattcaatctcaaaagcatagagattccttttatttttgggttcggatggatcaagatccaagaaaccacgctaataaagatttttggtccttctgtgacgtgatcaatgctgggaactgcaggttagctgttctggaggcctttcaaaggatgtatggtgtacatcttgatcgtgacctggatactctgttacatatgcctaatgatggagacacgtggtctgtgatgcaaagttgggttttgcctacacggtcattcctagaatttgttatgttctcaaggtatgggttttgtttttaggaatcttactgacaatcaagcaagtgttattacatgtataactagataaaatatgtatgcactggtttattatctgatgttatatgcatatatcaaacatactgtgaatgagcacttggatatagctgatctaagcatatttatgtcagcattgctagcagtatattgctaatgataatttggggttgtgtactttgtggaaaaattacctgttaaagcacagccttgctttaattgactcggggtccaaaaaagattagttttcaactagtatctggtcatttgatcatttcgaaggattatgttgttataacaggcatccagcatcctagatgtcaacaaggttaaagtctttttggtcgctatttgcttgcttacattgttctatgttcattccttttacctgataggactgtcatatgccatagaaattcaggcttttctatatgcttcattagggctagtttgggaactccaattccccaagggatttctattttcttaaaggaaaataaactaatttcccttggaaaaatgaaaaccccttagaaaaatgaggttcccagattagcccttagtgtttacattatgctgttgattttcagaatgtttgttgatgcactggatgcacaaatgtatgacaagcaccatcaaactgggcattgcatcttgagtctccacaaggaccagcactgctactcccgtcttctggagttgattgtgaatgtttgggcattccacagtgcacgacggatggtctatgttaatcctgcaactggtcaaatgcaggagcagcaccatctcagcggcaggagaggtcaaatgtctgtgcagtttttctcctacgccactctgaagagcatggacgaggagcttgcagaagagtttgacttggatcacccagacaggaggtggctctggccacaaactggagaggtcttctggcagggtctctatgagagggagcgtagcatgcggcagcatgagaaggagcggcggaagcagcagagcagagagaagatccagagaatcaagagtagagctcggcaaaagacgttggggaagtatataaagccaccacctgatgatacagttgtctcgaacgatacaacgactgtagatttatagcattttgaccatactttagggtgataattcttaccgtggaaaattttggttcattctttcattgttacggctaatgtcctcggtcctcactgagtacccccggcaggtgtgaatatttttggtcagttttatcgtgccctctggtgttcagggtgctttacaggcgattttgtaacatatctaggccattaagtttaaatttgggttcccgtagcgtagatgcttttgttcttttcgcttacgagcttctcaataacaggcaacagctgctccgcgtttgcagtctccttggtacaaattgagttgacttgattgtgtcagtctgtcagatatttggttgaacctgcgctattatctacgtttcggtgttgagaattttgttcaacatcctgtaacatgaaaaaccacattatatcttcgattgttttggtgtcttacacaaaatctgtcattatgaaaatc

SEQ ID NO: 32674 - DNA, 3707 bp, Zea Mays
ccgcaaacaagctcaacgaaacgcaacgcctcgctgcggaaatactcggagtaggtgcgccccgctctcgctcacgagtcctagcacagtcgcttcactgccaatccattgctctcgtatacacgaccaattgatgatggccgcggaaccctaggagcggcagcgcggctcagccttcgacatgggctccctcgaaaacggagccggagccggagccgcggcggcggcggggagctacaagcgcggcccgggcccggcgctgcgggctggcggcgcacgtaaggcgcgggcgagatccaggctcgcgcgcttcctgctgctggagaaggtggactatctccagtggatagccgccgccgctgccttcttcttcgtcgccatcgtctttgtcgcgttcctcccggggtcgggcgtcatcgagcggcccaggctgacgctcccctcgagccgcgcgggagagggacgcgtcggaggcggggttgaggaccgcagcggcctcgtccggtgggaggcgggcgcggcgttcgagttcgagccggccaggctgagggagaaatgggcgagggagcggagggaggaggccaagagcttggcggagctcgggacgcccgtaaggaggctcggggtacggaagccgcggcttgccatggtgttcggagacctgtatcccagcgcaatgcagcttcagatggttagcgtcgcctcggtgctggaggccatggggtacgaaatgaagtgcatgagcctcgttgttggtctctatgttctagttttctcacttgaggatggcccatgtggtaacatctggggagccattggagtaccagtgagcatactacctgaggacgcaaacctacctatttcagtagattggttagactatgatggcatacttgtcaattctattgaggcaagaccagtattctcaaggccccccatcagaagcatttcaggttgacagctttattgctaaaagttaccacgaagacgtgaagatcagcttgggcttgaatcctaaagattttttaattgctattgttggtaattcattttcatacggtgataatttgatggaagaggcacttgtcttgcaagcattgagtcctctgttacagagatatcgctctgagaatagcgcacaatctgaactgaaagtaaagatcttcactgggaacataactgagaagcataggatggcccttgaggtttatttatgtcttcatgccctgtctgatcaagtgaactgttacttacagtctgagtgctttaaattgtatctaaccgtgtattagttttctgatttctgatagtctgttgctctaagtgttggcttcccaagaggtgcagtggagcatgttgctgctgaagataaggacaacctccttggtacagctgaccttgttatatattattcttgtctcgaggagcaattattccccagtgtgctagtccaagccatgagtcttgagaagctggttatagccccagaccttgcaattattagaaaacatatcaatgatggagtaaacggacttctgtttccaagaaagaatattggcatgttagctcaagttcttcttcgagcagtgtcaaatagtaaagtgtctctttcagggcaaaaaattgcttcagctgggaaggctcatgccaagaatcttatggcttctgagaccattgaaggctatgctatgctattgaaaaatgttgtcaagctccccactgatgcactaagccctttaactgctgatgagatacctttagctctgaaacaagagtggaaatggcacctatttgacgacgtgaagcatttacaccgtgtgaatacgagtttgtctggctacaagatactccagaaactagagcaggagtggcatagcaaccaaatggaaaactcttctttgagtacaaaaaatatcaatgacgcattctctgcaattgcctgggaggaacagagagtaaatgaggttatggacatcaaaagaaaaatggaggaagacgagttgaaggacaggaatgaccaacctcatggaacatgggaggaggtgtacagaaatgtgaaaagggtagagaggttaaaaaatgaattgcatgaaagagatgacaaggagcttgagcggacaggtcagccactttgtatatacgaacctttctttggggaggggacctggccctttctgcaccagagctctctttatcgtggagttggtctgtcttcaaaaggtcgaagaccaggagcggacgatattgatgcttcttctcgtcttccacttctcaataatgtttactacagagatattcttggtgaatttggagctttctttgctcttgccaacagaattgacagaatacataaaaattcttggatagggtttcagtcctggagagctacagcaagaaaggcaaacttgtcaaccaatgccgaatctgcaatcttagaagccattcaatctcaaaagcatagagattccttttatttttgggttcggatggatcaagatccaagaaaccacgctaataaagatttttggtccttctgtgacgtgatcaatgctgggaactgcaggttagctgttctggaggcctttcaaaggatgtatggtgtacatcttgatcgtgacctggatactctgttacatatgcctaatgatggagacacgtggtctgtgatgcaaagttgggttttgcctacacggtcattcctagaatttgttatgttctcaagaatgtttgttgatgcactggatgcacaaatgtatgacaagcaccatcaaactgggcattgcatcttgagtctccacaaggaccagcactgctactcccgtcttctggagttgattgtgaatgtttgggcattccacagtgcacgacggatggtctatgttaatcctgcaactggtcaaatgcaggagcagcaccatctcagcggcaggagaggtcaaatgtctgtgcagtttttctcctacgccactctgaagagcatggacgaggagcttgcagaagagtttgacttggatcacccagacaggaggtggctctggccacaaactggagaggtcttctggcagggtctctatgagagggagcgtagcatgcggcagcatgagaaggagcggcggaagcagcagagcagagagaagatccagagaatcaagagtagagctcggcaaaagacgttggggaagtatataaagccaccacctgatgatacagttgtctcgaacgatacaacgactgtagatttatagcattttgaccatactttagggtgataattcttaccgtggaaaattttggttcattctttcattgttacggctaatgtcctcggtcctcactgagtacccccggcaggtgtgaatatttttggtcagttttatcgtgccctctggtgttcagggtgctttacaggcgattttgtaacatatctaggccattaagtttaaatttgggttcccgtagcgtagatgcttttgttcttttcgcttacgagcttctcaataacaggcaacagctgctccgcgtttgcagtctccttggtacaaattgagttgacttgattgtgtcagtctgtcagatatttggttgaacctgcgctattatctacgtttcggtgttgagaattttgttcaacatcctgtaacatgaaaaaccacattatatcttcgattgttttggtgtcttacacaaaatctgtcattatgaaaatc

SEQ ID NO: 32675 - DNA, 1816 bp, Zea Mays
cagattgttgtgaagaactggacattcatggtttctactttctagggagtaaaagatggcccatgtggtaacatctagggagccattggagtacaagtgagcatactacctgaggacgcaaacctacctatttcagtagattggttagagttttctcacttgaggatggcccatgtggtaacatctggggagccattggagtaccagtgagcatactacctgaggacgcaaacctacctatttcagtagattggttagactatgatggcatacttgtcaattctattgaggcaagaccagtattctcaaggtgatgtatgctgcatttgattctggtaactatttcgtgattccaggccccccatcagaagcatttcaggttgacagctttattgctaaaagttaccacgaagacgtgaagatcagcttgggcttgaatcctaaagattttttaattgctattgttggtaattcattttcatacggtgataatttgatggaagaggcacttgtcttgcaagcattgagtcctctgttacagagatatcgctctgagaatagcgcacaatctgaactgaaagtaaagatcttcactgggaacataactgagaagcataggatggcccttgaggtttatttatgtcttcatgccctgtctgatcaagtgaactgttacttacagtctgagtgctttaaattgtatctaaccgtgtattagttttctgatttctgatagtctgttgctctaagtgttggcttcccaagaggtgcagtggagcatgttgctgctgaagataaggacaacctccttggtacagctgaccttgttatatattattcttgtctcgaggagcaattattccccagtgtgctagtccaagccatgagtcttgagaagctggttatagccccagaccttgcaattattagaaaacatatcaatgatggagtaaacggacttctgtttccaagaaagaatattggcatgttagctcaagttcttcttcgagcagtgtcaaatagtaaagtgtctctttcagggcaaaaaattgcttcagctgggaaggctcatgccaagaatcttatggcttctgagaccattgaaggctatgctatgctattgaaaaatgttgtcaagctccccactgatgcactaagccctttaactgctgatgagatacctttagctctgaaacaagagtggaaatggcacctatttgacgacgtgaagcatttacaccgtgtgaatacgagtttgtctggctacaagatactccagaaactagagcaggagtggcatagcaaccaaatggaaaactcttctttgagtacaaaaaatatcaatgacgcattctctgcaattgcctgggaggaacagagagtaaatgaggttatggacatcaaaagaaaaatggaggaagacgagttgaaggacaggaatgaccaacctcatggaacatgggaggaggtgtacagaaatgtgaaaagggtagagaggttaaaaaatgaattgcatgaaagagatgacaaggagcttgagcggacagtcttcaaaaggtcgaagaccaggagcggacgatattgatgcttcttctcgtcttccacttctcaataatgtttactacagagatattcttggtgaatttggagctttctttgctcttgccaacagaattgacagaatacataaaaattcttggatagggtttcagtcctggagagctacagcaagaaaggaaacacgtgcattgagtgcagcgagaacaatccacattgtcttccagaacaattgacgccctaattgtactgattagcc

SEQ ID NO: 32676 - DNA, 3641 bp, Zea Mays
aggacgcaaacctacctatttcagtagattggttagagtttgtttgcattatttctgcagctatgatggcatacttgtcaattctattgaggcaagaccagtattctcaagtcttctgcatgagcctttcaaatctatacctatcatttggactgtgcatgaatattctcttgcacatcgtgctaaagaatataatgtgagtggaatgattcagctcataaatgcttggaaagatgtattcagcaggacaaatgttatagttttcccaaactatatattaccggtgatgtatgctgcatttgattctggtaactatttcgtgattccaggccccccatcagaagcatttcaggttgacagctttattgctaaaagttaccacgaagacgtgaagatcagcttgggcttgaatcctaaagattttttaattgctattgttggtaattcattttcatacggtgataatttgatggaagaggcacttgtcttgcaagcattgagtcctctgttacagagatatcgctctgagaatagcgcacaatctgaactgaaagtaaagatcttcactgggaacataactgagaagcataggatggcccttgaggtttatttatgtcttcatgccctgtctgatcaagtgaactgttacttacagtctgagtgctttaaattgtatctaaccgtgtattagttttctgatttctgatagtctgttgctctaagtgttggcttcccaagaggtgcagtggagcatgttgctgctgaagataaggacaacctccttggtacagctgaccttgttatatattattcttgtctcgaggagcaattattccccagtgtgctagtccaagccatgagtcttgagaagctggttatagccccagaccttgcaattattagaaaacatatcaatgatggagtaaacggacttctgtttccaagaaagaatattggcatgttagctcaagttcttcttcgagcagtgtcaaatagtaaagtgtctctttcagggcaaaaaattgcttcagctgggaaggctcatgccaagaatcttatggcttctgagaccattgaaggctatgctatgctattgaaaaatgttgtcaagctccccactgatgcactaagccctttaactgctgatgagatacctttagctctgaaacaagagtggaaatggcacctatttgacgacgtgaagcatttacaccgtgtgaatacgagtttgtctggctacaagatactccagaaactagagcaggagtggcatagcaaccaaatggaaaactcttctttgagtacaaaaaatatcaatgacgcattctctgcaattgcctgggaggaacagagagtaaatgaggttatggacatcaaaagaaaaatggaggaagacgagttgaaggacaggaatgaccaacctcatggaacatgggaggaggtgtacagaaatgtgaaaagggtagagaggttaaaaaatgaattgcatgaaagagatgacaaggagcttgagcggacagtcttcaaaaggtcgaagaccaggagcggacgatattgatgcttcttctcgtcttccacttctcaataatgtttactacagagatattcttggtgaatttggagctttctttgctcttgccaacagaattgacagaatacataaaaattcttggatagggtttcagtcctggagagctacagcaagaaaggcaaacttgtcaaccaatgccgaatctgcaatcttagaagccattcaatctcaaaagcatagagattccttttatttttgggttcggatggatcaagatccaagaaaccacgctaataaagatttttggtccttctgtgacgtgatcaatgctgggaactgcaggttagctgttctggaggcctttcaaaggatgtatggtgtacatcttgatcgtgacctggatactctgttacatatgcctaatgatggagacacgtggtctgtgatgcaaagttgggttttgcctacacggtcattcctagaatttgttatgttctcaaggtatgggttttgtttttaggaatcttactgacaatcaagcaagtgttattacatgtataactagataaaatatgtatgcactggtttattatctgatgttatatgcatatatcaaacatactgtgaatgagcacttggatatagctgatctaagcatatttatgtcagcattgctagcagtatattgctaatgataatttggggttgtgtactttgtggaaaaattacctgttaaagcacagccttgctttaattgactcggggtccaaaaaagattagttttcaactagtatctggtcatttgatcatttcgaaggattatgttgttataacaggcatccagcatcctagatgtcaacaaggttaaagtctttttggtcgctatttgcttgcttacattgttctatgttcattccttttacctgataggactgtcatatgccatagaaattcaggcttttctatatgcttcattagggctagtttgggaactccaattccccaagggatttctattttcttaaaggaaaataaactaatttcccttggaaaaatgaaaaccccttagaaaaatgaggttcccagattagcccttagtgtttacattatgctgttgattttcagaatgtttgttgatgcactggatgcacaaatgtatgacaagcaccatcaaactgggcattgcatcttgagtctccacaaggaccagcactgctactcccgtcttctggagttgattgtgaatgtttgggcattccacagtgcacgacggatggtctatgttaatcctgcaactggtcaaatgcaggagcagcaccatctcagcggcaggagaggtcaaatgtctgtgcagtttttctcctacgccactctgaagagcatggacgaggagcttgcagaagagtttgacttggatcacccagacaggaggtggctctggccacaaactggagaggtcttctggcagggtctctatgagagggagcgtagcatgcggcagcatgagaaggagcggcggaagcagcagagcagagagaagatccagagaatcaagagtagagctcggcaaaagacgttggggaagtatataaagccaccacctgatgatacagttgtctcgaacgatacaacgactgtagatttatagcattttgaccatactttagggtgataattcttaccgtggaaaattttggttcattctttcattgttacggctaatgtcctcggtcctcactgagtacccccggcaggtgtgaatatttttggtcagttttatcgtgccctctggtgttcagggtgctttacaggcgattttgtaacatatctaggccattaagtttaaatttgggttcccgtagcgtagatgcttttgttcttttcgcttacgagcttctcaataacaggcaacagctgctccgcgtttgcagtctccttggtacaaattgagttgacttgattgtgtcagtctgtcagatatttggttgaacctgcgctattatctacgtttcggtgttgagaattttgttcaacatcctgtaacatgaaaaaccacattatatcttcgattgttttggtgtcttacacaaaatctgtcattatgaaaatc

SEQ ID NO: 32677 - DNA, 3640 bp, Zea Mays
acgcaaacctacctatttcagtagattggttagagtttgtttgcattatttctgcagctatgatggcatacttgtcaattctattgaggcaagaccagtattctcaagtcttctgcatgagcctttcaaatctatacctatcatttggactgtgcatgaatattctcttgcacatcgtgctaaagaatataatgtgagtggaatgattcagctcataaatgcttggaaagatgtattcagcaggacaaatgttatagttttcccaaactatatattaccggtgatgtatgctgcatttgattctggtaactatttcgtgattccaggccccccatcagaagcatttcaggttgacagctttattgctaaaagttaccacgaagacgtgaagatcagcttgggcttgaatcctaaagattttttaattgctattgttggtaattcattttcatacggtgataatttgatggaagaggcacttgtcttgcaagcattgagtcctctgttacagagatatcgctctgagaatagcgcacaatctgaactgaaagtaaagatcttcactgggaacataactgagaagcataggatggcccttgagttttctgatttctgatagtctgttgctctaagtgttggcttcccaagaggtgcagtggagcatgttgctgctgaagataaggacaacctccttggtacagctgaccttgttatatattattcttgtctcgaggagcaattattccccagtgtgctagtccaagccatgagtcttgagaagctggttatagccccagaccttgcaattattagaaaacatatcaatgatggagtaaacggacttctgtttccaagaaagaatattggcatgttagctcaagttcttcttcgagcagtgtcaaatagtaaagtgtctctttcagggcaaaaaattgcttcagctgggaaggctcatgccaagaatcttatggcttctgagaccattgaaggctatgctatgctattgaaaaatgttgtcaagctccccactgatgcactaagccctttaactgctgatgagatacctttagctctgaaacaagagtggaaatggcacctatttgacgacgtgaagcatttacaccgtgtgaatacgagtttgtctggctacaagatactccagaaactagagcaggagtggcatagcaaccaaatggaaaactcttctttgagtacaaaaaatatcaatgacgcattctctgcaattgcctgggaggaacagagagtaaatgaggttatggacatcaaaagaaaaatggaggaagacgagttgaaggacaggaatgaccaacctcatggaacatgggaggaggtgtacagaaatgtgaaaagggtagagaggttaaaaaatgaattgcatgaaagagatgacaaggagcttgagcggacaggtcagccactttgtatatacgaacctttctttggggaggggacctggccctttctgcaccagagctctctttatcgtggagttggtctgtcttcaaaaggtcgaagaccaggagcggacgatattgatgcttcttctcgtcttccacttctcaataatgtttactacagagatattcttggtgaatttggagctttctttgctcttgccaacagaattgacagaatacataaaaattcttggatagggtttcagtcctggagagctacagcaagaaaggcaaacttgtcaaccaatgccgaatctgcaatcttagaagccattcaatctcaaaagcatagagattccttttatttttgggttcggatggatcaagatccaagaaaccacgctaataaagatttttggtccttctgtgacgtgatcaatgctgggaactgcaggttagctgttctggaggcctttcaaaggatgtatggtgtacatcttgatcgtgacctggatactctgttacatatgcctaatgatggagacacgtggtctgtgatgcaaagttgggttttgcctacacggtcattcctagaatttgttatgttctcaaggtatgggttttgtttttaggaatcttactgacaatcaagcaagtgttattacatgtataactagataaaatatgtatgcactggtttattatctgatgttatatgcatatatcaaacatactgtgaatgagcacttggatatagctgatctaagcatatttatgtcagcattgctagcagtatattgctaatgataatttggggttgtgtactttgtggaaaaattacctgttaaagcacagccttgctttaattgactcggggtccaaaaaagattagttttcaactagtatctggtcatttgatcatttcgaaggattatgttgttataacaggcatccagcatcctagatgtcaacaaggttaaagtctttttggtcgctatttgcttgcttacattgttctatgttcattccttttacctgataggactgtcatatgccatagaaattcaggcttttctatatgcttcattagggctagtttgggaactccaattccccaagggatttctattttcttaaaggaaaataaactaatttcccttggaaaaatgaaaaccccttagaaaaatgaggttcccagattagcccttagtgtttacattatgctgttgattttcagaatgtttgttgatgcactggatgcacaaatgtatgacaagcaccatcaaactgggcattgcatcttgagtctccacaaggaccagcactgctactcccgtcttctggagttgattgtgaatgtttgggcattccacagtgcacgacggatggtctatgttaatcctgcaactggtcaaatgcaggagcagcaccatctcagcggcaggagaggtcaaatgtctgtgcagtttttctcctacgccactctgaagagcatggacgaggagcttgcagaagagtttgacttggatcacccagacaggaggtggctctggccacaaactggagaggtcttctggcagggtctctatgagagggagcgtagcatgcggcagcatgagaaggagcggcggaagcagcagagcagagagaagatccagagaatcaagagtagagctcggcaaaagacgttggggaagtatataaagccaccacctgatgatacagttgtctcgaacgatacaacgactgtagatttatagcattttgaccatactttagggtgataattcttaccgtggaaaattttggttcattctttcattgttacggctaatgtcctcggtcctcactgagtacccccggcaggtgtgaatatttttggtcagttttatcgtgccctctggtgttcagggtgctttacaggcgattttgtaacatatctaggccattaagtttaaatttgggttcccgtagcgtagatgcttttgttcttttcgcttacgagcttctcaataacaggcaacagctgctccgcgtttgcagtctccttggtacaaattgagttgacttgattgtgtcagtctgtcagatatttggttgaacctgcgctattatctacgtttcggtgttgagaattttgttcaacatcctgtaacatgaaaaaccacattatatcttcgattgttttggtgtcttacacaaaatctgtcattatgaaaatc

SEQ ID NO: 32678 - DNA, 3084 bp, Zea Mays
cgcaaacctacctatttcagtagattggttagagttttctcacttgaggatggcccatgtggtaacatctggggagccattggagtaccagtgagcatactacctgaggacgcaaacctacctatttcagtagattggttagactatgatggcatacttgtcaattctattgaggcaagaccagtattctcaagtcttctgcatgagcctttcaaatctatacctatcatttggactgtgcatgaatattctcttgcacatcgtgctaaagaatataatgtgagtggaatgattcagctcataaatgcttggaaagatgtattcagcaggacaaatgttatagttttcccaaactatatattaccggtgatgtatgctgcatttgattctggtaactatttcgtgattccaggccccccatcagaagcatttcaggttgacagctttattgctaaaagttaccacgaagacgtgaagatcagcttgggcttgaatcctaaagattttttaattgctattgttggtaattcattttcatacggtgataatttgatggaagaggcacttgtcttgcaagcattgagtcctctgttacagagatatcgctctgagaatagcgcacaatctgaactgaaagtaaagatcttcactgggaacataactgagaagcataggatggcccttgagtctgttgctctaagtgttggcttcccaagaggtgcagtggagcatgttgctgctgaagataaggacaacctccttggtacagctgaccttgttatatattattcttgtctcgaggagcaattattccccagtgtgctagtccaagccatgagtcttgagaagctggttatagccccagaccttgcaattattagaaaacatatcaatgatggagtaaacggacttctgtttccaagaaagaatattggcatgttagctcaagttcttcttcgagcagtgtcaaatagtaaagtgtctctttcagggcaaaaaattgcttcagctgggaaggctcatgccaagaatcttatggcttctgagaccattgaaggctatgctatgctattgaaaaatgttgtcaagctccccactgatgcactaagccctttaactgctgatgagatacctttagctctgaaacaagagtggaaatggcacctatttgacgacgtgaagcatttacaccgtgtgaatacgagtttgtctggctacaagatactccagaaactagagcaggagtggcatagcaaccaaatggaaaactcttctttgagtacaaaaaatatcaatgacgcattctctgcaattgcctgggaggaacagagagtaaatgaggttatggacatcaaaagaaaaatggaggaagacgagttgaaggacaggaatgaccaacctcatggaacatgggaggaggtgtacagaaatgtgaaaagggtagagaggttaaaaaatgaattgcatgaaagagatgacaaggagcttgagcggacaggtcagccactttgtatatacgaacctttctttggggaggggacctggccctttctgcaccagagctctctttatcgtggagttggtctgtcttcaaaaggtcgaagaccaggagcggacgatattgatgcttcttctcgtcttccacttctcaataatgtttactacagagatattcttggtgaatttggagctttctttgctcttgccaacagaattgacagaatacataaaaattcttggatagggtttcagtcctggagagctacagcaagaaaggcaaacttgtcaaccaatgccgaatctgcaatcttagaagccattcaatctcaaaagcatagagattccttttatttttgggttcggatggatcaagatccaagaaaccacgctaataaagatttttggtccttctgtgacgtgatcaatgctgggaactgcaggttagctgttctggaggcctttcaaaggatgtatggtgtacatcttgatcgtgacctggatactctgttacatatgcctaatgatggagacacgtggtctgtgatgcaaagttgggttttgcctacacggtcattcctagaatttgttatgttctcaagaatgtttgttgatgcactggatgcacaaatgtatgacaagcaccatcaaactgggcattgcatcttgagtctccacaaggaccagcactgctactcccgtcttctggagttgattgtgaatgtttgggcattccacagtgcacgacggatggtctatgttaatcctgcaactggtcaaatgcaggagcagcaccatctcagcggcaggagaggtcaaatgtctgtgcagtttttctcctacgccactctgaagagcatggacgaggagcttgcagaagagtttgacttggatcacccagacaggaggtggctctggccacaaactggagaggtcttctggcagggtctctatgagagggagcgtagcatgcggcagcatgagaaggagcggcggaagcagcagagcagagagaagatccagagaatcaagagtagagctcggcaaaagacgttggggaagtatataaagccaccacctgatgatacagttgtctcgaacgatacaacgactgtagatttatagcattttgaccatactttagggtgataattcttaccgtggaaaattttggttcattctttcattgttacggctaatgtcctcggtcctcactgagtacccccggcaggtgtgaatatttttggtcagttttatcgtgccctctggtgttcagggtgctttacaggcgattttgtaacatatctaggccattaagtttaaatttgggttcccgtagcgtagatgcttttgttcttttcgcttacgagcttctcaataacaggcaacagctgctccgcgtttgcagtctccttggtacaaattgagttgacttgattgtgtcagtctgtcagatatttggttgaacctgcgctattatctacgtttcggtgttgagaattttgttcaacatcctgtaacatgaaaaaccacattatatcttcgattgttttggtgtcttacacaaaatctgtcattatgaaaatc

SEQ ID NO: 32679 - DNA, 2992 bp, Zea Mays
attggttagagtttgtttgcattatttctgcagctatgatggcatacttgtcaattctattgaggcaagaccagtattctcaagtcttctgcatgagcctttcaaatctatacctatcatttggactgtgcatgaatattctcttgcacatcgtgctaaagaatataatgtgagtggaatgattcagctcataaatgcttggaaagatgtattcagcaggacaaatgttatagttttcccaaactatatattaccggtgatgtatgctgcatttgattctggtaactatttcgtgattccaggccccccatcagaagcatttcaggttgacagctttattgctaaaagttaccacgaagacgtgaagatcagcttgggcttgaatcctaaagattttttaattgctattgttggtaattcattttcatacggtgataatttgatggaagaggcacttgtcttgcaagcattgagtcctctgttacagagatatcgctctgagaatagcgcacaatctgaactgaaagtaaagatcttcactgggaacataactgagaagcataggatggcccttgagttttctgatttctgatagtctgttgctctaagtgttggcttcccaagaggtgcagtggagcatgttgctgctgaagataaggacaacctccttggtacagctgaccttgttatatattattcttgtctcgaggagcaattattccccagtgtgctagtccaagccatgagtcttgagaagctggttatagccccagaccttgcaattattagaaaacatatcaatgatggagtaaacggacttctgtttccaagaaagaatattggcatgttagctcaagttcttcttcgagcagtgtcaaatagtaaagtgtctctttcagggcaaaaaattgcttcagctgggaaggctcatgccaagaatcttatggcttctgagaccattgaaggctatgctatgctattgaaaaatgttgtcaagctccccactgatgcactaagccctttaactgctgatgagatacctttagctctgaaacaagagtggaaatggcacctatttgacgacgtgaagcatttacaccgtgtgaatacgagtttgtctggctacaagatactccagaaactagagcaggagtggcatagcaaccaaatggaaaactcttctttgagtacaaaaaatatcaatgacgcattctctgcaattgcctgggaggaacagagagtaaatgaggttatggacatcaaaagaaaaatggaggaagacgagttgaaggacaggaatgaccaacctcatggaacatgggaggaggtgtacagaaatgtgaaaagggtagagaggttaaaaaatgaattgcatgaaagagatgacaaggagcttgagcggacaggtcagccactttgtatatacgaacctttctttggggaggggacctggccctttctgcaccagagctctctttatcgtggagttggtctgtcttcaaaaggtcgaagaccaggagcggacgatattgatgcttcttctcgtcttccacttctcaataatgtttactacagagatattcttggtgaatttggagctttctttgctcttgccaacagaattgacagaatacataaaaattcttggatagggtttcagtcctggagagctacagcaagaaaggcaaacttgtcaaccaatgccgaatctgcaatcttagaagccattcaatctcaaaagcatagagattccttttatttttgggttcggatggatcaagatccaagaaaccacgctaataaagatttttggtccttctgtgacgtgatcaatgctgggaactgcaggttagctgttctggaggcctttcaaaggatgtatggtgtacatcttgatcgtgacctggatactctgttacatatgcctaatgatggagacacgtggtctgtgatgcaaagttgggttttgcctacacggtcattcctagaatttgttatgttctcaagaatgtttgttgatgcactggatgcacaaatgtatgacaagcaccatcaaactgggcattgcatcttgagtctccacaaggaccagcactgctactcccgtcttctggagttgattgtgaatgtttgggcattccacagtgcacgacggatggtctatgttaatcctgcaactggtcaaatgcaggagcagcaccatctcagcggcaggagaggtcaaatgtctgtgcagtttttctcctacgccactctgaagagcatggacgaggagcttgcagaagagtttgacttggatcacccagacaggaggtggctctggccacaaactggagaggtcttctggcagggtctctatgagagggagcgtagcatgcggcagcatgagaaggagcggcggaagcagcagagcagagagaagatccagagaatcaagagtagagctcggcaaaagacgttggggaagtatataaagccaccacctgatgatacagttgtctcgaacgatacaacgactgtagatttatagcattttgaccatactttagggtgataattcttaccgtggaaaattttggttcattctttcattgttacggctaatgtcctcggtcctcactgagtacccccggcaggtgtgaatatttttggtcagttttatcgtgccctctggtgttcagggtgctttacaggcgattttgtaacatatctaggccattaagtttaaatttgggttcccgtagcgtagatgcttttgttcttttcgcttacgagcttctcaataacaggcaacagctgctccgcgtttgcagtctccttggtacaaattgagttgacttgattgtgtcagtctgtcagatatttggttgaacctgcgctattatctacgtttcggtgttgagaattttgttcaacatcctgtaacatgaaaaaccacattatatcttcgattgttttggtgtcttacacaaaatctgtcattatgaaaatc

SEQ ID NO: 32680 - DNA, 3861 bp, Zea Mays
gttagagtttgtttgcattatttctgcagctatgatggcatacttgtcaattctattgaggcaagaccagtattctcaagatgtttgatttggaccatgtgtctgtggcttcctacagtcttctgcatgagcctttcaaatctatacctatcatttggactgtgcatgaatattctcttgcacatcgtgctaaagaatataatgtgagtggaatgattcagctcataaatgcttggaaagatgtattcagcaggacaaatgttatagttttcccaaactatatattaccggtgatgtatgctgcatttgattctggtaactatttcgtgattccaggccccccatcagaagcatttcaggttgacagctttattgctaaaagttaccacgaagacgtgaagatcagcttgggcttgaatcctaaagattttttaattgctattgttggtaattcattttcatacggtgataatttgatggaagaggcacttgtcttgcaagcattgagtcctctgttacagagatatcgctctgagaatagcgcacaatctgaactgaaagtaaagatcttcactgggaacataactgagaagcataggatggcccttgaggtttatttatgtcttcatgccctgtctgatcaagtgaactgttacttacagtctgagtgctttaaattgtatctaaccgtgtattagttttctgatttctgatagtctgttgctctaagtgttggcttcccaagaggtgcagtggagcatgttgctgctgaagataaggacaacctccttggtacagctgaccttgttatatattattcttgtctcgaggagcaattattccccagtgtgctagtccaagccatgagtcttgagaagctggttatagccccagaccttgcaattattagaaaacatatcaatgatggagtaaacggacttctgtttccaagaaagaatattggcatgttagctcaagttcttcttcgagcagtgtcaaatagtaaagtgtctctttcagggcaaaaaattgcttcagctgggaaggctcatgccaagaatcttatggcttctgagaccattgaaggctatgctatgctattgaaaaatgttgtcaagctccccactgatgcactaagccctttaactgctgatgagatacctttagctctgaaacaagagtggaaatggcacctatttgacgacgtgaagcatttacaccgtgtgaatacgagtttgtctggctacaagatactccagaaactagagcaggagtggcatagcaaccaaatggaaaactcttctttgagtacaaaaaatatcaatgacgcattctctgcaattgcctgggaggaacagagagtaaatgaggttatggacatcaaaagaaaaatggaggaagacgaggtaaaatgcaaatgttgcatatccaataagagtttgcatagtcattcattatttctttctctttctttttctttttttaatgctttgaagtaattaacgccaacgggagttgattgttatgtagttgaaggacaggaatgaccaacctcatggaacatgggaggaggtgtacagaaatgtgaaaagggtagagaggttaaaaaatgaattgcatgaaagagatgacaaggagcttgagcggacaggtcagccactttgtatatacgaacctttctttggggaggggacctggccctttctgcaccagagctctctttatcgtggagttggtctgtcttcaaaaggtcgaagaccaggagcggacgatattgatgcttcttctcgtcttccacttctcaataatgtttactacagagatattcttggtgaatttggagctttctttgctcttgccaacagaattgacagaatacataaaaattcttggatagggtttcagtcctggagagctacagcaagaaaggcaaacttgtcaaccaatgccgaatctgcaatcttagaagccattcaatctcaaaagcatagagattccttttatttttgggttcggatggatcaagatccaagaaaccacgctaataaagatttttggtccttctgtgacgtgatcaatgctgggaactgcaggttagctgttctggaggcctttcaaaggatgtatggtgtacatcttgatcgtgacctggatactctgttacatatgcctaatgatggagacacgtggtctgtgatgcaaagttgggttttgcctacacggtcattcctagaatttgttatgttctcaaggtatgggttttgtttttaggaatcttactgacaatcaagcaagtgttattacatgtataactagataaaatatgtatgcactggtttattatctgatgttatatgcatatatcaaacatactgtgaatgagcacttggatatagctgatctaagcatatttatgtcagcattgctagcagtatattgctaatgataatttggggttgtgtactttgtggaaaaattacctgttaaagcacagccttgctttaattgactcggggtccaaaaaagattagttttcaactagtatctggtcatttgatcatttcgaaggattatgttgttataacaggcatccagcatcctagatgtcaacaaggttaaagtctttttggtcgctatttgcttgcttacattgttctatgttcattccttttacctgataggactgtcatatgccatagaaattcaggcttttctatatgcttcattagggctagtttgggaactccaattccccaagggatttctattttcttaaaggaaaataaactaatttcccttggaaaaatgaaaaccccttagaaaaatgaggttcccagattagcccttagtgtttacattatgctgttgattttcagaatgtttgttgatgcactggatgcacaaatgtatgacaagcaccatcaaactgggcattgcatcttgagtctccacaaggaccagcactgctactcccgtcttctggagttgattgtgaatgtttgggcattccacagtgcacgacggatggtctatgttaatcctgcaactggtcaaatgcaggagcagcaccatctcagcggcaggagaggtcaaatgtctgtgcagtttttctcctacgccactctgaagagcatggacgaggagcttgcagaagagtttgacttggatcacccagacaggaggtggctctggccacaaactggagaggtcttctggcagggtctctatgagagggagcgtagcatgcggcagcatgagaaggagcggcggaagcagcagagcagagagaagatccagagaatcaagagtagagctcggcaaaagacgttggggaagtatataaagccaccacctgatgatacagttgtctcgaacgatacaacgactgtagatttatagcattttgaccatactttagggtgataattcttaccgtggaaaattttggttcattctttcattgttacggctaatgtcctcggtcctcactgagtacccccggcaggtgtgaatatttttggtcagttttatcgtgccctctggtgttcagggtgctttacaggcgattttgtaacatatctaggccattaagtttaaatttgggttcccgtagcgtagatgcttttgttcttttcgcttacgagcttctcaataacaggcaacagctgctccgcgtttgcagtctccttggtacaaattgagttgacttgattgtgtcagtctgtcagatatttggttgaacctgcgctattatctacgtttcggtgttgagaattttgttcaacatcctgtaacatgaaaaaccacattatatcttcgattgttttggtgtcttacacaaaatctgtcattatgaaaatc

SEQ ID NO: 32681 - DNA, 3005 bp, Zea Mays
agagtttgtttgcattatttctgcagctatgatggcatacttgtcaattctattgaggcaagaccagtattctcaagatgtttgatttggaccatgtgtctgtggcttcctacagtcttctgcatgagcctttcaaatctatacctatcatttggactgtgcatgaatattctcttgcacatcgtgctaaagaatataatgtgagtggaatgattcagctcataaatgcttggaaagatgtattcagcaggacaaatgttatagttttcccaaactatatattaccggtgatgtatgctgcatttgattctggtaactatttcgtgattccaggccccccatcagaagcatttcaggttgacagctttattgctaaaagttaccacgaagacgtgaagatcagcttgggcttgaatcctaaagattttttaattgctattgttggtaattcattttcatacggtgataatttgatggaagaggcacttgtcttgcaagcattgagtcctctgttacagagatatcgctctgagaatagcgcacaatctgaactgaaagtaaagatcttcactgggaacataactgagaagcataggatggcccttgagtctgttgctctaagtgttggcttcccaagaggtgcagtggagcatgttgctgctgaagataaggacaacctccttggtacagctgaccttgttatatattattcttgtctcgaggagcaattattccccagtgtgctagtccaagccatgagtcttgagaagctggttatagccccagaccttgcaattattagaaaacatatcaatgatggagtaaacggacttctgtttccaagaaagaatattggcatgttagctcaagttcttcttcgagcagtgtcaaatagtaaagtgtctctttcagggcaaaaaattgcttcagctgggaaggctcatgccaagaatcttatggcttctgagaccattgaaggctatgctatgctattgaaaaatgttgtcaagctccccactgatgcactaagccctttaactgctgatgagatacctttagctctgaaacaagagtggaaatggcacctatttgacgacgtgaagcatttacaccgtgtgaatacgagtttgtctggctacaagatactccagaaactagagcaggagtggcatagcaaccaaatggaaaactcttctttgagtacaaaaaatatcaatgacgcattctctgcaattgcctgggaggaacagagagtaaatgaggttatggacatcaaaagaaaaatggaggaagacgagttgaaggacaggaatgaccaacctcatggaacatgggaggaggtgtacagaaatgtgaaaagggtagagaggttaaaaaatgaattgcatgaaagagatgacaaggagcttgagcggacaggtcagccactttgtatatacgaacctttctttggggaggggacctggccctttctgcaccagagctctctttatcgtggagttggtctgtcttcaaaaggtcgaagaccaggagcggacgatattgatgcttcttctcgtcttccacttctcaataatgtttactacagagatattcttggtgaatttggagctttctttgctcttgccaacagaattgacagaatacataaaaattcttggatagggtttcagtcctggagagctacagcaagaaaggcaaacttgtcaaccaatgccgaatctgcaatcttagaagccattcaatctcaaaagcatagagattccttttatttttgggttcggatggatcaagatccaagaaaccacgctaataaagatttttggtccttctgtgacgtgatcaatgctgggaactgcaggttagctgttctggaggcctttcaaaggatgtatggtgtacatcttgatcgtgacctggatactctgttacatatgcctaatgatggagacacgtggtctgtgatgcaaagttgggttttgcctacacggtcattcctagaatttgttatgttctcaagaatgtttgttgatgcactggatgcacaaatgtatgacaagcaccatcaaactgggcattgcatcttgagtctccacaaggaccagcactgctactcccgtcttctggagttgattgtgaatgtttgggcattccacagtgcacgacggatggtctatgttaatcctgcaactggtcaaatgcaggagcagcaccatctcagcggcaggagaggtcaaatgtctgtgcagtttttctcctacgccactctgaagagcatggacgaggagcttgcagaagagtttgacttggatcacccagacaggaggtggctctggccacaaactggagaggtcttctggcagggtctctatgagagggagcgtagcatgcggcagcatgagaaggagcggcggaagcagcagagcagagagaagatccagagaatcaagagtagagctcggcaaaagacgttggggaagtatataaagccaccacctgatgatacagttgtctcgaacgatacaacgactgtagatttatagcattttgaccatactttagggtgataattcttaccgtggaaaattttggttcattctttcattgttacggctaatgtcctcggtcctcactgagtacccccggcaggtgtgaatatttttggtcagttttatcgtgccctctggtgttcagggtgctttacaggcgattttgtaacatatctaggccattaagtttaaatttgggttcccgtagcgtagatgcttttgttcttttcgcttacgagcttctcaataacaggcaacagctgctccgcgtttgcagtctccttggtacaaattgagttgacttgattgtgtcagtctgtcagatatttggttgaacctgcgctattatctacgtttcggtgttgagaattttgttcaacatcctgtaacatgaaaaaccacattatatcttcgattgttttggtgtcttacacaaaatctgtcattatgaaaatc

SEQ ID NO: 32682 - DNA, 1401 bp, Zea Mays
ctcactttgaccaagtatagaaaaaatgtatcatctaaaatatcaaatacatgcactaccaaaatatatttcatgatgtcgctggtgaatctaatttgatgttgtacatgtttgtgtattttttctaaaaactcagtcgttaggggaaagatcgccccaacggttattatattaagaagaagctcaatcggagccctgactgagaaaggctctccaataccatctcgcatgtccataaaactgtcatattgggagaggttagctgttctggaggcctttcaaaggatgtatggtgtacatcttgatcgtgacctggatactctgttacatatgcctaatgatggagacacgtggtctgtgatgcaaagttgggttttgcctacacggtcattcctagaatttgttatgttctcaagaatgtttgttgatgcactggatgcacaaatgtatgacaagcaccatcaaactgggcattgcatcttgagtctccacaaggaccagcactgctactcccgtcttctggagttgattgtgaatgtttgggcattccacagtgcacgacggatggtctatgttaatcctgcaactggtcaaatgcaggagcagcaccatctcagcggcaggagaggtcaaatgtctgtgcagtttttctcctacgccactctgaagagcatggacgaggagcttgcagaagagtttgacttggatcacccagacaggaggtggctctggccacaaactggagaggtcttctggcagggtctctatgagagggagcgtagcatgcggcagcatgagaaggagcggcggaagcagcagagcagagagaagatccagagaatcaagagtagagctcggcaaaagacgttggggaagtatataaagccaccacctgatgatacagttgtctcgaacgatacaacgactgtagatttatagcattttgaccatactttagggtgataattcttaccgtggaaaattttggttcattctttcattgttacggctaatgtcctcggtcctcactgagtacccccggcaggtgtgaatatttttggtcagttttatcgtgccctctggtgttcagggtgctttacaggcgattttgtaacatatctaggccattaagtttaaatttgggttcccgtagcgtagatgcttttgttcttttcgcttacgagcttctcaataacaggcaacagctgctccgcgtttgcagtctccttggtacaaattgagttgacttgattgtgtcagtctgtcagatatttggttgaacctgcgctattatctacgtttcggtgttgagaattttgttcaacatcctgtaacatgaaaaaccacattatatcttcgattgttttggtgtcttacacaaaatctgtcattatgaaaatc

SEQ ID NO: 32683 - DNA, 3147 bp, Zea Mays
cttgcctccctcgtcgtctccgttacaacgcagacactgccgccgctccgcgacagtaactctgctctctctctctctcgcatggcgtactcctcgagccgcgggacgaaaccctaatggagaaccggcgccgccgccacgcccctgcgccgtagactcccctcgccgcagtgagccccgttgcaagatttagctccgcgtcgcacagcttcttgcaggatagcgccagcgcttgccgatccggtgggaaaaaaaagtgggagcacggagcggcctcgcctcggcgggggaggcgcccgccatggggagcgacctcaaggagatgaagtacaggcggaggatcggggtggaggagcggccgcaatgcagcgacccgaggggcggcgcggactgggccgcgctgcagcaggaccccgtcgagctgctgcgcaagctggacgagctgagggaccagatcacgcgctcctgcaacgtcgtcgtcggccagccgcgggagcaccgcagggtcagccgccgtgcggtctccatgctccccgagcatctcgagccaccgcctctgccagggtaccaccgctcccgctacggtgggcggtatgggcacggcttgccgccaccaagcccatacgcaccgccacgccctgaacatggggaaaggtatgcgaggcagtctagtgggcactaccgccagtaccctcccaggcactgcgagaacggtgggatggggcctgggacctaccatcaccatgggtgtgcctgtccgcactgtctgcatgggcagaggactttcccgcaggaggagaacatcccaatggcgagatacttcgccgggcagcacgaatcataccggttggagaggtcgccttctgtttcatccgattatgatcgtgggtctgtggcgtcatcactttactctcatcggtctgtatcgaagatgagggcagagtacttcaggaagaaggcagaacatatctgccgtccagtggatggtgccgcacctttctctgtatgcagttcatgttataaactactgctgatgcctatggaaaaatgcgtagggaggaagcagaatcggtttcaatgtgggtcttgttgtcagataattagtttgaagcatcaggaagaaaatggtatcccctttgcacttgcaccatcatcatccttacatgcgcctgaaatggagcaaagcacaagtgaccagatgaggcaagattctgtccatcagcgccatgaggatttcaattttatgttcaacaattcaaatgatcattgcgatatgcaaaacaacatggatttcaccgatgataattcacttccttcgaccgcgagtaatgacaggattgagattgacaaagagtgtgggtcaactagaagcattcagtcaaaagctgagggtctctctttctctccaagtaggtctgtagacattggtagcccaaaggatatattgtgcgagagggataaagacagcaatgtggagccttcctcagatggtccacttagtccacgatctccaactttagaggacaaacttgttgacccgttgtgtgcccaggaaaaaggtaacgatgaggacgatcaaggcacggcttacagatcgaacctaacatgcaaaggagaatatgatgctaacgacgagtatgatggggacgttagtacaagaagcaaaccggagagcaatgtaaatgacaaagataccactgaaggcgaaacctcatgcagaaattacaaggaagacaactgttgcaacattgaagatagtagcaaaacatacgagcagaatagtggagaagatgacaccagtagtctagtagatggaaatgagaagtatgagtctatgaatactaaagacgatgatagcagccctggaggtgaggacacatgcaataggtatgagccaaaggttgaagacgatgaaaattgtgttcttggagctgagagcattagcaacaattgtgatgaaaataataaagatgccataaaaactggaagcataagtgagagacatgaagagctgataattgaagaagaaaatgagaaattgcagcaggcatttattgaagatgccaattcccaagcagggagtggttcatcaattaatgagcggacgaattctgggttttctcgcggttcatcagaggctgggttagatgaagatcagtcctcaaccgtccatggatagcgttaaggtttcaattaatggtcatccaatctctgaaagagcccttaagaaggcagagaagaaagctggtcctgttgacccaggttcatattggtacgactaccgtgctggtttttggggtgtcatgggacgagaatgtatcggcattgtccctccatttattagagaatttaattatccgatggccagaaattgtgccggtggggattctggtgtttttgtcaatggcagagaactgcatcaaagagatttagatctacttgtaggaagaggactaccacggacatctggaaaatcatactctcttgagatgtcaggaaatgtaattgatgaagacactggaaaaaaactacgcagtcttggaaaacttgctcctacgattgagaagttgaagcgtggttttggcatgcacgtccctgaagagtttagatagctggttctagtacaggatcttggttttgctaataatacactcttcaaagctgacaatggggtggcaaacgtgtggcttctgcgggacggtggtatcaaatctcagatttcttggactggagctctggaagcagcagtacttaagatccttggtgtgcggcgaaggttgtctggcactcaagaaaccaagataatctggtctaatgacttgactaccaatagtacccctcctgctaatttcaattgcttcaatggaagcgacgtgtgctgctagtgactctagattatcaggcagttcttaacttcactgctctgcctgtacgtgctattccttgaatgtgttatcattatcggtacattgccccatcacaggcatagaagtgttgtcagatgtaccatgagcaattgtcggcttgtaatatattggtagagatatgcttcccctaatatttatatgtatatatatgtgatcttgattcttgaatctcttgccaatacgattgattcctgaaccctgttaataagagtcttatttt

SEQ ID NO: 32684 - DNA, 3196 bp, Zea Mays
cctccctcgtcgtctccgttacaacgcagacactgccgccgctccgcgacagtaactctgctctctctctctctcgcatggcgtactcctcgagccgcgggacgaaaccctaatggagaaccggcgccgccgccacgcccctgcgccgtagactcccctcgccgcagtgagccccgttgcaagcttcttgcaggatagcgccagcgcttgccgatccggtgggaaaaaaaagtgggagcacggagcggcctcgcctcggcgggggaggcgcccgccatggggagcgacctcaaggagatgaagtacaggcggaggatcggggtggaggagcggccgcaatgcagcgacccgaggggcggcgcggactgggccgcgctgcagcaggaccccgtcgagctgctgcgcaagctggacgagctgagggaccagatcacgcgctcctgcaacgtcgtcgtcggccagccgcgggagcaccgcagggtcagccgccgtgcggtctccatgctccccgagcatctcgagccaccgcctctgccagggtaccaccgctcccgctacggtgggcggtatgggcacggcttgccgccaccaagcccatacgcaccgccacgccctgaacatggggaaaggtatgcgaggcagtctagtgggcactaccgccagtaccctcccaggcactgcgagaacggtgggatggggcctgggacctaccatcaccatgggtgtgcctgtccgcactgtctgcatgggcagaggactttcccgcaggaggagaacatcccaatggcgagatacttcgccgggcagcacgaatcataccggttggagaggtcgccttctgtttcatccgattatgatcgtgggtctgtggcgtcatcactttactctcatcggtctgtatcgaagatgagggcagagtacttcaggaagaaggcagaacatatctgccgtccagtggatggtgccgcacctttctctgtatgcagttcatgttataaactactgctgatgcctatggaaaaatgcgtagggaggaagcagaatcggtttcaatgtgggtcttgttgtcagataattagtttgaagcatcaggaagaaaatggtatcccctttgcacttgcaccatcatcatccttacatgcgcctgaaatggagcaaagcacaagtgaccagatgaggcaagattctgtccatcagcgccatgaggatttcaattttatgttcaacaattcaaatgatcattgcgatatgcaaaacaacatggatttcaccgatgataattcacttccttcgaccgcgagtaatgacaggattgagattgacaaagagtgtgggtcaactagaagcattcagtcaaaagctgagggtctctctttctctccaagtaggtctgtagacattggtagcccaaaggatatattgtgcgagagggataaagacagcaatgtggagccttcctcagatggtccacttagtccacgatctccaactttagaggacaaacttgttgacccgttgtgtgcccaggaaaaaggtaacgatgaggacgatcaaggcacggcttacagatcgaacctaacatgcaaaggagaatatgatgctaacgacgagtatgatggggacgttagtacaagaagcaaaccggagagcaatgtaaatgacaaagataccactgaaggcgaaacctcatgcagaaattacaaggaagacaactgttgcaacattgaagatagtagcaaaacatacgagcagaatagtggagaagatgacaccagtagtctagtagatggaaatgagaagtatgagtctatgaatactaaagacgatgatagcagccctggaggtgaggacacatgcaataggtatgagccaaaggttgaagacgatgaaaattgtgttcttggagctgagagcattagcaacaattgtgatgaaaataataaagatgccataaaaactggaagcataagtgagagacatgaagagctgataattgaagaagaaaatgagaaattgcagcaggcatttattgaagatgccaattcccaagcagggagtggttcatcaattaatgagcggacgaattctgggttttctcgcggttcatcagaggctgggttagatgaagatcagtcctcaaccggtaagagtggggactcatcattttttgctggtttcttgaagaagggtttcaaggacctttctttattaaataagtccatggatagcgttaaggtttcaattaatggtcatccaatctctgaaagagcccttaagaaggcagagaagaaagctggtcctgttgacccaggttcatattggtacgactaccgtgctggtttttggggtgtcatgggacgagaatgtatcggcattgtccctccatttattagagaatttaattatccgatggccagaaattgtgccggtggggattctggtgtttttgtcaatggcagagaactgcatcaaagagatttagatctacttgtaggaagaggactaccacggacatctggaaaatcatactctcttgagatgtcaggaaatgtaattgatgaagacactggaaaaaaactacgcagtcttggaaaacttgctcctacgattgagaagttgaagcgtggttttggcatgcacgtccctgaagagtttagatagctggttctagtacaggatcttggttttgctaataatacactcttcaaagctgacaatggggtggcaaacgtgtggcttctgcgggacggtggtatcaaatctcagatttcttggactggagctctggaagcagcagtacttaagatccttggtgtgcggcgaaggttgtctggcactcaagaaaccaagataatctggtctaatgacttgactaccaatagtacccctcctgctaatttcaattgcttcaatggaagcgacgtgtgctgctagtgactctagattatcaggcagttcttaacttcactgctctgcctgtacgtgctattccttgaatgtgttatcattatcggtacattgccccatcacaggcatagaagtgttgtcagatgtaccatgagcaattgtcggcttgtaatatattggtagagatatgcttcccctaatatttatatgtatatatatgtgatcttgattcttgaatctcttgccaatacgattgattcctgaaccctgttaataagagtcttatttt

SEQ ID NO: 32685 - DNA, 3103 bp, Zea Mays
ctcgtcgtctccgttacaacgcagacactgccgccgctccgcgacagtaactctgctctctctctctctcgcatggcgtactcctcgagccgcgggacgaaaccctaatggagaaccggcgccgccgccacgcccctgcgccgtagactcccctcgccgcagatagcgccagcgcttgccgatccggtgggaaaaaaaagtgggagcacggagcggcctcgcctcggcgggggaggcgcccgccatggggagcgacctcaaggagatgaagtacaggcggaggatcggggtggaggagcggccgcaatgcagcgacccgaggggcggcgcggactgggccgcgctgcagcaggaccccgtcgagctgctgcgcaagctggacgagctgagggaccagatcacgcgctcctgcaacgtcgtcgtcggccagccgcgggagcaccgcagggtcagccgccgtgcggtctccatgctccccgagcatctcgagccaccgcctctgccagggtaccaccgctcccgctacggtgggcggtatgggcacggcttgccgccaccaagcccatacgcaccgccacgccctgaacatggggaaaggtatgcgaggcagtctagtgggcactaccgccagtaccctcccaggcactgcgagaacggtgggatggggcctgggacctaccatcaccatgggtgtgcctgtccgcactgtctgcatgggcagaggactttcccgcaggaggagaacatcccaatggcgagatacttcgccgggcagcacgaatcataccggttggagaggtcgccttctgtttcatccgattatgatcgtgggtctgtggcgtcatcactttactctcatcggtctgtatcgaagatgagggcagagtacttcaggaagaaggcagaacatatctgccgtccagtggatggtgccgcacctttctctgtatgcagttcatgttataaactactgctgatgcctatggaaaaatgcgtagggaggaagcagaatcggtttcaatgtgggtcttgttgtcagataattagtttgaagcatcaggaagaaaatggtatcccctttgcacttgcaccatcatcatccttacatgcgcctgaaatggagcaaagcacaagtgaccagatgaggcaagattctgtccatcagcgccatgaggatttcaattttatgttcaacaattcaaatgatcattgcgatatgcaaaacaacatggatttcaccgatgataattcacttccttcgaccgcgagtaatgacaggattgagattgacaaagagtgtgggtcaactagaagcattcagtcaaaagctgagggtctctctttctctccaagtaggtctgtagacattggtagcccaaaggatatattgtgcgagagggataaagacagcaatgtggagccttcctcagatggtccacttagtccacgatctccaactttagaggacaaacttgttgacccgttgtgtgcccaggaaaaaggtaacgatgaggacgatcaaggcacggcttacagatcgaacctaacatgcaaaggagaatatgatgctaacgacgagtatgatggggacgttagtacaagaagcaaaccggagagcaatgtaaatgacaaagataccactgaaggcgaaacctcatgcagaaattacaaggaagacaactgttgcaacattgaagatagtagcaaaacatacgagcagaatagtggagaagatgacaccagtagtctagtagatggaaatgagaagtatgagtctatgaatactaaagacgatgatagcagccctggaggtgaggacacatgcaataggtatgagccaaaggttgaagacgatgaaaattgtgttcttggagctgagagcattagcaacaattgtgatgaaaataataaagatgccataaaaactggaagcataagtgagagacatgaagagctgataattgaagaagaaaatgagaaattgcagcaggcatttattgaagatgccaattcccaagcagggagtggttcatcaattaatgagcggacgaattctgggttttctcgcggttcatcagaggctgggttagatgaagatcagtcctcaaccggtaagagtggggactcatcattttttgctggtttcttgaagaagggtttcaaggacctttctttattaaataagtccatggatagcgttaaggtttcaattaatggtcatccaatctctgaaagagcccttaagaaggcagagaagaaagctggtcctgttgacccaggttcatattgccatttattagagaatttaattatccgatggccagaaattgtgccggtggggattctggtgtttttgtcaatggcagagaactgcatcaaagagatttagatctacttgtaggaagaggactaccacggacatctggaaaatcatactctcttgagatgtcaggaaatgtaattgatgaagacactggaaaaaaactacgcagtcttggaaaacttgctcctacgattgagaagttgaagcgtggttttggcatgcacgtccctgaagagtttagatagctggttctagtacaggatcttggttttgctaataatacactcttcaaagctgacaatggggtggcaaacgtgtggcttctgcgggacggtggtatcaaatctcagatttcttggactggagctctggaagcagcagtacttaagatccttggtgtgcggcgaaggttgtctggcactcaagaaaccaagataatctggtctaatgacttgactaccaatagtacccctcctgctaatttcaattgcttcaatggaagcgacgtgtgctgctagtgactctagattatcaggcagttcttaacttcactgctctgcctgtacgtgctattccttgaatgtgttatcattatcggtacattgccccatcacaggcatagaagtgttgtcagatgtaccatgagcaattgtcggcttgtaatatattggtagagatatgcttcccctaatatttatatgtatatatatgtgatcttgattcttgaatctcttgccaatacgattgattcctgaaccctgttaataagagtcttatttt

SEQ ID NO: 32686 - DNA, 2344 bp, Zea Mays
ctcgtcgtctccgttacaacgcagacactgccgccgctccgcgacagtaactctgctctctctctctctcgcatggcgtactcctcgagccgcgggacgaaaccctaatggagaaccggcgccgccgccacgcccctgcgccgtagactcccctcgccgcagtgagccccgttgcaagggaggaagcagaatcggtttcaatgtgggtcttgttgtcagataattagtttgaagcatcaggaagaaaatggtatcccctttgcacttgcaccatcatcatccttacatgcgcctgaaatggagcaaagcacaagtgaccagatgaggcaagattctgtccatcagcgccatgaggatttcaattttatgttcaacaattcaaatgatcattgcgatatgcaaaacaacatggatttcaccgatgataattcacttccttcgaccgcgagtaatgacaggattgagattgacaaagagtgtgggtcaactagaagcattcagtcaaaagctgagggtctctctttctctccaagtaggtctgtagacattggtagcccaaaggatatattgtgcgagagggataaagacagcaatgtggagccttcctcagatggtccacttagtccacgatctccaactttagaggacaaacttgttgacccgttgtgtgcccaggaaaaaggtaacgatgaggacgatcaaggcacggcttacagatcgaacctaacatgcaaaggagaatatgatgctaacgacgagtatgatggggacgttagtacaagaagcaaaccggagagcaatgtaaatgacaaagataccactgaaggcgaaacctcatgcagaaattacaaggaagacaactgttgcaacattgaagatagtagcaaaacatacgagcagaatagtggagaagatgacaccagtagtctagtagatggaaatgagaagtatgagtctatgaatactaaagacgatgatagcagccctggaggtgaggacacatgcaataggtatgagccaaaggttgaagacgatgaaaattgtgttcttggagctgagagcattagcaacaattgtgatgaaaataataaagatgccataaaaactggaagcataagtgagagacatgaagagctgataattgaagaagaaaatgagaaattgcagcaggcatttattgaagatgccaattcccaagcagggagtggttcatcaattaatgagcggacgaattctgggttttctcgcggttcatcagaggctgggttagatgaagatcagtcctcaaccggtaagagtggggactcatcattttttgctggtttcttgaagaagggtttcaaggacctttctttattaaataagtccatggatagcgttaaggtttcaattaatggtcatccaatctctgaaagagcccttaagaaggcagagaagaaagctggtcctgttgacccaggttcatattggtacgactaccgtgctggtttttggggtgtcatgggacgagaatgtatcggcattgtccctccatttattagagaatttaattatccgatggccagaaattgtgccggtggggattctggtgtttttgtcaatggcagagaactgcatcaaagagatttagatctacttgtaggaagaggactaccacggacatctggaaaatcatactctcttgagatgtcaggaaatgtaattgatgaagacactggaaaaaaactacgcagtcttggaaaacttgctcctacgattgagaagttgaagcgtggttttggcatgcacgtccctgaagagtttagatagctggttctagtacaggatcttggttttgctaataatacactcttcaaagctgacaatggggtggcaaacgtgtggcttctgcgggacggtggtatcaaatctcagatttcttggactggagctctggaagcagcagtacttaagatccttggtgtgcggcgaaggttgtctggcactcaagaaaccaagataatctggtctaatgacttgactaccaatagtacccctcctgctaatttcaattgcttcaatggaagcgacgtgtgctgctagtgactctagattatcaggcagttcttaacttcactgctctgcctgtacgtgctattccttgaatgtgttatcattatcggtacattgccccatcacaggcatagaagtgttgtcagatgtaccatgagcaattgtcggcttgtaatatattggtagagatatgcttcccctaatatttatatgtatatatatgtgatcttgattcttgaatctcttgccaatacgattgattcctgaaccctgttaataagagtcttatttt

SEQ ID NO: 32687 - DNA, 3199 bp, Zea Mays
gtcgtctccgttacaacgcagacactgccgccgctccgcgacagtaactctgctctctctctctctcgcatggcgtactcctcgagccgcgggacgaaaccctaatggagaaccggcgccgccgccacgcccctgcgccgtagactcccctcgccgcagtgagccccgttgcaagatttagctccgcgtcgcacagcttcttgcaggatagcgccagcgcttgccgatccggtgggaaaaaaaagtgggagcacggagcggcctcgcctcggcgggggaggcgcccgccatggggagcgacctcaaggagatgaagtacaggcggaggatcggggtggaggagcggccgcaatgcagcgacccgaggggcggcgcggactgggccgcgctgcagcaggaccccgtcgagctgctgcgcaagctggacgagctgagggaccagatcacgcgctcctgcaacgtcgtcgtcggccagccgcgggagcaccgcagggtcagccgccgtgcggtctccatgctccccgagcatctcgagccaccgcctctgccagggtaccaccgctcccgctacggtgggcggtatgggcacggcttgccgccaccaagcccatacgcaccgccacgccctgaacatggggaaaggtatgcgaggcagtctagtgggcactaccgccagtaccctcccaggcactgcgagaacggtgggatggggcctgggacctaccatcaccatgggtgtgcctgtccgcactgtctgcatgggcagaggactttcccgcaggaggagaacatcccaatggcgagatacttcgccgggcagcacgaatcataccggttggagaggtcgccttctgtttcatccgattatgatcgtgggtctgtggcgtcatcactttactctcatcggtctgtatcgaagatgagggcagagtacttcaggaagaaggcagaacatatctgccgtccagtggatggtgccgcacctttctctgtatgcagttcatgttataaactactgctgatgcctatggaaaaatgcgtagggaggaagcagaatcggtttcaatgtgggtcttgttgtcagataattagtttgaagcatcaggaagaaaatggtatcccctttgcacttgcaccatcatcatccttacatgcgcctgaaatggagcaaagcacaagtgaccagatgaggcaagattctgtccatcagcgccatgaggatttcaattttatgttcaacaattcaaatgatcattgcgatatgcaaaacaacatggatttcaccgatgataattcacttccttcgaccgcgagtaatgacaggattgagattgacaaagagtgtgggtcaactagaagcattcagtcaaaagctgagggtctctctttctctccaagtaggtctgtagacattggtagcccaaaggatatattgtgcgagagggataaagacagcaatgtggagccttcctcagatggtccacttagtccacgatctccaactttagaggacaaacttgttgacccgttgtgtgcccaggaaaaaggtaacgatgaggacgatcaaggcacggcttacagatcgaacctaacatgcaaaggagaatatgatgctaacgacgagtatgatggggacgttagtacaagaagcaaaccggagagcaatgtaaatgacaaagataccactgaaggcgaaacctcatgcagaaattacaaggaagacaactgttgcaacattgaagatagtagcaaaacatacgagcagaatagtggagaagatgacaccagtagtctagtagatggaaatgagaagtatgagtctatgaatactaaagacgatgatagcagccctggaggtgaggacacatgcaataggtatgagccaaaggttgaagacgatgaaaattgtgttcttggagctgagagcattagcaacaattgtgatgaaaataataaagatgccataaaaactggaagcataagtgagagacatgaagagctgataattgaagaagaaaatgagaaattgcagcaggcatttattgaagatgccaattcccaagcagggagtggttcatcaattaatgagcggacgaattctgggttttctcgcggttcatcagaggctgggttagatgaagatcagtcctcaaccggtaagagtggggactcatcattttttgctggtttcttgaagaagggtttcaaggacctttctttattaaataagtccatggatagcgttaaggtttcaattaatggtcatccaatctctgaaagagcccttaagaaggcagagaagaaagctggtcctgttgacccaggtacgactaccgtgctggtttttggggtgtcatgggacgagaatgtatcggcattgtccctccatttattagagaatttaattatccgatggccagaaattgtgccggtggggattctggtgtttttgtcaatggcagagaactgcatcaaagagatttagatctacttgtaggaagaggactaccacggacatctggaaaatcatactctcttgagatgtcaggaaatgtaattgatgaagacactggaaaaaaactacgcagtcttggaaaacttgctcctacgattgagaagttgaagcgtggttttggcatgcacgtccctgaagagtttagatagctggttctagtacaggatcttggttttgctaataatacactcttcaaagctgacaatggggtggcaaacgtgtggcttctgcgggacggtggtatcaaatctcagatttcttggactggagctctggaagcagcagtacttaagatccttggtgtgcggcgaaggttgtctggcactcaagaaaccaagataatctggtctaatgacttgactaccaatagtacccctcctgctaatttcaattgcttcaatggaagcgacgtgtgctgctagtgactctagattatcaggcagttcttaacttcactgctctgcctgtacgtgctattccttgaatgtgttatcattatcggtacattgccccatcacaggcatagaagtgttgtcagatgtaccatgagcaattgtcggcttgtaatatattggtagagatatgcttcccctaatatttatatgtatatatatgtgatcttgattcttgaatctcttgccaatacgattgattcctgaaccctgttaataagagtcttatttt

SEQ ID NO: 32688 - DNA, 1121 bp, Zea Mays
ctgcgacaggatattatatataaatcatgtacacgagccttgctccgcacggtcccctgaagctgtaccacttcgtcatcatggtggccgtggtgctggcctttctctcccagctaccgtctttccactcgctgcggcacatcaacttcgtctcgctgctcctgagcctgggctacacagtcctcgtggcagccgcctgcgttcgtgctggtttgtccaagaatagtcctgcgaaggactactcgctaagctcgtccaagtccgagcagtccttcgacgctttcctgtccatttccatccttgcctccgtcttcggcaacggcatactgcctgaaatccaggcgacgttggcgccaccggcagcggggaagatgatgaaggcgctggtgctgtgctactccgtcatcgtcttcaccttcttcctctcgtcgatcacgggctactgggccttcggcagcaacgtgcagtccaacgtcctcaagagcctgatgccggactcgggccccgccctcgccccgacgtggctgctgggcgtcgcggtcctcttcgtcctcctccagctgctcgccatcggcctcgtctactcccaggtggcgtacgagatcatggagaagggatccgccgacgccgcccggggccgcttctcgcgccggaacctcgtcccgcgcctgctgctgcgcacgctctacctggccttctgcgcgctcatggccgccatgctccccttcttcggcgacatcgtgggcgtggtcggcgccgtcggcttcgtcccgctcgacttcgtgctccccgtcctcatgtacaacatggcgctcgcgccgccgcgccgctccccggtcttcatcgccaacgcggccgtcatggtcgtgttcgccggcgtaggggccatcggcgccttcgccaccatccgcaagctcgtgctggacgccgacaagtttaagctcttcagcaacaatgttgtcgactaaaattccaacgcatcttgctcttatattactcctcagggtgttgtatatcatcgagttgttgtagcggtaatgtgagtaatcagggcatactagctgtatgtgtacatacattccactattcgagagtataggcaaatcatcatctaagttatt

SEQ ID NO: 32689 - DNA, 1266 bp, Zea Mays
ttgtttggtttgaagccggccaaagttgcctggcctggcacagatctcaggcgttggactttgagtgcttgggctaggattccttgccaaacagacctgagtgcatgacagcgacagccttctgggctcactcgcacggtcgcacccgaaacgccgcaaatccgggcccgcagcccgacccaactcaactcaggcagacactcgccgccgccacgacgtcactagtagagccgtagagggcaagaggcgacggaatgacggagcggcaggtggcggagctgggtcccgggacggcgtgctgcggctggaaccactgtggccgccgcctcgccgctggcgccgtcgatggctccgtctccgtctatgactcccagccgccaccctcgttcaagtggcaggcccatgagcaagccattgtgaatgtcgtctggcttcctccagagtatggggatgctatagcttgtgtttgtgctgatgggacactgtctttgtgggaggaggttgctgctgatgatcaacttccaacctggagaaattgtaaaatcttcgaggatggcaactctcatatactaaatgtacattttggattacatctgggaattctgaaaatggttactgcatactcagatggccaagtcaaggtctacgagctcttggattcattggaattagacaagtggcagcttcaggcagagttccaaaacattactgatccaatctctagatttggaaaacctgcatgcacttctgcatccatagcatggaatccaagaagaggtggaagccaacaagctagttttgcaattggctttaattcagattcgcctcatttcaactcttgtaagatttgggagtttgaagaagctcatcagcgctggcttccacttgttgagctaggttcacctgaggatacaggagataaagtgtgtgctgtagcatgggctcctaacattggcagaccatatgagattatcgcagttgcaacctgcaaaggaattgcaatctggcatataggtttgaacgctgatgctgatggcggaccttcgacgcagaacgttgctttacttaatggccacgatggcgagggcatgttcggttgcaatgatttaattacactgggtttgagtggatctggccactgtctgttgccactcaattctcttggaggtttaatatgctgccactacgtaaccggatctttgcgtccttgcatgtgctgctcgcttgtgagacagggatttctcacatgccgttggactcgtggtt

SEQ ID NO: 32690 - DNA, 2015 bp, Zea Mays
ttgtttggtttgaagccggccaaagttgcctggcctggcacagatctcaggcgttggactttgagtgcttgggctaggattccttgccaaacagacctgagtgcatgacagcgacagccttctgggctcactcgcacggtcgcacccgaaacgccgcaaatccgggcccgcagcccgacccaactcaactcaggcagacactcgccgccgccacgacgtcactagtagagccgtagagggcaagaggcgacggaatgacggagcggcaggtggcggagctgggtcccgggacggcgtgctgcggctggaaccactgtggccgccgcctcgccgctggcgccgtcgatggctccgtctccgtctatgactcccagccgccaccctcgttcaagtggcagatgatcaacttccaacctggagaaattgtaaaatcttcgaggatggcaactctcatatactaaatgtacattttggattacatctgggaattctgaaaatggttactgcatactcagatggccaagtcaaggtctacgagctcttggattcattggaattagacaagtggcagcttcaggcagagttccaaaacattactgatccaatctctagatttggaaaacctgcatgcacttctgcatccatagcatggaatccaagaagaggtggaagccaacaagctagttttgcaattggctttaattcagattcgcctcatttcaactcttgtaagatttgggagtttgaagaagctcatcagcgctggcttccacttgttgagctaggttcacctgaggatacaggagataaagtgtgtgctgtagcatgggctcctaacattggcagaccatatgagattatcgcagttgcaacctgcaaaggaattgcaatctggcatataggtttgaacgctgatgctgatggcggaccttcgacgcagaacgttgctttacttaatggccacgatggcgaggtgtggcaactggaatgggacatgggcggtatgacactcgcatcaaccggaggagatggcatggttaagctatggcaggctaatttggatggagtttggcatgagcaggctgttcttgactgcagtggatcacatgtctagggtctacgtgtttcagaaaacattttttttttgttcccagcactagaagttgctgctcttgctgcagaattatcaagtacttctttcgcttatccgcccaactattgctgtctcctgtgtggctggttgggcgctatcaaaactgggccattaacggccgtgggaccgcattgaaaagtccagaaaacgaaggtacatttgcttgtaaccttgtaattggggaagctacacagacgttgagtctaagctagtggacggaggtcgagatcaaccacgtgatgtacacgtggtcatgttcctcaaaatcttccgcaggtcctttcagatatcactgatatgcttgtaccattaaaagcagattaacacaggacgaccttcggctgcccacagatcagctatccacaatcaatgtttattttcatggtatattagatttaatattagcgctaggtttttcagatttggaggtagggagatggcagacggaaattgtggcaggatcaagcttcgctagttagctgtgacagcgttttacactaaaactgagtggtgcccagcccataagtgaggccattgtaatactgattctggcgaaccctatttgtggaagtacccaacgataaacctgctgcaggtagggatgtttttttacaattcgttttataatctgatcttatacttaaatttcatagctctaaaatttagagctcgttatcaccctagctgcaggcaaataagagaatttaccgaagtgtttcaatcttcaagtggaaggtgagtgaaatctacgggacctgtctggcgcgaatatattttgatttccatgtaacaattatacgcctttaaagtgaaaaaaatgcaaaacatttaataatttatacttctttccttaacatatgag

SEQ ID NO: 32691 - DNA, 2025 bp, Zea Mays
ttgtttggtttgaagccggccaaagttgcctggcctggcacagatctcaggcgttggactttgagtgcttgggctaggattccttgccaaacagacctgagtgcatgacagcgacagccttctgggctcactcgcacggtcgcacccgaaacgccgcaaatccgggcccgcagcccgacccaactcaactcaggcagacactcgccgccgccacgacgtcactagtagagccgtagagggcaagaggcgacggaatgacggagcggcaggtggcggagctgggtcccgggacggcgtgctgcggctggaaccactgtggccgccgcctcgccgctggcgccgtcgatggctccgtctccgtctatgactcccagccgccaccctcgttcaagtggcaggcccatgagcaagccattgtgaatgtcgtctggcttcctccagagtatggggatgctatagcttgtgtttgtgctgatgggacactgtctttgtgggaggaggttgctgctgatgatcaacttccaacctggagaaattgtaaaatcttcgaggatggcaactctcatatactaaatgtacattttggattacatctgggaattctgaaaatggttactgcatactcagatggccaagtcaaggtctacgagctcttggattcattggaattagacaagtggcagcttcaggcagagttccaaaacattactgatccaatctctagatttggaaaacctgcatgcacttctgcatccatagcatggaatccaagaagaggtggaagccaacaagctagttttgcaattggctttaattcagattcgcctcatttcaactcttgtaagatttgggagtttgaagaagctcatcagcgctggcttccacttgttgagctaggttcacctgaggatacaggagataaagtgtgtgctgtagcatgggctcctaacattggcagaccatatgagattatcgcagttgcaacctgcaaaggaattgcaatctggcatataggtttgaacgctgatgctgatggcggaccttcgacgcagaacgttgctttacttaatggccacgatggcgaggtgtggcaactggaatgggacatgggcggtatgacactcgcatcaaccggaggagatggcatggttaagctatggcaggctaatttggatggagtttggcatgagcaggctgttcttgactgcagtggatcacatgtctagggtctacgtgtttcagaaaacattttttttttgttcccagcactagaagttgctgctcttgctgcagaattatcaagtacttctttcgcttatccgcccaactattgctgtctcctgtgtggctggttgggcgctatcaaaactgggccattaacggccgtgggaccgcattgaaaagtccagaaaacgaaggtacatttgcttgtaaccttgtaattggggaagctacacagacgttgagtctaagctagtggacggaggtcgagatcaaccacgtgatgtacacgtggtcatgttcctcaaaatcttccgcaggtcctttcagatatcactgatatgcttgtaccattaaaagcagattaacacaggacgaccttcggctgcccacagatcagctatccacaatcaatgtttattttcatggtatattagatttaatattagcgctaggtttttcagatttggaggtagggagatggcagacggaaattgtggcaggatcaagcttcgctagttagctgtgacagcgttttacactaaaactgagtggtgcccagcccataagtgaggccattgtaatactgattctggcgaaccctatttgtggaagtacccaacgataaacctgctgcaggtagggatgtttttttacaattcgttttataatctgatcttatacttaaatttcatagctctaaaatttagagctcgttatcaccctagctgcaggcaaataagagaatttaccgaagtgtttcaatcttcaagtggaagaaactacggcacaagagaaatcgag

SEQ ID NO: 32692 - DNA, 3998 bp, Zea Mays
cgaagcccattattataacctatcaacgggcctattcagatttcagaggtcgatacggaaccctaggcgtctatccattagaaaattggactgattgaccgcaccgattccgcgatacgttcccgaatccaacccatcttcgtccgctccggccactcgtttcgccgccgtcggtcgccacccgcaaggtttggaggataagattcgggagggatggcttccggtgggcagccgcagttccggtacacgcagccgccgtcgaaggtgctccacctgcggaatctgccgtgggactgcactccagaggagctggtcgagctggggacccccttcggcaaggtcgtcaacaccaagtgcggcgtcggcgccaaccgcaatcaggcattcatcgaattcggcgaccaaaatcaagctattgccatgatatcatattacgcatcgtcaacagagccagcacaggtaagagggaaaaatgtgtaccttcagtactcaaatagacaggagattgtcaacaacaaggcaactggggaaggttcaggcaacgttttgcttgtgggaatggagggtgttgcaccagattctgtcagcattgatgttctacacgtggaatactttgatgtgccaggactgtcttagtaacttctagcacattgttttgcatgatctgaatggattagcaagccgttgtcacggagtatcatggcaggaagcatctggaacacatgtctgtgtttgtttcctctcccttactcatcgctgccctactcctcccctaccctccctcccctgcacctcttctccctacctttcccctcccataccctttcatccaagtaccctcttagggttggtcacatctaccttcgtcgatgtccgttttagttgttattataagttgtatctagttagtgcctaaggttggtggatgcatttttctcaatggaggtcgtttctgattggttacattggtagctggcatatttgtatgattattatcaagtgctcttctctggatttagtaagggaaaagaaagagaaaaggaacataaaatgtaatgcatcaataatagtaaataaatattcttgttttcactaacgccccgtttggatcctcggaattgaattccattctaataatagtaatttaggcaaatatcaattaagctagtatagttttatgcaaaatatatttgtatactattattactttattagcaatatgtgggagatatttatgtgctgcatttttactacagaggagtgagtagaagagtgtcttataagttgcagagtagaaacatattccactgatacacaaaatcattttctatcctccacccccatgaatttgagatagtcttatatctgaactgtggaaagtggcggaatatcaaattccaagccaaatagactactctattaagtaaatttcaattccttcaaaatgaatagatccaaatggcccataaggtaaatataatgaacttgattggcacaaatttgtcatttggttgcactgatttgtgtaacggtttaataccatctttcaagcaggattttagctccttattacagatctgcaagctaccaactcgagttatttgcatctgtatgttgattaaaagaattactttacaatcttctacatgatgattagattataattcttttgcaatcttttatgtgttaattacaagaactatcttgtgtttatcctccatagtgtcatttggttgacgcacctttaatacgctgttaaggcgagcttcaaaattggaacatgtggattatcagttcataaagaaacatctgtctgaacagtttaatgagtttcactcactttccactgtgaatattgtagatttgatcactttgttactggcgcatgaatgaatgcttgttagctgtgctcgtttctgatctctttctctagacaatccttacaaagcctagaaatgcattgattgatttgattctaatactttaataacagcttgatgtcacaattttacccaggagtgatgataaattcatctgcattatctgtactagcaggttgaaaggttttgaacatgtacagttgtgtgctagtctgctagtacccttgattcattgttattggttattgccgacaaaaactttattgtagttgtaagcttttctgtatgtttgtataaatattaattttgtttggcgtagagatcagacaacctttggctgccactttcaatttaagatcatttcactttccagatatattggtgcatgcatttggttttactataatgtttcacatgtggtattaacagttgacgtatgtgtgcacaggtattttctgctttcggatttgttcataagatcgctacctttgagaaagcatctggttatcaggctttgattcagttttctgatgctgaaactgcaacatctgcaaaagctgcactggatggtagatgcattcctagctatttgctaccagaactggatgtggcctgcactttgagaataacctattcagcacacagtgttctcaacgtcaagtatcagagccacaggagtagggacttcactaatccttaccttccttttctggactctgctaaagatggctctggaccggatggaaaaaaacaggaagcagagagcaatatactgcttgcttctattgagaacatgcaatatgttgttacaatagatgtgcttcatgaggtcttttcagcttttggatttgtacagaagattgctatttttgagaagaatggctttcaagcattgatccagtatccagacattcaaactgcgtatgcagcaaaagaagcactagaagggcacagcatctatgaaggtggctactgcaaactgcacctcacattttcacgccatactgagcttaatgttaaggttaacaatgagcgaggtagagattataccaaggggaatgccactccaagcagtgatcaaccttccattcttggtcctcagccaataccaagcgttggtgctgctattccaccagcacagggtagtgttccttctgcagccaccaattcagtaatgccaccaggggatccatcagttgctctaccttctaatccttccagtgagccactcctgcaagcacctgttgtttcctctggagggcctccgcattaccctaatcaggccatcctacaaggcccacttggtgttgttgcacggttcccaggctatggtgccctgcagtttgctcagggctcagctcaagctcaaatggtgcagccttcaggccaaggaagtcaacatatgtcaggtcatgtaaattatcagctacctccaggttcagcccaattcatgcagtatctcagcaacggaagccatccacttccaaacgcacctgggccacagacaatgccttaccctgccctcagtgggcagcagctacctccgggtcttcagatgatgcaagctcaaggttttggaggcctgccgttttcacagggtcctggacaaccaatgccacagttcccaatgtatggcacccagcagtttcctccgggtatggagcccaagatgatgcgcttctctgagcagggaggccagcagtttacatttgcgccgcggggtccaaatagtcgttagcaaatttgaacttagcaacgttagatcgttgatggtgatgaatggatgtcaagccttctatgttgctgttttctaaggtgaataccgatgctgttccattactaggatctatacttggtttatctctcgtactgtggccaaaacaaatgtctaatctgaggtttcgtagccttgtatttgtatcgatttcctcacgcccgcagcttctgcctgcactgtgttacattacggttatactgcagtagtggaagcaaatgtaaaagaaacctagagacctgatgtgccaggttgaaagcccgtagctgcaaactgtaggctcacatcgcgtccagttataaatttgtttgtgctatgttaagagtacaattgtacaaaccaag

SEQ ID NO: 32693 - DNA, 3988 bp, Zea Mays
cgaagcccattattataacctatcaacgggcctattcagatttcagaggtcgatacggaaccctaggcgtctatccattagaaaattggactgattgaccgcaccgattccgcgatacgttcccgaatccaacccatcttcgtccgctccggccactcgtttcgccgccgtcggtcgccacccgcaaggtttggaggataagattcgggagggatggcttccggtgggcagccgcagttccggtacacgcagccgccgtcgaaggtgctccacctgcggaatctgccgtgggactgcactccagaggagctggtcgagctggggacccccttcggcaaggtcgtcaacaccaagtgcggcgtcggcgccaaccgcaatcaggcattcatcgaattcggcgaccaaaatcaagctattgccatgatatcatattacgcatcgtcaacagagccagcacaggtaagagggaaaaatgtgtaccttcagtactcaaatagacaggagattgtcaacaacaaggcaactggggaaggttcaggcaacgttttgcttgtgggaatggagggtgttgcaccagattctgtcagcattgatgttctacacgtggaatactttgatgtgccaggactgtcttagtaacttctagcacattgttttgcatgatctgaatggattagcaagccgttgtcacggagtatcatggcaggaagcatctggaacacatgtctgtgtttgtttcctctcccttactcatcgctgccctactcctcccctaccctccctcccctgcacctcttctccctacctttcccctcccataccctttcatccaagtaccctcttagggttggtcacatctaccttcgtcgatgtccgttttagttgttattataagttgtatctagttagtgcctaaggttggtggatgcatttttctcaatggaggtcgtttctgattggttacattggtagctggcatatttgtatgattattatcaagtgctcttctctggatttagtaagggaaaagaaagagaaaaggaacataaaatgtaatgcatcaataatagtaaataaatattcttgttttcactaacgccccgtttggatcctcggaattgaattccattctaataatagtaatttaggcaaatatcaattaagctagtatagttttatgcaaaatatatttgtatactattattactttattagcaatatgtgggagatatttatgtgctgcatttttactacagaggagtgagtagaagagtgtcttataagttgcagagtagaaacatattccactgatacacaaaatcattttctatcctccacccccatgaatttgagatagtcttatatctgaactgtggaaagtggcggaatatcaaattccaagccaaatagactactctattaagtaaatttcaattccttcaaaatgaatagatccaaatggcccataaggtaaatataatgaacttgattggcacaaatttgtcatttggttgcactgatttgtgtaacggtttaataccatctttcaagcaggattttagctccttattacagatctgcaagctaccaactcgagttatttgcatctgtatgttgattaaaagaattactttacaatcttctacatgatgattagattataattcttttgcaatcttttatgtgttaattacaagaactatcttgtgtttatcctccatagtgtcatttggttgacgcacctttaatacgctgttaaggcgagcttcaaaattggaacatgtggattatcagttcataaagaaacatctgtctgaacagtttaatgagtttcactcactttccactgtgaatattgtagatttgatcactttgttactggcgcatgaatgaatgcttgttagctgtgctcgtttctgatctctttctctagacaatccttacaaagcctagaaatgcattgattgatttgattctaatactttaataacagcttgatgtcacaattttacccaggagtgatgataaattcatctgcattatctgtactagcaggttgaaaggttttgaacatgtacagttgtgtgctagtctgctagtacccttgattcattgttattggttattgccgacaaaaactttattgtagttgtaagcttttctgtatgtttgtataaatattaattttgtttggcgtagagatcagacaacctttggctgccactttcaatttaagatcatttcactttccagatatattggtgcatgcatttggttttactataatgtttcacatgtggtattaacagttgacgtatgtgtgcacaggtattttctgctttcggatttgttcataagatcgctacctttgagaaagcatctggttatcaggctttgattcagttttctgatgctgaaactgcaacatctgcaaaagctgcactggatggtagatgcattcctagctatttgctaccagaactggatgtggcctgcactttgagaataacctattcagcacacagtgttctcaacgtcaagtatcagagccacaggagtagggacttcactaatccttaccttccttttctggactctgctaaagatggctctggaccggatggaaaaaaacaggaagcagagagcaatatactgcttgcttctattgagaacatgcaatatgttgttacaatagatgtgcttcatgagcttttggatttgtacagaagattgctatttttgagaagaatggctttcaagcattgatccagtatccagacattcaaactgcgtatgcagcaaaagaagcactagaagggcacagcatctatgaaggtggctactgcaaactgcacctcacattttcacgccatactgagcttaatgttaaggttaacaatgagcgaggtagagattataccaaggggaatgccactccaagcagtgatcaaccttccattcttggtcctcagccaataccaagcgttggtgctgctattccaccagcacagggtagtgttccttctgcagccaccaattcagtaatgccaccaggggatccatcagttgctctaccttctaatccttccagtgagccactcctgcaagcacctgttgtttcctctggagggcctccgcattaccctaatcaggccatcctacaaggcccacttggtgttgttgcacggttcccaggctatggtgccctgcagtttgctcagggctcagctcaagctcaaatggtgcagccttcaggccaaggaagtcaacatatgtcaggtcatgtaaattatcagctacctccaggttcagcccaattcatgcagtatctcagcaacggaagccatccacttccaaacgcacctgggccacagacaatgccttaccctgccctcagtgggcagcagctacctccgggtcttcagatgatgcaagctcaaggttttggaggcctgccgttttcacagggtcctggacaaccaatgccacagttcccaatgtatggcacccagcagtttcctccgggtatggagcccaagatgatgcgcttctctgagcagggaggccagcagtttacatttgcgccgcggggtccaaatagtcgttagcaaatttgaacttagcaacgttagatcgttgatggtgatgaatggatgtcaagccttctatgttgctgttttctaaggtgaataccgatgctgttccattactaggatctatacttggtttatctctcgtactgtggccaaaacaaatgtctaatctgaggtttcgtagccttgtatttgtatcgatttcctcacgcccgcagcttctgcctgcactgtgttacattacggttatactgcagtagtggaagcaaatgtaaaagaaacctagagacctgatgtgccaggttgaaagcccgtagctgcaaactgtaggctcacatcgcgtccagttataaatttgtttgtgctatgttaagagtacaattgtacaaaccaag

SEQ ID NO: 32694 - DNA, 3897 bp, Zea Mays
cctattcagatttcagaggtcgatacggaaccctaggcgtctatccattagaaaattggactgattgaccgcaccgattccgcgatacgttcccgaatccaacccatcttcgtccgctccggccactcgtttcgccgccgtcggtcgccacccgcaaggtttggaggataagattcgggagggatggcttccggtgggcagccgcagttccggtacacgcagccgccgtcgaaggtgctccacctgcggaatctgccgtgggactgcactccagaggagctggtcgagctggggacccccttcggcaaggtcgtcaacaccaagtgcggcgtcggcgccaaccgcaatcaggcattcatcgaattcggcgaccaaaatcaagctattgccatgatatcatattacgcatcgtcaacagagccagcacaggtaagagggaaaaatgtgtaccttcagtactcaaatagacaggagattgtcaacaacaaggcaactggggaaggttcaggcaacgttttgcttgtgggaatggagggtgttgcaccagattctgtcagcattgatgttctacacgtgcaagccgttgtcacggagtatcatggcaggaagcatctggaacacatgtctgtgtttgtttcctctcccttactcatcgctgccctactcctcccctaccctccctcccctgcacctcttctccctacctttcccctcccataccctttcatccaagtaccctcttagggttggtcacatctaccttcgtcgatgtccgttttagttgttattataagttgtatctagttagtgcctaaggttggtggatgcatttttctcaatggaggtcgtttctgattggttacattggtagctggcatatttgtatgattattatcaagtgctcttctctggatttagtaagggaaaagaaagagaaaaggaacataaaatgtaatgcatcaataatagtaaataaatattcttgttttcactaacgccccgtttggatcctcggaattgaattccattctaataatagtaatttaggcaaatatcaattaagctagtatagttttatgcaaaatatatttgtatactattattactttattagcaatatgtgggagatatttatgtgctgcatttttactacagaggagtgagtagaagagtgtcttataagttgcagagtagaaacatattccactgatacacaaaatcattttctatcctccacccccatgaatttgagatagtcttatatctgaactgtggaaagtggcggaatatcaaattccaagccaaatagactactctattaagtaaatttcaattccttcaaaatgaatagatccaaatggcccataaggtaaatataatgaacttgattggcacaaatttgtcatttggttgcactgatttgtgtaacggtttaataccatctttcaagcaggattttagctccttattacagatctgcaagctaccaactcgagttatttgcatctgtatgttgattaaaagaattactttacaatcttctacatgatgattagattataattcttttgcaatcttttatgtgttaattacaagaactatcttgtgtttatcctccatagtgtcatttggttgacgcacctttaatacgctgttaaggcgagcttcaaaattggaacatgtggattatcagttcataaagaaacatctgtctgaacagtttaatgagtttcactcactttccactgtgaatattgtagatttgatcactttgttactggcgcatgaatgaatgcttgttagctgtgctcgtttctgatctctttctctagacaatccttacaaagcctagaaatgcattgattgatttgattctaatactttaataacagcttgatgtcacaattttacccaggagtgatgataaattcatctgcattatctgtactagcaggttgaaaggttttgaacatgtacagttgtgtgctagtctgctagtacccttgattcattgttattggttattgccgacaaaaactttattgtagttgtaagcttttctgtatgtttgtataaatattaattttgtttggcgtagagatcagacaacctttggctgccactttcaatttaagatcatttcactttccagatatattggtgcatgcatttggttttactataatgtttcacatgtggtattaacagttgacgtatgtgtgcacaggtattttctgctttcggatttgttcataagatcgctacctttgagaaagcatctggttatcaggctttgattcagttttctgatgctgaaactgcaacatctgcaaaagctgcactggatggtagatgcattcctagctatttgctaccagaactggatgtggcctgcactttgagaataacctattcagcacacagtgttctcaacgtcaagtatcagagccacaggagtagggacttcactaatccttaccttccttttctggactctgctaaagatggctctggaccggatggaaaaaaacaggaagcagagagcaatatactgcttgcttctattgagaacatgcaatatgttgttacaatagatgtgcttcatgaggtcttttcagcttttggatttgtacagaagattgctatttttgagaagaatggctttcaagcattgatccagtatccagacattcaaactgcgtatgcagcaaaagaagcactagaagggcacagcatctatgaaggtggctactgcaaactgcacctcacattttcacgccatactgagcttaatgttaaggttaacaatgagcgaggtagagattataccaaggggaatgccactccaagcagtgatcaaccttccattcttggtcctcagccaataccaagcgttggtgctgctattccaccagcacagggtagtgttccttctgcagccaccaattcagtaatgccaccaggggatccatcagttgctctaccttctaatccttccagtgagccactcctgcaagcacctgttgtttcctctggagggcctccgcattaccctaatcaggccatcctacaaggcccacttggtgttgttgcacggttcccaggctatggtgccctgcagtttgctcagggctcagctcaagctcaaatggtgcagccttcaggccaaggaagtcaacatatgtcaggtcatgtaaattatcagctacctccaggttcagcccaattcatgcagtatctcagcaacggaagccatccacttccaaacgcacctgggccacagacaatgccttaccctgccctcagtgggcagcagctacctccgggtcttcagatgatgcaagctcaaggttttggaggcctgccgttttcacagggtcctggacaaccaatgccacagttcccaatgtatggcacccagcagtttcctccgggtatggagcccaagatgatgcgcttctctgagcagggaggccagcagtttacatttgcgccgcggggtccaaatagtcgttagcaaatttgaacttagcaacgttagatcgttgatggtgatgaatggatgtcaagccttctatgttgctgttttctaaggtgaataccgatgctgttccattactaggatctatacttggtttatctctcgtactgtggccaaaacaaatgtctaatctgaggtttcgtagccttgtatttgtatcgatttcctcacgcccgcagcttctgcctgcactgtgttacattacggttatactgcagtagtggaagcaaatgtaaaagaaacctagagacctgatgtgccaggttgaaagcccgtagctgcaaactgtaggctcacatcgcgtccagttataaatttgtttgtgctatgttaagagtacaattgtacaaaccaag

SEQ ID NO: 32695 - DNA, 3162 bp, Zea Mays
cagatttcagaggtcgatacggaaccctaggcgtctatccattagaaaattggactgattgaccgcaccgattccgcgatacgttcccgaatccaacccatcttcgtccgctccggccactcgtttcgccgccgtcggtcgccacccgcaaggtttggaggataagattcgggagggatggcttccggtgggcagccgcagttccggtacacgcagccgccgtcgaaggtgctccacctgcggaatctgccgtgggactgcactccagaggagctggtcgagctggggacccccttcggcaaggtcgtcaacaccaagtgcggcgtcggcgccaaccgcaatcaggcattcatcgaattcggcgaccaaaatcaagctattgccatgatatcatattacgcatcgtcaacagagccagcacaggtaagagggaaaaatgtgtaccttcagtactcaaatagacaggagattgtcaacaacaaggcaactggggaaggttcaggcaacgttttgcttgtgggaatggagggtgttgcaccagattctgtcagcattgatgttctacacgtgcaagccgttgtcacggagtatcatggcaggaagcatctggaacacatgtctgtgtttgtttcctctcccttactcatcgctgccctactcctcccctaccctccctcccctgcacctcttctccctacctttcccctcccataccctttcatccaagtaccctcttagggttggtcacatctaccttcgtcgatgtccgttttagttgttattataagttgtatctagttagtgcctaaggttggtggatgcatttttctcaatggaggtcgtttctgattggttacattggtagctggcatatttgtatgattattatcaagtgctcttctctggatttagtaagggaaaagaaagagaaaaggaacataaaatgtaatgcatcaataatagtaaataaatattcttgttttcactaacgccccgtttggatcctcggaattgaattccattctaataatagtaatttaggcaaatatcaattaagctagtatagttttatgcaaaatatatttgtatactattattactttattagcaatatgtgggagatatttatgtgctgcatttttactacagaggagtgagtagaagagtgtcttataagttgcagagtagaaacatattccactgatacacaaaatcattttctatcctccacccccatgaatttgagatagtcttatatctgaactgtggaaagtggcggaatatcaaattccaagccaaatagactactctattaagtaaatttcaattccttcaaaatgaatagatccaaatggcccataaggtaaatataatgaacttgattggcacaaatttgtcatttggttgcactgatttgtgtaacggtttaataccatctttcaagcaggattttagctccttattacagatctgcaagctaccaactcgagttatttgcatctgtattttctgctttcggatttgttcataagatcgctacctttgagaaagcatctggttatcaggctttgattcagttttctgatgctgaaactgcaacatctgcaaaagctgcactggatggtagatgcattcctagctatttgctaccagaactggatgtggcctgcactttgagaataacctattcagcacacagtgttctcaacgtcaagtatcagagccacaggagtagggacttcactaatccttaccttccttttctggactctgctaaagatggctctggaccggatggaaaaaaacaggaagcagagagcaatatactgcttgcttctattgagaacatgcaatatgttgttacaatagatgtgcttcatgagcttttggatttgtacagaagattgctatttttgagaagaatggctttcaagcattgatccagtatccagacattcaaactgcgtatgcagcaaaagaagcactagaagggcacagcatctatgaaggtggctactgcaaactgcacctcacattttcacgccatactgagcttaatgttaaggttaacaatgagcgaggtagagattataccaaggggaatgccactccaagcagtgatcaaccttccattcttggtcctcagccaataccaagcgttggtgctgctattccaccagcacagggtagtgttccttctgcagccaccaattcagtaatgccaccaggggatccatcagttgctctaccttctaatccttccagtgagccactcctgcaagcacctgttgtttcctctggagggcctccgcattaccctaatcaggccatcctacaaggcccacttggtgttgttgcacggttcccaggctatggtgccctgcagtttgctcagggctcagctcaagctcaaatggtgcagccttcaggccaaggaagtcaacatatgtcaggtcatgtaaattatcagctacctccaggttcagcccaattcatgcagtatctcagcaacggaagccatccacttccaaacgcacctgggccacagacaatgccttaccctgccctcagtgggcagcagctacctccgggtcttcagatgatgcaagctcaaggttttggaggcctgccgttttcacagggtcctggacaaccaatgccacagttcccaatgtatggcacccagcagtttcctccgggtatggagcccaagatgatgcgcttctctgagcagggaggccagcagtttacatttgcgccgcggggtccaaatagtcgttagcaaatttgaacttagcaacgttagatcgttgatggtgatgaatggatgtcaagccttctatgttgctgttttctaaggtgaataccgatgctgttccattactaggatctatacttggtttatctctcgtactgtggccaaaacaaatgtctaatctgaggtttcgtagccttgtatttgtatcgatttcctcacgcccgcagcttctgcctgcactgtgttacattacggttatactgcagtagtggaagcaaatgtaaaagaaacctagagacctgatgtgccaggttgaaagcccgtagctgcaaactgtaggctcacatcgcgtccagttataaatttgtttgtgctatgttaagagtacaattgtacaaaccaag

SEQ ID NO: 32696 - DNA, 2280 bp, Zea Mays
cagaggtcgatacggaaccctaggcgtctatccattagaaaattggactgattgaccgcaccgattccgcgatacgttcccgaatccaacccatcttcgtccgctccggccactcgtttcgccgccgtcggtcgccacccgcaaggtttggaggataagattcgggagggatggcttccggtgggcagccgcagttccggtacacgcagccgccgtcgaaggtgctccacctgcggaatctgccgtgggactgcactccagaggagctggtcgagctggggacccccttcggcaaggtcgtcaacaccaagtgcggcgtcggcgccaaccgcaatcaggcattcatcgaattcggcgaccaaaatcaagctattgccatgatatcatattacgcatcgtcaacagagccagcacaggtaagagggaaaaatgtgtaccttcagtactcaaatagacaggagattgtcaacaacaaggcaactggggaaggttcaggcaacgttttgcttgtgggaatggagggtgttgcaccagattctgtcagcattgatgttctacacgtgcaagccgttgtcacggagtatcatggcaggaagcatctggaacacatgtattttctgctttcggatttgttcataagatcgctacctttgagaaagcatctggttatcaggctttgattcagttttctgatgctgaaactgcaacatctgcaaaagctgcactggatggtagatgcattcctagctatttgctaccagaactggatgtggcctgcactttgagaataacctattcagcacacagtgttctcaacgtcaagtatcagagccacaggagtagggacttcactaatccttaccttccttttctggactctgctaaagatggctctggaccggatggaaaaaaacaggaagcagagagcaatatactgcttgcttctattgagaacatgcaatatgttgttacaatagatgtgcttcatgaggtcttttcagcttttggatttgtacagaagattgctatttttgagaagaatggctttcaagcattgatccagtatccagacattcaaactgcgtatgcagcaaaagaagcactagaagggcacagcatctatgaaggtggctactgcaaactgcacctcacattttcacgccatactgagcttaatgttaaggttaacaatgagcgaggtagagattataccaaggggaatgccactccaagcagtgatcaaccttccattcttggtcctcagccaataccaagcgttggtgctgctattccaccagcacagggtagtgttccttctgcagccaccaattcagtaatgccaccaggggatccatcagttgctctaccttctaatccttccagtgagccactcctgcaagcacctgttgtttcctctggagggcctccgcattaccctaatcaggccatcctacaaggcccacttggtgttgttgcacggttcccaggctatggtgccctgcagtttgctcagggctcagctcaagctcaaatggtgcagccttcaggccaaggaagtcaacatatgtcaggtcatgtaaattatcagctacctccaggttcagcccaattcatgcagtatctcagcaacggaagccatccacttccaaacgcacctgggccacagacaatgccttaccctgccctcagtgggcagcagctacctccgggtcttcagatgatgcaagctcaaggttttggaggcctgccgttttcacagggtcctggacaaccaatgccacagttcccaatgtatggcacccagcagtttcctccgggtatggagcccaagatgatgcgcttctctgagcagggaggccagcagtttacatttgcgccgcggggtccaaatagtcgttagcaaatttgaacttagcaacgttagatcgttgatggtgatgaatggatgtcaagccttctatgttgctgttttctaaggtgaataccgatgctgttccattactaggatctatacttggtttatctctcgtactgtggccaaaacaaatgtctaatctgaggtttcgtagccttgtatttgtatcgatttcctcacgcccgcagcttctgcctgcactgtgttacattacggttatactgcagtagtggaagcaaatgtaaaagaaacctagagacctgatgtgccaggttgaaagcccgtagctgcaaactgtaggctcacatcgcgtccagttataaatttgtttgtgctatgttaagagtacaattgtacaaaccaag

SEQ ID NO: 32697 - DNA, 3153 bp, Zea Mays
cggaaccctaggcgtctatccattagaaaattggactgattgaccgcaccgattccgcgatacgttcccgaatccaacccatcttcgtccgctccggccactcgtttcgccgccgtcggtcgccacccgcaaggtttggaggataagattcgggagggatggcttccggtgggcagccgcagttccggtacacgcagccgccgtcgaaggtgctccacctgcggaatctgccgtgggactgcactccagaggagctggtcgagctggggacccccttcggcaaggtcgtcaacaccaagtgcggcgtcggcgccaaccgcaatcaggcattcatcgaattcggcgaccaaaatcaagctattgccatgatatcatattacgcatcgtcaacagagccagcacaggtaagagggaaaaatgtgtaccttcagtactcaaatagacaggagattgtcaacaacaaggcaactggggaaggttcaggcaacgttttgcttgtgggaatggagggtgttgcaccagattctgtcagcattgatgttctacacgtgcaagccgttgtcacggagtatcatggcaggaagcatctggaacacatgtctgtgtttgtttcctctcccttactcatcgctgccctactcctcccctaccctccctcccctgcacctcttctccctacctttcccctcccataccctttcatccaagtaccctcttagggttggtcacatctaccttcgtcgatgtccgttttagttgttattataagttgtatctagttagtgcctaaggttggtggatgcatttttctcaatggaggtcgtttctgattggttacattggtagctggcatatttgtatgattattatcaagtgctcttctctggatttagtaagggaaaagaaagagaaaaggaacataaaatgtaatgcatcaataatagtaaataaatattcttgttttcactaacgccccgtttggatcctcggaattgaattccattctaataatagtaatttaggcaaatatcaattaagctagtatagttttatgcaaaatatatttgtatactattattactttattagcaatatgtgggagatatttatgtgctgcatttttactacagaggagtgagtagaagagtgtcttataagttgcagagtagaaacatattccactgatacacaaaatcattttctatcctccacccccatgaatttgagatagtcttatatctgaactgtggaaagtggcggaatatcaaattccaagccaaatagactactctattaagtaaatttcaattccttcaaaatgaatagatccaaatggcccataaggtaaatataatgaacttgattggcacaaatttgtcatttggttgcactgatttgtgtaacggtttaataccatctttcaagcaggattttagctccttattacagatctgcaagctaccaactcgagttatttgcatctgtattttctgctttcggatttgttcataagatcgctacctttgagaaagcatctggttatcaggctttgattcagttttctgatgctgaaactgcaacatctgcaaaagctgcactggatggtagatgcattcctagctatttgctaccagaactggatgtggcctgcactttgagaataacctattcagcacacagtgttctcaacgtcaagtatcagagccacaggagtagggacttcactaatccttaccttccttttctggactctgctaaagatggctctggaccggatggaaaaaaacaggaagcagagagcaatatactgcttgcttctattgagaacatgcaatatgttgttacaatagatgtgcttcatgaggtcttttcagcttttggatttgtacagaagattgctatttttgagaagaatggctttcaagcattgatccagtatccagacattcaaactgcgtatgcagcaaaagaagcactagaagggcacagcatctatgaaggtggctactgcaaactgcacctcacattttcacgccatactgagcttaatgttaaggttaacaatgagcgaggtagagattataccaaggggaatgccactccaagcagtgatcaaccttccattcttggtcctcagccaataccaagcgttggtgctgctattccaccagcacagggtagtgttccttctgcagccaccaattcagtaatgccaccaggggatccatcagttgctctaccttctaatccttccagtgagccactcctgcaagcacctgttgtttcctctggagggcctccgcattaccctaatcaggccatcctacaaggcccacttggtgttgttgcacggttcccaggctatggtgccctgcagtttgctcagggctcagctcaagctcaaatggtgcagccttcaggccaaggaagtcaacatatgtcaggtcatgtaaattatcagctacctccaggttcagcccaattcatgcagtatctcagcaacggaagccatccacttccaaacgcacctgggccacagacaatgccttaccctgccctcagtgggcagcagctacctccgggtcttcagatgatgcaagctcaaggttttggaggcctgccgttttcacagggtcctggacaaccaatgccacagttcccaatgtatggcacccagcagtttcctccgggtatggagcccaagatgatgcgcttctctgagcagggaggccagcagtttacatttgcgccgcggggtccaaatagtcgttagcaaatttgaacttagcaacgttagatcgttgatggtgatgaatggatgtcaagccttctatgttgctgttttctaaggtgaataccgatgctgttccattactaggatctatacttggtttatctctcgtactgtggccaaaacaaatgtctaatctgaggtttcgtagccttgtatttgtatcgatttcctcacgcccgcagcttctgcctgcactgtgttacattacggttatactgcagtagtggaagcaaatgtaaaagaaacctagagacctgatgtgccaggttgaaagcccgtagctgcaaactgtaggctcacatcgcgtccagttataaatttgtttgtgctatgttaagagtacaattgtacaaaccaag

SEQ ID NO: 32698 - DNA, 3112 bp, Zea Mays
ggaaccctaggcgtctatccattagaaaattggactgattgaccgcaccgattccgcgatacgttcccgaatccaacccatcttcgtccgctccggccactcgtttcgccgccgtcggtcgccacccgcaaggtttggaggataagattcgggagggatggcttccggtgggcagccgcagttccggtacacgcagccgccgtcgaaggtgctccacctgcggaatctgccgtgggactgcactccagaggagctggtcgagctggggacccccttcggcaaggtcgtcaacaccaagtgcggcgtcggcgccaaccgcaatcaggcattcatcgaattcggcgaccaaaatcaagctattgccatgatatcatattacgcatcgtcaacagagccagcacaggtaagagggaaaaatgtgtaccttcagtactcaaatagacaggagattgtcaacaacaaggcaactggggaaggttcaggcaacgttttgcttgtgggaatggagggtgttgcaccagattctgtcagcattgatgttctacacgtggaatactttgatgtgccaggactgtcttagtaacttctagcacattgttttgcatgatctgaatggattagcaagccgttgtcacggagtatcatggcaggaagcatctggaacacatgattttagctccttattacagatctgcaagctaccaactcgagttatttgcatctgtatgttgattaaaagaattactttacaatcttctacatgatgattagattataattcttttgcaatcttttatgtgttaattacaagaactatcttgtgtttatcctccatagtgtcatttggttgacgcacctttaatacgctgttaaggcgagcttcaaaattggaacatgtggattatcagttcataaagaaacatctgtctgaacagtttaatgagtttcactcactttccactgtgaatattgtagatttgatcactttgttactggcgcatgaatgaatgcttgttagctgtgctcgtttctgatctctttctctagacaatccttacaaagcctagaaatgcattgattgatttgattctaatactttaataacagcttgatgtcacaattttacccaggagtgatgataaattcatctgcattatctgtactagcaggttgaaaggttttgaacatgtacagttgtgtgctagtctgctagtacccttgattcattgttattggttattgccgacaaaaactttattgtagttgtaagcttttctgtatgtttgtataaatattaattttgtttggcgtagagatcagacaacctttggctgccactttcaatttaagatcatttcactttccagatatattggtgcatgcatttggttttactataatgtttcacatgtggtattaacagttgacgtatgtgtgcacaggtattttctgctttcggatttgttcataagatcgctacctttgagaaagcatctggttatcaggctttgattcagttttctgatgctgaaactgcaacatctgcaaaagctgcactggatggtagatgcattcctagctatttgctaccagaactggatgtggcctgcactttgagaataacctattcagcacacagtgttctcaacgtcaagtatcagagccacaggagtagggacttcactaatccttaccttccttttctggactctgctaaagatggctctggaccggatggaaaaaaacaggaagcagagagcaatatactgcttgcttctattgagaacatgcaatatgttgttacaatagatgtgcttcatgaggtcttttcagcttttggatttgtacagaagattgctatttttgagaagaatggctttcaagcattgatccagtatccagacattcaaactgcgtatgcagcaaaagaagcactagaagggcacagcatctatgaaggtggctactgcaaactgcacctcacattttcacgccatactgagcttaatgttaaggttaacaatgagcgaggtagagattataccaaggggaatgccactccaagcagtgatcaaccttccattcttggtcctcagccaataccaagcgttggtgctgctattccaccagcacagggtagtgttccttctgcagccaccaattcagtaatgccaccaggggatccatcagttgctctaccttctaatccttccagtgagccactcctgcaagcacctgttgtttcctctggagggcctccgcattaccctaatcaggccatcctacaaggcccacttggtgttgttgcacggttcccaggctatggtgccctgcagtttgctcagggctcagctcaagctcaaatggtgcagccttcaggccaaggaagtcaacatatgtcaggtcatgtaaattatcagctacctccaggttcagcccaattcatgcagtatctcagcaacggaagccatccacttccaaacgcacctgggccacagacaatgccttaccctgccctcagtgggcagcagctacctccgggtcttcagatgatgcaagctcaaggttttggaggcctgccgttttcacagggtcctggacaaccaatgccacagttcccaatgtatggcacccagcagtttcctccgggtatggagcccaagatgatgcgcttctctgagcagggaggccagcagtttacatttgcgccgcggggtccaaatagtcgttagcaaatttgaacttagcaacgttagatcgttgatggtgatgaatggatgtcaagccttctatgttgctgttttctaaggtgaataccgatgctgttccattactaggatctatacttggtttatctctcgtactgtggccaaaacaaatgtctaatctgaggtttcgtagccttgtatttgtatcgatttcctcacgcccgcagcttctgcctgcactgtgttacattacggttatactgcagtagtggaagcaaatgtaaaagaaacctagagacctgatgtgccaggttgaaagcccgtagctgcaaactgtaggctcacatcgcgtccagttataaatttgtttgtgctatgttaagagtacaattgtacaaaccaag

SEQ ID NO: 32699 - DNA, 4190 bp, Zea Mays
taggcgtctatccattagaaaattggactgattgaccgcaccgattccgcgatacgttcccgaatccaacccatcttcgtccgctccggccactcgtttcgccgccgtcggtcgccacccgcaaggtttggaggataagattcgggagggatggcttccggtgggcagccgcagttccggtacacgcagccgccgtcgaaggtgctccacctgcggaatctgccgtgggactgcactccagaggagctggtcgagctggggacccccttcggcaaggtcgtcaacaccaagtgcggcgtcggcgccaaccgcaatcaggcattcatcgaattcggcgaccaaaatcaagctattgccatgatatcatattacgcatcgtcaacagagccagcacaggtaagagggaaaaatgtgtaccttcagtactcaaatagacaggagattgtcaacaacaaggcaactggggaaggttcaggcaacgttttgcttgtgggaatggagggtgttgcaccagattctgtcagcattgatgttctacacgtggtaaggatgttaacagttgcatcgagatttatgttatttaggccaactgattttatctgcaggaatactttgatgtgccaggactgtcttagtaacttctagcacattgttttgcatgatctgaatggattagcaagccgttgtcacggagtatcatggcaggaagcatctggaacacatgtctgtgtttgtttcctctcccttactcatcgctgccctactcctcccctaccctccctcccctgcacctcttctccctacctttcccctcccataccctttcatccaagtaccctcttagggttggtcacatctaccttcgtcgatgtccgttttagttgttattataagttgtatctagttagtgcctaaggttggtggatgcatttttctcaatggaggtcgtttctgattggttacattggtagctggcatatttgtatgattattatcaagtgctcttctctggatttagtaagggaaaagaaagagaaaaggaacataaaatgtaatgcatcaataatagtaaataaatattcttgttttcactaacgccccgtttggatcctcggaattgaattccattctaataatagtaatttaggcaaatatcaattaagctagtatagttttatgcaaaatatatttgtatactattattactttattagcaatatgtgggagatatttatgtgctgcatttttactacagaggagtgagtagaagagtgtcttataagttgcagagtagaaacatattccactgatacacaaaatcattttctatcctccacccccatgaatttgagatagtcttatatctgaactgtggaaagtggcggaatatcaaattccaagccaaatagactactctattaagtaaatttcaattccttcaaaatgaatagatccaaatggcccataaggtaaatataatgaacttgattggcacaaatttgtcatttggttgcactgatttgtgtaacggtttaataccatctttcaagcaggattttagctccttattacagatctgcaagctaccaactcgagttatttgcatctgtatgttgattaaaagaattactttacaatcttctacatgatgattagattataattcttttgcaatcttttatgtgttaattacaagaactatcttgtgtttatcctccatagtgtcatttggttgacgcacctttaatacgctgttaaggcgagcttcaaaattggaacatgtggattatcagttcataaagaaacatctgtctgaacagtttaatgagtttcactcactttccactgtgaatattgtagatttgatcactttgttactggcgcatgaatgaatgcttgttagctgtgctcgtttctgatctctttctctagacaatccttacaaagcctagaaatgcattgattgatttgattctaatactttaataacagcttgatgtcacaattttacccaggagtgatgataaattcatctgcattatctgtactagcaggttgaaaggttttgaacatgtacagttgtgtgctagtctgctagtacccttgattcattgttattggttattgccgacaaaaactttattgtagttgtaagcttttctgtatgtttgtataaatattaattttgtttggcgtagagatcagacaacctttggctgccactttcaatttaagatcatttcactttccagatatattggtgcatgcatttggttttactataatgtttcacatgtggtattaacagttgacgtatgtgtgcacaggtattttctgctttcggatttgttcataagatcgctacctttgagaaagcatctggttatcaggctttgattcagttttctgatgctgaaactgcaacatctgcaaaagctgcactggatggtagatgcattcctagctatttgctaccagaactggatgtggcctgcactttgagaataacctattcagcacacagtgttctcaacgtcaagtatcagagccacaggagtaggtaaggtttactcagttgtcaagcgagattttttattctacatcctgtttgatggatggattctgcgagttttacccattgaattgtttcattttgcatggaaaagtatttttgtctgtcagatcattactttataaatctgggtggtttgtaatattcaaggaatcatatgactcttgattatcctttgctgttttctttagggacttcactaatccttaccttccttttctggactctgctaaagatggctctggaccggatggaaaaaaacaggaagcagagagcaatatactgcttgcttctattgagaacatgcaatatgttgttacaatagatgtgcttcatgagcttttggatttgtacagaagattgctatttttgagaagaatggctttcaagcattgatccagtatccagacattcaaactgcgtatgcagcaaaagaagcactagaagggcacagcatctatgaaggtggctactgcaaactgcacctcacattttcacgccatactgagcttaatgttaaggttaacaatgagcgaggtagagattataccaaggggaatgccactccaagcagtgatcaaccttccattcttggtcctcagccaataccaagcgttggtgctgctattccaccagcacagggtagtgttccttctgcagccaccaattcagtaatgccaccaggggatccatcagttgctctaccttctaatccttccagtgagccactcctgcaagcacctgttgtttcctctggagggcctccgcattaccctaatcaggccatcctacaaggcccacttggtgttgttgcacggttcccaggctatggtgccctgcagtttgctcagggctcagctcaagctcaaatggtgcagccttcaggccaaggaagtcaacatatgtcaggtcatgtaaattatcagctacctccaggttcagcccaattcatgcagtatctcagcaacggaagccatccacttccaaacgcacctgggccacagacaatgccttaccctgccctcagtgggcagcagctacctccgggtcttcagatgatgcaagctcaaggttttggaggcctgccgttttcacagggtcctggacaaccaatgccacagttcccaatgtatggcacccagcagtttcctccgggtatggagcccaagatgatgcgcttctctgagcagggaggccagcagtttacatttgcgccgcggggtccaaatagtcgttagcaaatttgaacttagcaacgttagatcgttgatggtgatgaatggatgtcaagccttctatgttgctgttttctaaggtgaataccgatgctgttccattactaggatctatacttggtttatctctcgtactgtggccaaaacaaatgtctaatctgaggtttcgtagccttgtatttgtatcgatttcctcacgcccgcagcttctgcctgcactgtgttacattacggttatactgcagtagtggaagcaaatgtaaaagaaacctagagacctgatgtgccaggttgaaagcccgtagctgcaaactgtaggctcacatcgcgtccagttataaatttgtttgtgctatgttaagagtacaattgtacaaaccaag

SEQ ID NO: 32700 - DNA, 2293 bp, Zea Mays
aaattggactgattgaccgcaccgattccgcgatacgttcccgaatccaacccatcttcgtccgctccggccactcgtttcgccgccgtcggtcgccacccgcaaggtttggaggataagattcgggagggatggcttccggtgggcagccgcagttccggtacacgcagccgccgtcgaaggtgctccacctgcggaatctgccgtgggactgcactccagaggagctggtcgagctggggacccccttcggcaaggtcgtcaacaccaagtgcggcgtcggcgccaaccgcaatcaggcattcatcgaattcggcgaccaaaatcaagctattgccatgatatcatattacgcatcgtcaacagagccagcacaggtaagagggaaaaatgtgtaccttcagtactcaaatagacaggagattgtcaacaacaaggcaactggggaaggttcaggcaacgttttgcttgtgggaatggagggtgttgcaccagattctgtcagcattgatgttctacacgtggactgtcttagtaacttctagcacattgttttgcatgatctgaatggattagcaagccgttgtcacggagtatcatggcaggaagcatctggaacacatgtattttctgctttcggatttgttcataagatcgctacctttgagaaagcatctggttatcaggctttgattcagttttctgatgctgaaactgcaacatctgcaaaagctgcactggatggtagatgcattcctagctatttgctaccagaactggatgtggcctgcactttgagaataacctattcagcacacagtgttctcaacgtcaagtatcagagccacaggagtagggacttcactaatccttaccttccttttctggactctgctaaagatggctctggaccggatggaaaaaaacaggaagcagagagcaatatactgcttgcttctattgagaacatgcaatatgttgttacaatagatgtgcttcatgaggtcttttcagcttttggatttgtacagaagattgctatttttgagaagaatggctttcaagcattgatccagtatccagacattcaaactgcgtatgcagcaaaagaagcactagaagggcacagcatctatgaaggtggctactgcaaactgcacctcacattttcacgccatactgagcttaatgttaaggttaacaatgagcgaggtagagattataccaaggggaatgccactccaagcagtgatcaaccttccattcttggtcctcagccaataccaagcgttggtgctgctattccaccagcacagggtagtgttccttctgcagccaccaattcagtaatgccaccaggggatccatcagttgctctaccttctaatccttccagtgagccactcctgcaagcacctgttgtttcctctggagggcctccgcattaccctaatcaggccatcctacaaggcccacttggtgttgttgcacggttcccaggctatggtgccctgcagtttgctcagggctcagctcaagctcaaatggtgcagccttcaggccaaggaagtcaacatatgtcaggtcatgtaaattatcagctacctccaggttcagcccaattcatgcagtatctcagcaacggaagccatccacttccaaacgcacctgggccacagacaatgccttaccctgccctcagtgggcagcagctacctccgggtcttcagatgatgcaagctcaaggttttggaggcctgccgttttcacagggtcctggacaaccaatgccacagttcccaatgtatggcacccagcagtttcctccgggtatggagcccaagatgatgcgcttctctgagcagggaggccagcagtttacatttgcgccgcggggtccaaatagtcgttagcaaatttgaacttagcaacgttagatcgttgatggtgatgaatggatgtcaagccttctatgttgctgttttctaaggtgaataccgatgctgttccattactaggatctatacttggtttatctctcgtactgtggccaaaacaaatgtctaatctgaggtttcgtagccttgtatttgtatcgatttcctcacgcccgcagcttctgcctgcactgtgttacattacggttatactgcagtagtggaagcaaatgtaaaagaaacctagagacctgatgtgccaggttgaaagcccgtagctgcaaactgtaggctcacatcgcgtccagttataaatttgtttgtgctatgttaagagtacaattgtacaaaccaag

SEQ ID NO: 32701 - DNA, 2714 bp, Zea Mays
atggccactttccctgttaccaccgcccccactcctcaccagagcactccacccacagccggcctgcccggccacctccgtctgcccactgccgcctccgccgatgccgccctcatcaccctctccgccttcctctcctccggccgcctcacgacctcctccccttccctcctccaccgcaccctccgcgccgccgccgaccaccgcctcccgcggctcggcctgcagctccacgccttcctcgtcaagacccgcttacttgccgaccccttctcggcctccgccctcctccacctctactccaccatcgccccgctgcaccgcacccgcctcctcttcgacaggatccccaagtccacctaccccgtcccctggaacaccatgatcctacggacggattcttggatgaggcgttcgatctgatggtggccatggaggaatccggcatccccattggtgcctccacctggaacgccgtcatcgctgggtgcgtccgagctgagaacggagagctcgccatcgagctgctaggcaaaatggtttcggttgggggagttgtgcccagtgtggccacgttcaacaccgtgctccacgtgatttcggcgttgcgcggggtgaacgtgctccgagagttgcacgcatttgtgctgcgcaacgctgaggttgtgggacttgggcctgtggatttggatcgactccaggaatccctggcggcaggatacatgtgcagctcctgtgtccagtacgcaggccgtgtgtttcgtgatgtcaggataagcacttgcttcctgggcaacctgatgatatcgggatttcttgacacggggcagcggaatcaagccttgggtgttctgcgagaaatggcgtttggctgtggtcatgaagctcagcatctgccatcggcttcgcttacgctggtcctccctgaggtcaatctggcaacaaagagaggcctagagatccatgcttatgcctatcgccatggttttgagtgtgacacctcggtctgcaatgccttgatggcaatgtatgcaagagggggcaagatatgccggtcagacaaggttttccaaggactggatgctaaagatgtcgtgtcatggaatactatgatttcaggctatgccacggttcatgattttgatctctcatttgagctgttccgtgaaatgcaacgtaatggtaccagacctgatgactacacatttacatcagtgctcaacgcctgcagctttgcctgcaatcacaggacagtaatggcattgcacgggcaaatgataaggatggggctttgccattcctatgttgatgatatgaattctctcatggatgcttatggaaagtgtggtttcattgctgaagctcagaagatatttgatgaaaccgagcgaaaggatacagtttcgtggaatatcatcatttcgtgctacggctacagcggttttcctcaacgagcaatcaggcttttccatcagatgcaagatcaaagctacaaacctaccagagtcactttcattgctgtgctagcggcatgcagccatgcaggcttagtagacgaagcactgcgttatttcgaggcaatgcacggagactacagcattaccgctgatgaggctcactatgcctgcatcgttgactgttttggcagagcaggtcagctccaacgggcttatgagttcatcagaggaatgccggtggttccaaatgcttgtgtgtggggtgccctacttagcagttgcaggatacacggaaatataggcctagcagaaattgccgcgaagaagctcgttgagctggaccctcagcattctggatactggatgctgctaaaggatatgtactcaaaagccaagagatggaatgatgtatcgcaacttcgagctgctatgagagataatggcgttaagaagtgcccaggttatagttggattgaggggcgagatagcgaggtccacagattccttaccgctgacaagcttcactcacaaagccaccagatatacgaagtactaggtgggttaaccgagcagttgatggatgaaggatatgaaatagatgtcgatttgacatatactgagtgagggatgtactagatttctacaacttgtcttgaaaatctagccatttagctgacatccctagtcccaacaccatgtctattgcaagcagccacgcgaatcttattcaatgattacaaggttgcacgagctaaagagttcagtttctgcccaggttagaagcgctaagaagtaggcgcaagatgttacattttgggctcgtcatctgatgtgtaagttgatgccttgtcacgaaaagatcagacccggagcattgtgtaacaagaatatacagagttcacagcctagtttcaatatttttttggtgagaaattctgattcaaatattccaccatgactcataggaaaggttcctcaagatttactggataagagaagacaaaatgagattgtggaaacagaaaagcagctgctgacttcagtggcttgtaaaatgccttaacaggagtccttgttggaaaatacagaaggcaaagcagcaacggactgttacttttgaacaagtttgtttcttgctggtagtttgctataacaaaatagtaggggcatgaaataggctggacagagacgacgactactatacaataaacgagtatcttggtccgttagatcatgatttaattttgatccgttaaa

SEQ ID NO: 32702 - DNA, 1709 bp, Zea Mays
catacatctgcgggtccgtctgctgctggtgctgctgctgctggtgcctcgcgcccttcccctggccgcggatctcccacaccacgttgtcacacccgattttagaaggcaaaccgaatgtgaaccatgtacgtgccaggatcagcaattcacgtacacaacagttacataactggacatcatcacacagtgctcaaataataacataaaagggtaaaaatagtcgattacatcatatgtctgagacatccacatagtctttacaataatcaaagtgcggaaaagaaacgtagatacatgcggccttcacaggcagccgactgggggttgccgctaacccacgcctaaaactcgttgtaatattagaactcctggaagtctccttccacggcttcatcttctcctgagcagtggttgcaatgcagacaacctggggatgggggtttggtgtgtagagcaagggtgagtacacatcaacatactcagcaagtgtcctgtttggttgtagtggactagctttatgtggggctaagtcaagcagttgcttttagttggtcagattattattactagtagagaaagccaagttttagaattaacccacgttattaacccaaacgtaccctttccaaacggaaagaataccacttaccgttaccatagttaatgccaaaccatcattctcattgccacctgtaatccgaacatctctgatcaagtgccactaatcaatggagctcccttggccgctcataaccgcgagcacagctgatatatcagtttcataacactctacagaggttgcgcactttacccacaagccgtgattccctcttgcctcgggccgatcaaacccttaaacactaccaaggtgaataggcagggtctcactacgtagcctttacaaagattccctggggttgtagccacccgttaggtttcctaaatgcaccgcactcctccccaaggggcgaaccaaccttagcagagcgagccgcatacaccgagccccattaacggcacgacggcgaagcgaactacaccccagttcctctaattactcagctaagggcatcccattccaccctcatggttgcactgttttcccgggcggtcatccaacgaacaggtccttacggagaagcactcgagaaaccgctcgagcccccttaaatgccacaagtatatcataataaagaagggaaacagcgtatcattaataaatctcatcatgttcattgattatggttaagcactagcataaagctaaaccataataatccaacccaaataggtaaacaaggacatggataacaaaaactagtcaatccttaggtataactgtgtaaatgcgggaagtgaattatagaatgtataggacaaagataggtcaagggacacttgccttcaccaaacagatgctcagggtcttcatcctcgtagaactcgaagagttcgatcacttggtcgccaagcttgatcatcgatccctcgaagctcggaaacggatcacagtctattcgtgacgcacagcgaatacaaacaggcacaaacaaacatatatatatatgcataagaacattacaccattcaaataaaaaaataacaaaatatgcaaaacgaagtagagtgcgttactacggtcacacgaggaaaagaagcgtcgaaatcgaagctatggtcaagaagttaacgggtttacgctaaac

SEQ ID NO: 32703 - DNA, 584 bp, Zea Mays
tctgcgttgcagggagcaggcactgaccatggtggcaaacccgcagcagctagctacggcggagcggagcgggagcgagatagacgagggaagggggtagacgacctcacctcaccagaccatcacgatgaagaacggcgagggaaaacatggacagcaggtcagcgaagctccggtggggaaggtgcttggcgtcggggtttcttcgaccgctcgccggagccgggccacgccacgccgagctgcgcgcaggagagccaagggcggagctgcgccgccggaaagggttggtcgtgcccgagggcagggaggcgctagagagaggggagcggggcgagggagatgcaggggttgttcaaatggtcgacatgggtgggcggttggtgcttttctacatctgggcaagatggacggggacagacagttttgagggagataacaaatgggccccatggcgcagtaccacgccccagcgagggagactgcccggtagggcctggggcaaggagcacctaggcacagctgtgccagcacgctcgacacgcgacgtggctgggccacagggcgtgggagatggtcactaa

SEQ ID NO: 32704 - DNA, 2675 bp, Zea Mays
cccacctccagcgtagaaagggaaaaaaaaaaggggaagcctcttctctccaagtcacgcccctcccacctcgccggcgcgcccgcctcagccgccatgagcgcgctccaggcctccctcctcctccgcccgctcccctcgccactgcccccgcgccgccggcagccgctcccctctgccttcgcctctttgccccgcggtgccaacgcgccccgccgtgccccgctccgcctccgcgcattggaccccatcgcgccgcagcccgacgcctccgagccgcccgcggctgcatcctcgtccgcggcggaggcggaggagtcggagagcacgacgatgacggagtcgacggcacagcccgccacgatgagcgggaaggaggagctggaggacctggtgggcaaggctagggcctgggccgtggcggtcgcggccgcggtggtggccgcggtcaggaggttcgtcgactgggtgctgtcgaggaactggatgagctggtggcccttctggagatccgaccaccgactgcaggggctgatcgaagaggcggacgccaaccccaacgacgctgccaagcagagcgcgctcctccacgagctcaacaagttcagccctgaagaggttattaaaaggtttgagcagcgaagccatgctgtggatagcaagggggctgcagagtacctgcgggcacttattctcactaacactatagcagattaccttccagatgaacaatctgggagatctgcaagtctgccagccctgttgcaagagttgaaacaacgtgtatctgggaatgaggataaacctttcatgaaccctgggatatcagaaaagcaacctttacatgttgtaatggttgaccccaaatctacaggtagatctacacgctttgctcaagaaattgtctcgacgatgttgtttacaattgctgtcggcgtaatgtgggtgatgggtgctgctgcacttcaaaagtatattgggagcttaggtggaattggggcatctggtgttggttctagctcatcatattctccaaaagagatgaataaggatatcatgccagagaagaatgtcaagacatttaaagatgtcaaaggttgtgatgatgcaaaaaaggaacttgaggaggtagttgagtatctcaagaacccttcaaagttcactcgccttggtggaaagctacctaagggcatacttttgactggtgctccaggaactgggaagacactactagcaaaggccattgctggagaagctggtgtaccattcttttaccgagcaggctctgaatttgaggaaatgtttgttggtgttggtgctcggagagtgaggtcattgtttcaagctgcaaagaagaaggcgccatgcattgtcttcattgatgaaatagatgctgtgggttcaactagaaaacagtgggaagggcacacaaagaagacgttgcatcaacttcttgttgagatggacgggtttgaacaaaatgagggaataattgtgatggctgcaacaaacttggcagacattcttgatcctgcactcacaagacctggtagatttgataggcatattgtcgtcccaagtccagatgtgcggggtcgccaagagattctggagctctatttgcaagataagccagtggcaaatgatgtagatatcaatgcaattgcccgtagtacacctggctttaatggggctgacctagccaaccttgtaaacattgcagcgataaaggctgcagttgaaggtgcggacaagttgaatgctgttcagttggagtttgccaaagatcgtattatcatgggaactgagaggagatcaatgttcatatcagatgaatcgagaaagcttactgcgtaccatgaaagtggacatgctattgttgcgctcaacacccagggtgctcaccccatacacaaagcaactatccttcctcgtgggtctgcccttggaatggtcacacaactcccctcacaggatgagacttctattagcaagaaacaactccttgcacgtcttgatgtttgcatgggtgggagggttgctgaagagctgatatttggggaagacaatgttacaactggggcgagaaatgaccttcacactgcaacagagcttgcccagtacatggtatcaaactgtgggatgagtgatgctatcggtcctgtgcatgtgaaagagcgaccaagtgtagagatgcaatcaaggatagatgctgaggtggtgaagctcctaagagaagcttatgggcgggtcaaacgattgcttaaaaagggcgcaacacaccttcggtacatttttcaccttggcaccatttccatttgaggagcagccagtaaatcagaaaatgagaagattggtgttggaaaagccgatgcctgcttattgataattcttgggatggaagaccgccatggtggccggcaaggctctgggttgcaaaaccctccatacttttggttttagctaggatagatataggtgcaacattgcatgctctgaatgctaggtttctggctagggtaacatgtttaccatgttctttttacttctttattacatttgctgtaaggaaatcgtacatatggcggtagtttttttttcaaacaagcactgtttgttttttgtcaaacaatatacgttcaatgtatttgtattgctaacatgcacttgatgcc

SEQ ID NO: 32705 - DNA, 2880 bp, Zea Mays
ctccaagtcacgcccctcccacctcgccggcgcgcccgcctcagccgccatgagcgcgctccaggcctccctcctcctccgcccgctcccctcgccactgcccccgcgccgccggcagccgctcccctctgccttcgcctctttgccccgcggtgccaacgcgccccgccgtgccccgctccgcctccgcgcattggaccccatcgcgccgcagcccgacgcctccgagccgcccgcggctgcatcctcgtccgcggcggaggcggaggagtcggagagcacgacgatgacggagtcgacggcacagcccgccacgatgagcgggaaggaggagctggaggacctggtgggcaaggctagggcctgggccgtggcggtcgcggccgcggtggtggccgcggtcaggaggttcgtcgactgggtgctgtcgaggaactggatgagctggtggcccttctggagatccgaccaccgactgcaggggctgatcgaagaggcggacgccaaccccaacgacgctgccaagcagagcgcgctcctccacgagctcaacaagttcagccctgaagaggttattaaaaggtttgagcagcgaagccatgctgtggatagcaagggggctgcagagtacctgcgggcacttattctcactaacactatagcagattaccttccagatgaacaatctgggagatctgcaagtctgccagccctgttgcaagagttgaaacaacgtgtatctgggaatgaggataaacctttcatgaaccctgggatatcagaaaagcaacctttacatgttgtaatggttgaccccaaatctacaggtagatctacacgctttgctcaagaaattgtctcgacgatgttgtttacaattgctgtcggcgtaatgtgggtgatgggtgctgctgcacttcaaaagtatattgggagcttaggtggaattggggcatctggtgttggttctagctcatcatattctccaaaagagatgaataaggatatcatgccagagaagaatgtcaagacatttaaagatgtcaaaggttgtgatgatgcaaaaaaggaacttgaggaggtagttgagtatctcaagaacccttcaaagttcactcgccttggtggaaagctacctaagggcatacttttgactggtgctccaggaactgggaagacactactagcaaaggccattgctggagaagctggtgtaccattcttttaccgagcaggctctgaatttgaggaaatgtttgttggtgttggtgctcggagagtgaggtcattgtttcaagctgcaaagaagaaggcgccatgcattgtcttcattgatgaaatagatgctgtgggttcaactagaaaacagtgggaagggcacacaaagaagacgttgcatcaacttcttgttgagatggacgggtttgaacaaaatgagggaataattgtgatggctgcaacaaacttggcagacattcttgatcctgcactcacaagacctggtagatttgatagattgtcgtcccaagtccagatgtgcggggtcgccaagagattctggagctctatttgcaagataagccagtggcaaatgatgtagatatcaatgcaattgcccgtagtacacctggctttaatggggctgacctagccaaccttgtaaacattgcagcgataaaggctgcagttgaaggtgcggacaagttgaatgctgttcagttggagtttgccaaagatcgtattatcatgggaactgagaggagatcaatgttcatatcagatgaatcgagaaagcttactgcgtaccatgaaagtggacatgctattgttgcgctcaacacccagggtgctcaccccatacacaaagcaactatccttcctcgtgggtctgcccttggaatggtcacacaactcccctcacaggatgagacttctattagcaagaaacaactccttgcacgtcttgatgtttgcatgggtgggagggttgctgaagagctgatatttggggaagacaatgttacaactggggcgagaaatgaccttcacactgcaacagagcttgcccagtacatggtatcaaactgtgggatgagtgatgctatcggtcctgtgcatgtgaaagagcgaccaagtgtagagatgcaatcaaggatagatgctgaggtggtgaagctcctaagagaagcttatgggcgggtcaaacgattgcttaaaaagcatgagaagcaattacatgctttggcaaatgcgctgctggagcgtgaaacacttactgcagatgagatcaacaaagtagttcacccttaccaagaagaaccccagttttccttccaagacgaggagtttgccctcacttaaaagattcctttgttgcatccagattttacctactgtgaattgtaaatccgtgtacagtaagtggcatctagatgagccatcgaagtttgttcacatgcccccttctgcaaaatagggcgcaacacaccttcggtacatttttcaccttggcaccatttccatttgaggagcagccagtaaatcagaaaatgagaagattggtgttggaaaagccgatgcctgcttattgataattcttgggatggaagaccgccatggtggccggcaaggctctgggttgcaaaaccctccatacttttggttttagctaggatagatataggtgcaacattgcatgctctgaatgctaggtttctggctagggtaacatgtttaccatgttctttttacttctttattacatttgctgtaaggaaatcgtacatatggcggtagtttttttttcaaacaagcactgtttgttttttgtcaaacaatatacgttcaatgtatttgtattgctaacatgcacttgatgcc

SEQ ID NO: 32706 - DNA, 2865 bp, Zea Mays
ctccaagtcacgcccctcccacctcgccggcgcgcccgcctcagccgccatgagcgcgctccaggcctccctcctcctccgcccgctcccctcgccactgcccccgcgccgccggcagccgctcccctctgccttcgcctctttgccccgcggtgccaacgcgccccgccgtgccccgctccgcctccgcgcattggaccccatcgcgccgcagcccgacgcctccgagccgcccgcggctgcatcctcgtccgcggcggaggcggaggagtcggagagcacgacgatgacggagtcgacggcacagcccgccacgatgagcgggaaggaggagctggaggacctggtgggcaaggctagggcctgggccgtggcggtcgcggccgcggtggtggccgcggtcaggaggttcgtcgactgggtgctgtcgaggaactggatgagctggtggcccttctggagatccgaccaccgactgcaggggctgatcgaagaggcggacgccaaccccaacgacgctgccaagcagagcgcgctcctccacgagctcaacaagttcagccctgaagaggttattaaaaggtttgagcagcgaagccatgctgtggatagcaagggggctgcagagtacctgcgggcacttattctcactaacactatagcagattaccttccagatgaacaatctgggagatctgcaagtctgccagccctgttgcaagagttgaaacaacgtgtatctgggaatgaggataaacctttcatgaaccctgggatatcagaaaagcaacctttacatgttgtaatggtagatctacacgctttgctcaagaaattgtctcgacgatgttgtttacaattgctgtcggcgtaatgtgggtgatgggtgctgctgcacttcaaaagtatattgggagcttaggtggaattggggcatctggtgttggttctagctcatcatattctccaaaagagatgaataaggatatcatgccagagaagaatgtcaagacatttaaagatgtcaaaggttgtgatgatgcaaaaaaggaacttgaggaggtagttgagtatctcaagaacccttcaaagttcactcgccttggtggaaagctacctaagggcatacttttgactggtgctccaggaactgggaagacactactagcaaaggccattgctggagaagctggtgtaccattcttttaccgagcaggctctgaatttgaggaaatgtttgttggtgttggtgctcggagagtgaggtcattgtttcaagctgcaaagaagaaggcgccatgcattgtcttcattgatgaaatagatgctgtgggttcaactagaaaacagtgggaagggcacacaaagaagacgttgcatcaacttcttgttgagatggacgggtttgaacaaaatgagggaataattgtgatggctgcaacaaacttggcagacattcttgatcctgcactcacaagacctggtagatttgataggcatattgtcgtcccaagtccagatgtgcggggtcgccaagagattctggagctctatttgcaagataagccagtggcaaatgatgtagatatcaatgcaattgcccgtagtacacctggctttaatggggctgacctagccaaccttgtaaacattgcagcgataaaggctgcagttgaaggtgcggacaagttgaatgctgttcagttggagtttgccaaagatcgtattatcatgggaactgagaggagatcaatgttcatatcagatgaatcgagaaagcttactgcgtaccatgaaagtggacatgctattgttgcgctcaacacccagggtgctcaccccatacacaaagcaactatccttcctcgtgggtctgcccttggaatggtcacacaactcccctcacaggatgagacttctattagcaagaaacaactccttgcacgtcttgatgtttgcatgggtgggagggttgctgaagagctgatatttggggaagacaatgttacaactggggcgagaaatgaccttcacactgcaacagagcttgcccagtacatggtatcaaactgtgggatgagtgatgctatcggtcctgtgcatgtgaaagagcgaccaagtgtagagatgcaatcaaggatagatgctgaggtggtgaagctcctaagagaagcttatgggcgggtcaaacgattgcttaaaaagcatgagaagcaattacatgctttggcaaatgcgctgctggagcgtgaaacacttactgcagatgagatcaacaaagtagttcacccttaccaagaagaaccccagttttccttccaagacgaggagtttgccctcacttaaaagattcctttgttgcatccagattttacctactgtgaattgtaaatccgtgtacagtaagtggcatctagatgagccatcgaagtttgttcacatgcccccttctgcaaaatagggcgcaacacaccttcggtacatttttcaccttggcaccatttccatttgaggagcagccagtaaatcagaaaatgagaagattggtgttggaaaagccgatgcctgcttattgataattcttgggatggaagaccgccatggtggccggcaaggctctgggttgcaaaaccctccatacttttggttttagctaggatagatataggtgcaacattgcatgctctgaatgctaggtttctggctagggtaacatgtttaccatgttctttttacttctttattacatttgctgtaaggaaatcgtacatatggcggtagtttttttttcaaacaagcactgtttgttttttgtcaaacaatatacgttcaatgtatttgtattgctaacatgcacttgatgcc

SEQ ID NO: 32707 - DNA, 2059 bp, Zea Mays
ggacccatttgggtctatagtacgcagccttccctgcatttgcaagagactgtttccacaaaatgaataattggtgatgggtgctgctgcacttcaaaagtatattgggagcttaggtggaattggggcatctggtgttggttctagctcatcatattctccaaaagagatgaataaggatatcatgccagagaagaatgtcaagacatttaaagatgtcaaaggttgtgatgatgcaaaaaaggaacttgaggaggtagttgagtatctcaagaacccttcaaagttcactcgccttggtggaaagctacctaagggcatacttttgactggtgctccaggaactgggaagacactactagcaaaggccattgctggagaagctggtgtaccattcttttaccgagcaggctctgaatttgaggaaatgtttgttggtgttggtgctcggagagtgaggtcattgtttcaagctgcaaagaagaaggcgccatgcattgtcttcattgatgaaatagatgctgtgggttcaactagaaaacagtgggaagggcacacaaagaagacgttgcatcaacttcttgttgagatggacgggtttgaacaaaatgagggaataattgtgatggctgcaacaaacttggcagacattcttgatcctgcactcacaagacctggtagatttgataggcatattgtcgtcccaagtccagatgtgcggggtcgccaagagattctggagctctatttgcaagataagccagtggcaaatgatgtagatatcaatgcaattgcccgtagtacacctggctttaatggggctgacctagccaaccttgtaaacattgcagcgataaaggctgcagttgaaggtgcggacaagttgaatgctgttcagttggagtttgccaaagatcgtattatcatgggaactgagaggagatcaatgttcatatcagatgaatcgagaaagcttactgcgtaccatgaaagtggacatgctattgttgcgctcaacacccagggtgctcaccccatacacaaagcaactatccttcctcgtgggtctgcccttggaatggtcacacaactcccctcacaggatgagacttctattagcaagaaacaactccttgcacgtcttgatgtttgcatgggtgggagggttgctgaagagctgatatttggggaagacaatgttacaactggggcgagaaatgaccttcacactgcaacagagcttgcccagtacatggtatcaaactgtgggatgagtgatgctatcggtcctgtgcatgtgaaagagcgaccaagtgtagagatgcaatcaaggatagatgctgaggtggtgaagctcctaagagaagcttatgggcgggtcaaacgattgcttaaaaagcatgagaagcaattacatgctttggcaaatgcgctgctggagcgtgaaacacttactgcagatgagatcaacaaagtagttcacccttaccaagaagaaccccagttttccttccaagacgaggagtttgccctcacttaaaagattcctttgttgcatccagattttacctactgtgaattgtaaatccgtgtacagtaagtggcatctagatgagccatcgaagtttgttcacatgcccccttctgcaaaatagggcgcaacacaccttcggtacatttttcaccttggcaccatttccatttgaggagcagccagtaaatcagaaaatgagaagattggtgttggaaaagccgatgcctgcttattgataattcttgggatggaagaccgccatggtggccggcaaggctctgggttgcaaaaccctccatacttttggttttagctaggatagatataggtgcaacattgcatgctctgaatgctaggtttctggctagggtaacatgtttaccatgttctttttacttctttattacatttgctgtaaggaaatcgtacatatggcggtagtttttttttcaaacaagcactgtttgttttttgtcaaacaatatacgttcaatgtatttgtattgctaacatgcacttgatgcc

SEQ ID NO: 32708 - DNA, 2840 bp, Zea Mays
cgatacgagtatacgaccacctgagccgcaaacgccaacttcattcttttttccttttttctttctcgtccacgttagattttttttctcttatctctctcgtccattttcgtgagctgtcttggacgtagcttatcgtagctattctcgtgtccctctcccagactcccaccaccacacaaactgccctcgcggcctcgcccgtcgcccctctcgatcacttctctcccgacactctctcactcccgtgtcgtgtctagcgccgacggcgttgctaccggagccggccagcggccacgatgcctacaatgcacgcgcttcgcctatgcccgctgctctccaccatccgatccacaccaccgcgggccactgccgcagcccgccagggcgcgctcttcgtcgcccgctgctcctccgccgggacgccgtcagccgcccaggcgctcaaggaatgtgcctgaagaagtgaagctgatgctattcgctagtctttctgtggaggatgaagatcagttcaatcccgaccaagccagttgaggggcagaagactgggactagtggcctgaggaaaaaggtgaaagtattccagcaggagaactaccttgctaattggattcaggctctattcaattccttgccccctgaagattatgtgggtgcaacccttgtacttgggggtgatggccggtactttaacaaggaggctgctcagatcatcattaagattgcagctggaaatggagttcagaagatcatagttggcaggaatggtctactgtcaacacctgctgtatctgctgtaattcgtaaaagaaaagccaatggcggctttatcatgagtgcaagccataatccaggtggaccagacaatgactggggtattaagtttaactacagcagtggacagccagcaccggagacgattactgatcaaatttatggaaacacactatcaatttctgaaataaaaacagcagacattcctgatactgatttgtcctctgttggagttgtaagctatggtgatttcgccatagaagtgatagatcctgtttcagattaccttgaactaatggagaatgtgtttgacttccaacttatcaaggatttgctttctcggcctgatttcaggttcatatttgatgcaatgcatgcaattactggtgcgtatgccggacccatttttgttgagaaacttggagctgatccggactgcatattaaatggggtgcctcttgaagattttggaaatggccatccagatccaaatctaacttacgctaaggagcttgtttttactatgtttggaacccatgcccctgactttggtgcagcaagtgatggtgatggtgatcggaacatgattcttgggaaaaggttctttattaccccatcagactctgttgcaataattgcagccaatgcacagacagcaattccttatttccagtttggtacaaaaggactcgcgagatcaatgccaaccagtggtgctcttgatcgtgttgccgagaaattgaatgttccattctttgaggttccaacaggctggaaattttttggcaacctaatggatgcaggaaaattgtctatttgtggagaggaaagttttgggactggatctgatcacatcagagagaaggatggcatctgggctgttctggcttggctttccatacttgcacaccggaacaaggataagaaggtcggagagagattagtgtcagttgaagatattgctatggagcactggaaaacctatggcaggaatttcttttctagatacgattatgaggcgtgtgaatcacacagtgcaaaccagatgatggatcaccttagagatgttatggcaaatagcaagcctggagagaaatacggaaattacaccctccaatttgctgatgatttcagctatactgatcctgtagacggtagtacggtatcaaaacaaggacttcgatttgttttcactgatggatctaggattatcttccggctttcgggaaccggatctgctggagctactatccgcctctacatagaacaatttgaatctgatatctcgaagcatagtctcgatgctcaaacagctttgaagcctttaatagacctggctttgtctgtttcgaagctcaaggacttcacaggaagagagaaacctactgtcataacataggccctgtttgtttcggcttttggcagcttctggccaccaaaagctactgcgtactgtcaaacgctcagcttttcagccagcttctataaaattcgttgggggcaaaaaccatctaaaatcaaataaacacataatcggttgagtcgttgtaatagtaggaattcatcactttctagatcctgagccttatgaacaactttatcttcctacacacataatcgtaatgatactcagattctcccacagccagattctccccacagccagattttcagaaaagttggtcagaaaaaagctgaaccaaacagccccataatatttagatgttgttgtcctcggccataccaactgagcagcatgggccaagaattgaactgatggaaaatatgtatcattaggacaaattccgccagaataagttgttcctcggaagtgttttgagcacctccagcatcttccaaatatatctccaataagatattagtgggataacatatggcagatgttatcaaataatgtaaatatagatcgaacacgagacatgttttacgtggagaactcttgtatgaaaaaaaaatcatggatgctaactcgtgattttcattgtattcactatactagtaaagttcacaaaacacggaagatgagtagtcgactcttgatg

SEQ ID NO: 32709 - DNA, 2723 bp, Zea Mays
cttttttctttctcgtccacgttagattttttttctcttatctctctcgtccattttcgtgagctgtcttggacgtagcttatcgtagctattctcgtgtccctctcccagactcccaccaccacacaaactgccctcgcggcctcgcccgtcgcccctctcgatcacttctctcccgacactctctcactcccgtgtcgtgtctagcgccgacggcgttgctaccggagccggccagcggccacgatgcctacaatgcacgcgcttcgcctatgcccgctgctctccaccatccgatccacaccaccgcgggccactgccgcagcccgccagggcgcgctcttcgtcgcccgctgctcctccgccgggacgccgtcagccgcccaggcgctcaagttcaatcccgaccaagccagttgaggggcagaagactgggactagtggcctgaggaaaaaggtgaaagtattccagcaggagaactaccttgctaattggattcaggctctattcaattccttgccccctgaagattatgtgggtgcaacccttgtacttgggggtgatggccggtactttaacaaggaggctgctcagatcatcattaagattgcagctggaaatggagttcagaagatcatagttggcaggaatggtctactgtcaacacctgctgtatctgctgtaattcgtaaaagaaaagccaatggcggctttatcatgagtgcaagccataatccaggtggaccagacaatgactggggtattaagtttaactacagcagtggacagccagcaccggagacgattactgatcaaatttatggaaacacactatcaatttctgaaataaaaacagcagacattcctgatactgatttgtcctctgttggagttgtaagctatggtgatttcgccatagaagtgatagatcctgtttcagattaccttgaactaatggagaatgtgtttgacttccaacttatcaaggatttgctttctcggcctgatttcaggttcatatttgatgcaatgcatgcaattactggtgcgtatgccggacccatttttgttgagaaacttggagctgatccggactgcatattaaatggggtgcctcttgaagattttggaaatggccatccagatccaaatctaacttacgctaaggagcttgtttttactatgtttggaacccatgcccctgactttggtgcagcaagtgatggtgatggtgatcggaacatgattcttgggaaaaggttctttattaccccatcagactctgttgcaataattgcagccaatgcacagacagcaattccttatttccagtttggtacaaaaggactcgcgagatcaatgccaaccagtggtgctcttgatcgtgttgccgagaaattgaatgttccattctttgaggttccaacaggctggaaattttttggcaacctaatggatgcaggaaaattgtctatttgtggagaggaaagttttgggactggatctgatcacatcagagagaaggatggcatctgggctgttctggcttggctttccatacttgcacaccggaacaaggataagaaggtcggagagagattagtgtcagttgaagatattgctatggagcactggaaaacctatggcaggaatttcttttctagatacgattatgaggcgtgtgaatcacacagtgcaaaccagatgatggatcaccttagagatgttatggcaaatagcaagcctggagagaaatacggaaattacaccctccaatttgctgatgatttcagctatactgatcctgtagacggtagtacggtatcaaaacaaggacttcgatttgttttcactgatggatctaggattatcttccggctttcgggaaccggatctgctggagctactatccgcctctacatagaacaatttgaatctgatatctcgaagcatagtctcgatgctcaaacagctttgaagcctttaatagacctggctttgtctgtttcgaagctcaaggacttcacaggaagagagaaacctactgtcataacataggccctgtttgtttcggcttttggcagcttctggccaccaaaagctactgcgtactgtcaaacgctcagcttttcagccagcttctataaaattcgttgggggcaaaaaccatctaaaatcaaataaacacataatcggttgagtcgttgtaatagtaggaattcatcactttctagatcctgagccttatgaacaactttatcttcctacacacataatcgtaatgatactcagattctcccacagccagattctccccacagccagattttcagaaaagttggtcagaaaaaagctgaaccaaacagccccataatatttagatgttgttgtcctcggccataccaactgagcagcatgggccaagaattgaactgatggaaaatatgtatcattaggacaaattccgccagaataagttgttcctcggaagtgttttgagcacctccagcatcttccaaatatatctccaataagatattagtgggataacatatggcagatgttatcaaataatgtaaatatagatcgaacacgagacatgttttacgtggagaactcttgtatgaaaaaaaaatcatggatgctaactcgtgattttcattgtattcactatactagtaaagttcacaaaacacggaagatgagtagtcgactcttgatg

SEQ ID NO: 32710 - DNA, 2413 bp, Zea Mays
cttggacgtagcttatcgtagctattctcgtgtccctctcccagactcccaccaccacacaaactgccctcgcggcctcgcccgtcgcccctctcgatcacttctctcccgacactctctcactcccgtgtcgtgtctagcgccgacggcgttgctaccggagccggccagcggccacgatgcctacaatgcacgcgcttcgcctatgcccgctgctctccaccatccgatccacaccaccgcgggccactgccgcagcccgccagggcgcgctcttcgtcgcccgctgctcctccgccgggacgccgtcagccgcccaggcgctcaagttcaatcccgaccaagccagttgaggggcagaagactgggactagtggcctgaggaaaaaggtgaaagtattccagcaggagaactaccttgctaattggattcaggctctattcaattccttgccccctgaagattatgtgggtgcaacccttgtacttgggggtgatggccggtactttaacaaggaggctgctcagatcatcattaagattgcagctggaaatggagttcagaagatcatagttggcaggaatggtctactgtcaacacctgctgtatctgctgtaattcgtaaaagaaaagccaatggcggctttatcatgagtgcaagccataatccaggtggaccagacaatgactggggtattaagtttaactacagcagtggacagccagcaccggagacgattactgatcaaatttatggaaacacactatcaatttctgaaataaaaacagcagacattcctgatactgatttgtcctctgttggagttgtaagctatggtgatttcgccatagaagtgatagatcctgtttcagattaccttgaactaatggagaatgtgtttgacttccaacttatcaaggatttgctttctcggcctgatttcaggttcatatttgatgcaatgcatgcaattactggtgcgtatgccggacccatttttgttgagaaacttggagctgatccggactgcatattaaatggggtgcctcttgaagattttggaaatggccatccagatccaaatctaacttacgctaaggagcttgtttttactatgtttggaacccatgcccctgactttggtgcagcaagtgatggtgatggtgatcggaacatgattcttgggaaaaggttctttattaccccatcagactctgttgcaataattgcagccaatgcacagacagcaattccttatttccagtttggtacaaaaggactcgcgagatcaatgccaaccagtggtgctcttgatcgtgttgccgagaaattgaatgttccattctttgaggttccaacaggctggaaattttttggcaacctaatggatgcaggaaaattgtctatttgtggagaggaaagttttgggactggatctgatcacatcagagagaaggatggcatctgggctgttctggcttggctttccatacttgcacaccggaacaaggataagaaggtcggagagagattagtgtcagttgaagatattgctatggagcactggaaaacctatggcaggaatttcttttctagatacgattatgaggcgtgtgaatcacacagtgcaaaccagatgatggatcaccttagagatgttatggcaaatagcaagcctggagagaaatacggaaattacaccctccaatttgctgatgatttcagctatactgatcctgtagacggtagtacggtatcaaaacaaggacttcgatttgttttcactgatggatctaggattatcttccggctttcgggaaccggatctgctggagctactatccgcctctacatagaacaatttgaatctgatatctcgaagcatagtctcgatgctcaaacagctttgaagcctttaatagacctggctttgtctgtttcgaagctcaaggacttcacaggaagagagaaacctactgtcataacataggccctgtttgtttcggcttttggcagcttctggccaccaaaagctactgcgtactgtcaaacgctcagcttttcagccagcttctataaaattcgttgggggcaaaaaccatctaaaatcaaagaattgaactgatggaaaatatgtatcattaggacaaattccgccagaataagttgttcctcggaagtgttttgagcacctccagcatcttccaaatatatctccaataagatattagtgggataacatatggcagatgttatcaaataatgtaaatatagatcgaacacgagacatgttttacgtggagaactcttgtatgaaaaaaaaatcatggatgctaactcgtgattttcattgtattcactatactagtaaagttcacaaaacacggaagatgagtagtcgactcttgatg

SEQ ID NO: 32711 - DNA, 2647 bp, Zea Mays
gacgtagcttatcgtagctattctcgtgtccctctcccagactcccaccaccacacaaactgccctcgcggcctcgcccgtcgcccctctcgatcacttctctcccgacactctctcactcccgtgtcgtgtctagcgccgacggcgttgctaccggagccggccagcggccacgatgcctacaatgcacgcgcttcgcctatgcccgctgctctccaccatccgatccacaccaccgcgggccactgccgcagcccgccagggcgcgctcttcgtcgcccgctgctcctccgccgggacgccgtcagccgcccaggcgctcaagatcagttcaatcccgaccaagccagttgaggggcagaagactgggactagtggcctgaggaaaaaggtgaaagtattccagcaggagaactaccttgctaattggattcaggctctattcaattccttgccccctgaagattatgtgggtgcaacccttgtacttgggggtgatggccggtactttaacaaggaggctgctcagatcatcattaagattgcagctggaaatggagttcagaagatcatagttggcaggaatggtctactgtcaacacctgctgtatctgctgtaattcgtaaaagaaaagccaatggcggctttatcatgagtgcaagccataatccaggtggaccagacaatgactggggtattaagtttaactacagcagtggacagccagcaccggagacgattactgatcaaatttatggaaacacactatcaatttctgaaataaaaacagcagacattcctgatactgatttgtcctctgttggagttgtaagctatggtgatttcgccatagaagtgatagatcctgtttcagattaccttgaactaatggagaatgtgtttgacttccaacttatcaaggatttgctttctcggcctgatttcaggttcatatttgatgcaatgcatgcaattactggtgcgtatgccggacccatttttgttgagaaacttggagctgatccggactgcatattaaatggggtgcctcttgaagattttggaaatggccatccagatccaaatctaacttacgctaaggagcttgtttttactatgtttggaacccatgcccctgactttggtgcagcaagtgatggtgatggtgatcggaacatgattcttgggaaaaggttctttattaccccatcagactctgttgcaataattgcagccaatgcacagacagcaattccttatttccagtttggtacaaaaggactcgcgagatcaatgccaaccagtggtgctcttgatcgtgttgccgagaaattgaatgttccattctttgaggctggaaattttttggcaacctaatggatgcaggaaaattgtctatttgtggagaggaaagttttgggactggatctgatcacatcagagagaaggatggcatctgggctgttctggcttggctttccatacttgcacaccggaacaaggataagaaggtcggagagagattagtgtcagttgaagatattgctatggagcactggaaaacctatggcaggaatttcttttctagatacgattatgaggcgtgtgaatcacacagtgcaaaccagatgatggatcaccttagagatgttatggcaaatagcaagcctggagagaaatacggaaattacaccctccaatttgctgatgatttcagctatactgatcctgtagacggtagtacggtatcaaaacaaggacttcgatttgttttcactgatggatctaggattatcttccggctttcgggaaccggatctgctggagctactatccgcctctacatagaacaatttgaatctgatatctcgaagcatagtctcgatgctcaaacagctttgaagcctttaatagacctggctttgtctgtttcgaagctcaaggacttcacaggaagagagaaacctactgtcataacataggccctgtttgtttcggcttttggcagcttctggccaccaaaagctactgcgtactgtcaaacgctcagcttttcagccagcttctataaaattcgttgggggcaaaaaccatctaaaatcaaataaacacataatcggttgagtcgttgtaatagtaggaattcatcactttctagatcctgagccttatgaacaactttatcttcctacacacataatcgtaatgatactcagattctcccacagccagattctccccacagccagattttcagaaaagttggtcagaaaaaagctgaaccaaacagccccataatatttagatgttgttgtcctcggccataccaactgagcagcatgggccaagaattgaactgatggaaaatatgtatcattaggacaaattccgccagaataagttgttcctcggaagtgttttgagcacctccagcatcttccaaatatatctccaataagatattagtgggataacatatggcagatgttatcaaataatgtaaatatagatcgaacacgagacatgttttacgtggagaactcttgtatgaaaaaaaaatcatggatgctaactcgtgattttcattgtattcactatactagtaaagttcacaaaacacggaagatgagtagtcgactcttgatg

SEQ ID NO: 32712 - DNA, 2856 bp, Zea Mays
gacgtagcttatcgtagctattctcgtgtccctctcccagactcccaccaccacacaaactgccctcgcggcctcgcccgtcgcccctctcgatcacttctctcccgacactctctcactcccgtgtcgtgtctagcgccgacggcgttgctaccggagccggccagcggccacgatgcctacaatgcacgcgcttcgcctatgcccgctgctctccaccatccgatccacaccaccgcgggccactgccgcagcccgccagggcgcgctcttcgtcgcccgctgctcctccgccgggacgccgtcagccgcccaggcgctcaaggaatgtgcctgaagaagtgaagctgatgctattcgctagtctttctgtggaggatgaagatcagttcaatcccgaccaagccagttgaggggcagaagactgggactagtggcctgaggaaaaaggttctccatttgattgcttccgagctatgcagatttagtagtatattttattcctctggaaaacattgctgtacaggttcctgtatggtgacacataatggattgcgatagcattctgtgctgttcttttcaggtgaaagtattccagcaggagaactaccttgctaattggattcaggctctattcaattccttgccccctgaagattatgtgggtgcaacccttgtacttgggggtgatggccggtactttaacaaggaggctgctcagatcatcattaagattgcagctggaaatggagttcagaagatcatagttggcaggaatggtctactgtcaacacctgctgtatctgctgtaattcgtaaaagaaaatttaactacagcagtggacagccagcaccggagacgattactgatcaaatttatggaaacacactatcaatttctgaaataaaaacagcagacattcctgatactgatttgtcctctgttggagttgtaagctatggtgatttcgccatagaagtgatagatcctgtttcagattaccttgaactaatggagaatgtgtttgacttccaacttatcaaggatttgctttctcggcctgatttcaggttcatatttgatgcaatgcatgcaattactggtgcgtatgccggacccatttttgttgagaaacttggagctgatccggactgcatattaaatggggtgcctcttgaagattttggaaatggccatccagatccaaatctaacttacgctaaggagcttgtttttactatgtttggaacccatgcccctgactttggtgcagcaagtgatggtgatggtgatcggaacatgattcttgggaaaaggttctttattaccccatcagactctgttgcaataattgcagccaatgcacagacagcaattccttatttccagtttggtacaaaaggactcgcgagatcaatgccaaccagtggtgctcttgatcgtgttgccgagaaattgaatgttccattctttgaggctggaaattttttggcaacctaatggatgcaggaaaattgtctatttgtggagaggaaagttttgggactggatctgatcacatcagagagaaggatggcatctgggctgttctggcttggctttccatacttgcacaccggaacaaggataagaaggtcggagagagattagtgtcagttgaagatattgctatggagcactggaaaacctatggcaggaatttcttttctagatacgattatgaggcgtgtgaatcacacagtgcaaaccagatgatggatcaccttagagatgttatggcaaatagcaagcctggagagaaatacggaaattacaccctccaatttgctgatgatttcagctatactgatcctgtagacggtagtacggtatcaaaacaaggacttcgatttgttttcactgatggatctaggattatcttccggctttcggtacatctgttgcttcgtttcctgaaaaatatataaaaattgttgacgtttgatctaaaacaatatgattaagtatgctcctgcagggaaccggatctgctggagctactatccgcctctacatagaacaatttgaatctgatatctcgaagcatagtctcgatgctcaaacagctttgaagcctttaatagacctggctttgtctgtttcgaagctcaaggacttcacaggaagagagaaacctactgtcataacataggccctgtttgtttcggcttttggcagcttctggccaccaaaagctactgcgtactgtcaaacgctcagcttttcagccagcttctataaaattcgttgggggcaaaaaccatctaaaatcaaataaacacataatcggttgagtcgttgtaatagtaggaattcatcactttctagatcctgagccttatgaacaactttatcttcctacacacataatcgtaatgatactcagattctcccacagccagattctccccacagccagattttcagaaaagttggtcagaaaaaagctgaaccaaacagccccataatatttagatgttgttgtcctcggccataccaactgagcagcatgggccaagaattgaactgatggaaaatatgtatcattaggacaaattccgccagaataagttgttcctcggaagtgttttgagcacctccagcatcttccaaatatatctccaataagatattagtgggataacatatggcagatgttatcaaataatgtaaatatagatcgaacacgagacatgttttacgtggagaactcttgtatgaaaaaaaaatcatggatgctaactcgtgattttcattgtattcactatactagtaaagttcacaaaacacggaagatgagtagtcgactcttgatg

SEQ ID NO: 32713 - DNA, 2583 bp, Zea Mays
gacgtagcttatcgtagctattctcgtgtccctctcccagactcccaccaccacacaaactgccctcgcggcctcgcccgtcgcccctctcgatcacttctctcccgacactctctcactcccgtgtcgtgtctagcgccgacggcgttgctaccggagccggccagcggccacgatgcctacaatgcacgcgcttcgcctatgcccgctgctctccaccatccgatccacaccaccgcgggccactgccgcagcccgccagggcgcgctcttcgtcgcccgctgctcctccgccgggacgccgtcagccgcccaggcgctcaagttcaatcccgaccaagccagttgaggggcagaagactgggactagtggcctgaggaaaaaggtgaaagtattccagcaggagaactaccttgctaattggattcaggctctattcaattccttgccccctgaagattatgtgggtgcaacccttgtacttgggggtgatggccggtactttaacaaggaggctgctcagatcatcattaagattgcagctggaaatggagttcagaagatcatagttggcaggaatggtctactgtcaacacctgctgtatctgctgtaattcgtaaaagaaaatttaactacagcagtggacagccagcaccggagacgattactgatcaaatttatggaaacacactatcaatttctgaaataaaaacagcagacattcctgatactgatttgtcctctgttggagttgtaagctatggtgatttcgccatagaagtgatagatcctgtttcagattaccttgaactaatggagaatgtgtttgacttccaacttatcaaggatttgctttctcggcctgatttcaggttcatatttgatgcaatgcatgcaattactggtgcgtatgccggacccatttttgttgagaaacttggagctgatccggactgcatattaaatggggtgcctcttgaagattttggaaatggccatccagatccaaatctaacttacgctaaggagcttgtttttactatgtttggaacccatgcccctgactttggtgcagcaagtgatggtgatggtgatcggaacatgattcttgggaaaaggttctttattaccccatcagactctgttgcaataattgcagccaatgcacagacagcaattccttatttccagtttggtacaaaaggactcgcgagatcaatgccaaccagtggtgctcttgatcgtgttgccgagaaattgaatgttccattctttgaggttccaacaggctggaaattttttggcaacctaatggatgcaggaaaattgtctatttgtggagaggaaagttttgggactggatctgatcacatcagagagaaggatggcatctgggctgttctggcttggctttccatacttgcacaccggaacaaggataagaaggtcggagagagattagtgtcagttgaagatattgctatggagcactggaaaacctatggcaggaatttcttttctagatacgattatgaggcgtgtgaatcacacagtgcaaaccagatgatggatcaccttagagatgttatggcaaatagcaagcctggagagaaatacggaaattacaccctccaatttgctgatgatttcagctatactgatcctgtagacggtagtacggtatcaaaacaaggacttcgatttgttttcactgatggatctaggattatcttccggctttcgggaaccggatctgctggagctactatccgcctctacatagaacaatttgaatctgatatctcgaagcatagtctcgatgctcaaacagctttgaagcctttaatagacctggctttgtctgtttcgaagctcaaggacttcacaggaagagagaaacctactgtcataacataggccctgtttgtttcggcttttggcagcttctggccaccaaaagctactgcgtactgtcaaacgctcagcttttcagccagcttctataaaattcgttgggggcaaaaaccatctaaaatcaaataaacacataatcggttgagtcgttgtaatagtaggaattcatcactttctagatcctgagccttatgaacaactttatcttcctacacacataatcgtaatgatactcagattctcccacagccagattctccccacagccagattttcagaaaagttggtcagaaaaaagctgaaccaaacagccccataatatttagatgttgttgtcctcggccataccaactgagcagcatgggccaagaattgaactgatggaaaatatgtatcattaggacaaattccgccagaataagttgttcctcggaagtgttttgagcacctccagcatcttccaaatatatctccaataagatattagtgggataacatatggcagatgttatcaaataatgtaaatatagatcgaacacgagacatgttttacgtggagaactcttgtatgaaaaaaaaatcatggatgctaactcgtgattttcattgtattcactatactagtaaagttcacaaaacacggaagatgagtagtcgactcttgatg

SEQ ID NO: 32714 - DNA, 2728 bp, Zea Mays
gacgtagcttatcgtagctattctcgtgtccctctcccagactcccaccaccacacaaactgccctcgcggcctcgcccgtcgcccctctcgatcacttctctcccgacactctctcactcccgtgtcgtgtctagcgccgacggcgttgctaccggagccggccagcggccacgatgcctacaatgcacgcgcttcgcctatgcccgctgctctccaccatccgatccacaccaccgcgggccactgccgcagcccgccagggcgcgctcttcgtcgcccgctgctcctccgccgggacgccgtcagccgcccaggcgctcaagttcaatcccgaccaagccagttgaggggcagaagactgggactagtggcctgaggaaaaaggtgaaagtattccagcaggagaactaccttgctaattggattcaggctctattcaattccttgccccctgaagattatgtgggtgcaacccttgtacttgggggtgatggccggtactttaacaaggaggctgctcagatcatcattaagattgcagctggaaatggagttcagaagatcatagttggcaggaatggtctactgtcaacacctgctgtatctgctgtaattcgtaaaagaaaagccaatggcggctttatcatgagtgcaagccataatccaggtggaccagacaatgactggggtattaagtttaactacagcagtggacagccagcaccggagacgattactgatcaaatttatggaaacacactatcaatttctgaaataaaaacagcagacattcctgatactgatttgtcctctgttggagttgtaagctatggtgatttcgccatagaagtgatagatcctgtttcagattaccttgaactaatggagaatgtgtttgacttccaacttatcaaggatttgctttctcggcctgatttcaggttcatatttgatgcaatgcatgcaattactggtgcgtatgccggacccatttttgttgagaaacttggagctgatccggactgcatattaaatggggtgcctcttgaagattttggaaatggccatccagatccaaatctaacttacgctaaggagcttgtttttactatgtttggaacccatgcccctgactttggtgcagcaagtgatggtgatggtgatcggaacatgattcttgggaaaaggttctttattaccccatcagactctgttgcaataattgcagccaatgcacagacagcaattccttatttccagtttggtacaaaaggactcgcgagatcaatgccaaccagtggtgctcttgatcgtgttgccgagaaattgaatgttccattctttgaggctggaaattttttggcaacctaatggatgcaggaaaattgtctatttgtggagaggaaagttttgggactggatctgatcacatcagagagaaggatggcatctgggctgttctggcttggctttccatacttgcacaccggaacaaggataagaaggtcggagagagattagtgtcagttgaagatattgctatggagcactggaaaacctatggcaggaatttcttttctagatacgattatgaggcgtgtgaatcacacagtgcaaaccagatgatggatcaccttagagatgttatggcaaatagcaagcctggagagaaatacggaaattacaccctccaatttgctgatgatttcagctatactgatcctgtagacggtagtacggtatcaaaacaaggacttcgatttgttttcactgatggatctaggattatcttccggctttcggtacatctgttgcttcgtttcctgaaaaatatataaaaattgttgacgtttgatctaaaacaatatgattaagtatgctcctgcagggaaccggatctgctggagctactatccgcctctacatagaacaatttgaatctgatatctcgaagcatagtctcgatgctcaaacagctttgaagcctttaatagacctggctttgtctgtttcgaagctcaaggacttcacaggaagagagaaacctactgtcataacataggccctgtttgtttcggcttttggcagcttctggccaccaaaagctactgcgtactgtcaaacgctcagcttttcagccagcttctataaaattcgttgggggcaaaaaccatctaaaatcaaataaacacataatcggttgagtcgttgtaatagtaggaattcatcactttctagatcctgagccttatgaacaactttatcttcctacacacataatcgtaatgatactcagattctcccacagccagattctccccacagccagattttcagaaaagttggtcagaaaaaagctgaaccaaacagccccataatatttagatgttgttgtcctcggccataccaactgagcagcatgggccaagaattgaactgatggaaaatatgtatcattaggacaaattccgccagaataagttgttcctcggaagtgttttgagcacctccagcatcttccaaatatatctccaataagatattagtgggataacatatggcagatgttatcaaataatgtaaatatagatcgaacacgagacatgttttacgtggagaactcttgtatgaaaaaaaaatcatggatgctaactcgtgattttcattgtattcactatactagtaaagttcacaaaacacggaagatgagtagtcgactcttgatg

SEQ ID NO: 32715 - DNA, 386 bp, Zea Mays
agataaacaagaatatcagatgaatgggacaacaaaaacgaagaacctagatgccaacgttgactccttgaaggtgaagctcacagctgaggacctgaaggaaattggcagccagatacgtgcagaagatgtggctggtggaagacaatacaattcctatgcacatacctcctggaagtacgcagatacaccaaaaaagtgaagttctggtcctggaaaccttgtagcaatcacaggcgtatgcaaatgttgaactatttccctgcatttgagccggaatcgtacgatgatgcatcttgtgaacatgcggcactaataaatcgagacgaagaataatgtgttttccatcagtgattatgagcagatgatgatttttatccgtgctt

SEQ ID NO: 32716 - DNA, 1684 bp, Zea Mays
gggggaccatacaggctaaggtggaaacaaagacaggagaaagcggcccagtagcgccgccggaggggcaaagctgtaaacttgagctggaagcactgcgcccctgtcttcacaccagtttgctgtttctttttcaccccgagcgcgagaactagggcgaccgcagcactacgcccctgctgcccatgtcttcgtcggggcctttgccggcgaccggaacccaccacggcagatccagaccgtcccaggaacgataaggcaactatacttggtgacacaatccagatgctgaaagatttgactactcaggtgaacaagctgaaagctgaatacacgtcactttctgaagaagcgtgtgagttaacacaagaaaagaatgagcttagagatgagaaagcttcactgaaatctgaggttgataatttgaataatcagtatcagcaacgaatgcgggtgctatacccatgggttggaatggagccttctgttgtcatggggccacctcctgcatatccctacccagtcccagttccaataccctctggtgctgtacccatgcatccgcagttgcaaacataccacttcttccacagtcaagcttctggaaccatccaaaacacatgcatcccttacatggcatatacacaaccctgccatcctcccactgatcagccgtctaaccaacttaatactccagttgcccattcaagtagtcataggtctaactctccagctcaagactgtagaagcaagtcatctacattgcagcaaccaagctgtggagtgagaagcagtgatgctggtgatattgctactgatctggaattgaagactcctggttcttcatgtcaatcacatgcagagattgcttacaacgattcctcttcggatttgaaaacaaagaagcattgcataaagcagattaatgattgcactctcactgaaagcagtagttcaagcagatgctcttccaatggtcccccagatgtttctaatagtgctattgatgaataagctgcttgacgaccgattaacatacaaaccgttgactggtatagattgagaaaagatctcgtttaaccacccataaataatctcatgattgttagtggtaaaagtttggtggaagggaaaaaaggagagaacaaaatcatagacagcagcatctatggtggttcggtagggactccaggactaggtatggtgagcattgtcagtgttcggcatggcaggtagatattcataataactggattctagtaccattgcatagttcgtcctagactggcattttacataaatttctgtgtcaaatatgtaaataactcgagggcggataactggatatatagtgtctatgttggcctattcaacttgctgggtaacgccttgtttgggagcaagtgtattggatgggattgaggggtctaacatcccttactattaggggtgtttcggtagtgatcaattgcatctgaaactgctgcagcttcaagcttgttgtgttggtgtctagtgtctgcatgagtttgttccttggctacggtagctacagcatgctttactgaacaagcccttgaagtttgtacattgagctttggtatatatttgcattggactatagttcttggtgtagtcctattattctcacattacgtttaatggtaaattcgctcacttgttt

SEQ ID NO: 32717 - DNA, 1728 bp, Zea Mays
aaagctgtaaacttgagctggaagcactgcgcccctgtcttcacaccagtttgctgtttctttttcaccccgagcgcgagaactagggcgaccgcagcactacgcccctgctgcccatgtcttcgtcggggcctttgccggcgaccggaacccaccacggcaggtacaaaaggctgatcgtgagaagatgcgaagagataaattaaacgagcagttccaggacttgggaaatgcacttggtgaacaagctgaaagctgaatacacgtcactttctgaagaagcgtgtgagttaacacaagaaaagaatgagcttagagatgagaaagcttcactgaaatctgaggttgataatttgaataatcagtatcagcaacgaatgcgggtgctatacccatgggttggaatggagccttctgttgtcatggggccacctcctgcatatccctacccagtcccagttccaataccctctggtgctgtacccatgcatccgcagttgcaaacataccacttcttccacagtcaagcttctggaaccatccaaaacacatgcatcccttacatggcatatacacaaccctgccatcctcccactgatcagccgtctaaccaacttaatactccagttgcccattcaagtagtcataggtctaactctccagctcaagactgtagaagcaagtcatctacattgcagcaaccaagctgtggagtgagaagcagtgatgctggtgatattgctactgatctggaattgaagactcctggttcttcatgtcaatcacatgcagagattgcttacaacgattcctcttcggatttgaaaacaaagaagcattgcataaagcagattaatgattgcactctcactgaaagcagtagttcaagcagatgctcttccaatggtcccccagatgtttctaatagtgctattgatgaataagctgcttgacgaccgattaacatacaaaccgttgactggtatagattgagaaaagatctcgtttaaccacccataagtgagctcccaactctatatgcagtgtaatttgctattgttgctagcttatttacatagaagtggtcagattctaatgtgatgactcacaaattgggaggcgtggactttgtagataatctcatgattgttagtggtaaaagtttggtggaagggaaaaaaggagagaacaaaatcatagacagcagcatctatggtggttcggtagggactccaggactaggtatggtgagcattgtcagtgttcggcatggcaggtagatattcataataactggattctagtaccattgcatagttcgtcctagactggcattttacataaatttctgtgtcaaatatgtaaataactcgagggcggataactggatatatagtgtctatgttggcctattcaacttgctgggtaacgccttgtttgggagcaagtgtattggatgggattgaggggtctaacatcccttactattaggggtgtttcggtagtgatcaattgcatctgaaactgctgcagcttcaagcttgttgtgttggtgtctagtgtctgcatgagtttgttccttggctacggtagctacagcatgctttactgaacaagcccttgaagtttgtacattgagctttggtatatatttgcattggactatagttcttggtgtagtcctattattctcacattacgtttaatggtaaattcgctcacttgttt

SEQ ID NO: 32718 - DNA, 1844 bp, Zea Mays
aagctgtaaacttgagctggaagcactgcgcccctgtcttcacaccagtttgctgtttctttttcaccccgagcgcgagaactagggcgaccgcagcactacgcccctgctgcccatgtcttcgtcggggcctttgccggcgaccggaacccaccacggcagtcaaagggcagagtgtaaatcccagggttccacttctgcacgcaaggtacaaaaggctgatcgtgagaagatgcgaagagataaattaaacgagcagttccaggacttgggaaatgcacttgaccgtcccaggaacgataaggcaactatacttggtgacacaatccagatgctgaaagatttgactactcaggtgaacaagctgaaagctgaatacacgtcactttctgaagaagcgtgtgagttaacacaagaaaagaatgagcttagagatgagaaagcttcactgaaatctgaggttgataatttgaataatcagtatcagcaacgaatgcgggtgctatacccatgggttggaatggagccttctgttgtcatggggccacctcctgcatatccctacccagtcccagttccaataccctctggtgctgtacccatgcatccgcagttgcaaacataccacttcttccacagtcaagcttctggaaccatccaaaacacatgcatcccttacatggcatatacacaaccctgccatcctcccactgatcagccgtctaaccaacttaatactccagttgcccattcaagtagtcataggtctaactctccagctcaagactgtagaagcaagtcatctacattgcagcaaccaagctgtggagtgagaagcagtgatgctggtgatattgctactgatctggaattgaagactcctggttcttcatgtcaatcacatgcagagattgcttacaacgattcctcttcggatttgaaaacaaagaagcattgcataaagcagattaatgattgcactctcactgaaagcagtagttcaagcagatgctcttccaatggtcccccagatgtttctaatagtgctattgatgaataagctgcttgacgaccgattaacatacaaaccgttgactggtatagattgagaaaagatctcgtttaaccacccataagtgagctcccaactctatatgcagtgtaatttgctattgttgctagcttatttacatagaagtggtcagattctaatgtgatgactcacaaattgggaggcgtggactttgtagataatctcatgattgttagtggtaaaagtttggtggaagggaaaaaaggagagaacaaaatcatagacagcagcatctatggtggttcggtagggactccaggactaggtatggtgagcattgtcagtgttcggcatggcaggtagatattcataataactggattctagtaccattgcatagttcgtcctagactggcattttacataaatttctgtgtcaaatatgtaaataactcgagggcggataactggatatatagtgtctatgttggcctattcaacttgctgggtaacgccttgtttgggagcaagtgtattggatgggattgaggggtctaacatcccttactattaggggtgtttcggtagtgatcaattgcatctgaaactgctgcagcttcaagcttgttgtgttggtgtctagtgtctgcatgagtttgttccttggctacggtagctacagcatgctttactgaacaagcccttgaagtttgtacattgagctttggtatatatttgcattggactatagttcttggtgtagtcctattattctcacattacgtttaatggtaaattcgctcacttgttt

SEQ ID NO: 32719 - DNA, 1799 bp, Zea Mays
aagctgtaaacttgagctggaagcactgcgcccctgtcttcacaccagtttgctgtttctttttcaccccgagcgcgagaactagggcgaccgcagcactacgcccctgctgcccatgtcttcgtcggggcctttgccggcgaccggaacccaccacggcagtcaaagggcagagtgtaaatcccagggttccacttctgcacgcaaggtacaaaaggctgatcgtgagaagatgcgaagagataaattaaacgagcagttccaggacttgggaaatgcacttgatccagaccgtcccaggaacgataaggcaactatacttggtgacacaatccagatgctgaaagatttgactactcagttaacacaagaaaagaatgagcttagagatgagaaagcttcactgaaatctgaggttgataatttgaataatcagtatcagcaacgaatgcgggtgctatacccatgggttggaatggagccttctgttgtcatggggccacctcctgcatatccctacccagtcccagttccaataccctctggtgctgtacccatgcatccgcagttgcaaacataccacttcttccacagtcaagcttctggaaccatccaaaacacatgcatcccttacatggcatatacacaaccctgccatcctcccactgatcagccgtctaaccaacttaatactccagttgcccattcaagtagtcataggtctaactctccagctcaagactgtagaagcaagtcatctacattgcagcaaccaagctgtggagtgagaagcagtgatgctggtgatattgctactgatctggaattgaagactcctggttcttcatgtcaatcacatgcagagattgcttacaacgattcctcttcggatttgaaaacaaagaagcattgcataaagcagattaatgattgcactctcactgaaagcagtagttcaagcagatgctcttccaatggtcccccagatgtttctaatagtgctattgatgaataagctgcttgacgaccgattaacatacaaaccgttgactggtatagattgagaaaagatctcgtttaaccacccataagtgagctcccaactctatatgcagtgtaatttgctattgttgctagcttatttacatagaagtggtcagattctaatgtgatgactcacaaattgggaggcgtggactttgtagataatctcatgattgttagtggtaaaagtttggtggaagggaaaaaaggagagaacaaaatcatagacagcagcatctatggtggttcggtagggactccaggactaggtatggtgagcattgtcagtgttcggcatggcaggtagatattcataataactggattctagtaccattgcatagttcgtcctagactggcattttacataaatttctgtgtcaaatatgtaaataactcgagggcggataactggatatatagtgtctatgttggcctattcaacttgctgggtaacgccttgtttgggagcaagtgtattggatgggattgaggggtctaacatcccttactattaggggtgtttcggtagtgatcaattgcatctgaaactgctgcagcttcaagcttgttgtgttggtgtctagtgtctgcatgagtttgttccttggctacggtagctacagcatgctttactgaacaagcccttgaagtttgtacattgagctttggtatatatttgcattggactatagttcttggtgtagtcctattattctcacattacgtttaatggtaaattcgctcacttgttt

SEQ ID NO: 32720 - DNA, 1669 bp, Zea Mays
ctagcatcgatttttcactgcaagtcaaatgaaaaatttgcaccataggaccacccaagttttccaaacccttttccacgagcgaacccttcctaaagataagatccagaccgtcccaggaacgataaggcaactatacttggtgacacaatccagatgctgaaagatttgactactcaggtgaacaagctgaaagctgaatacacgtcactttctgaagaagcgtgtgagttaacacaagaaaagaatgagcttagagatgagaaagcttcactgaaatctgaggttgataatttgaataatcagtatcagcaacgaatgcgggtgctatacccatgggttggaatggagccttctgttgtcatggggccacctcctgcatatccctacccagtcccagttccaataccctctggtgctgtacccatgcatccgcagttgcaaacataccacttcttccacagtcaagcttctggaaccatccaaaacacatgcatcccttacatggcatatacacaaccctgccatcctcccactgatcagccgtctaaccaacttaatactccagttgcccattcaagtagtcataggtctaactctccagctcaagactgtagaagcaagtcatctacattgcagcaaccaagctgtggagtgagaagcagtgatgctggtgatattgctactgatctggaattgaagactcctggttcttcatgtcaatcacatgcagagattgcttacaacgattcctcttcggatttgaaaacaaagaagcattgcataaagcagattaatgattgcactctcactgaaagcagtagttcaagcagatgctcttccaatggtcccccagatgtttctaatagtgctattgatgaataagctgcttgacgaccgattaacatacaaaccgttgactggtatagattgagaaaagatctcgtttaaccacccataagtgagctcccaactctatatgcagtgtaatttgctattgttgctagcttatttacatagaagtggtcagattctaatgtgatgactcacaaattgggaggcgtggactttgtagataatctcatgattgttagtggtaaaagtttggtggaagggaaaaaaggagagaacaaaatcatagacagcagcatctatggtggttcggtagggactccaggactaggtatggtgagcattgtcagtgttcggcatggcaggtagatattcataataactggattctagtaccattgcatagttcgtcctagactggcattttacataaatttctgtgtcaaatatgtaaataactcgagggcggataactggatatatagtgtctatgttggcctattcaacttgctgggtaacgccttgtttgggagcaagtgtattggatgggattgaggggtctaacatcccttactattaggggtgtttcggtagtgatcaattgcatctgaaactgctgcagcttcaagcttgttgtgttggtgtctagtgtctgcatgagtttgttccttggctacggtagctacagcatgctttactgaacaagcccttgaagtttgtacattgagctttggtatatatttgcattggactatagttcttggtgtagtcctattattctcacattacgtttaatggtaaattcgctcacttgttt

SEQ ID NO: 32721 - DNA, 3182 bp, Zea Mays
agcccctgctcggttctcgccctctctatcttttttctttcttcctctttttcttcttcctccccaaccaacgacattggtctttcctgccacatcgaccaccagctcaagttgttggttccccatgctcctctcgcctaagaggaaagtaatattcttcttatttcttgtttctatggtggatttaaagattagccttgattgctagcgttcgaaggaaaagtatatttggctagagatgtaaagtattttaggtagatcgaatgcattatgaaacttcgattgaatgcgtccgaatgtagttgcatgtgctatatgtttaagtcaattagctataaatttgagttggtgtgtttaagtttaggttacatttggtcaacatatttatattttagtttgatagttataatgcttaggcttaattttagtgtatttagtttgtgagtataggttatatgtctacatgtacattaatttaaaatacttagattgttgtataaagacaaagaaacttgttttttataatcttatatttagatagatggaggacatgtggtgggagaagtggcgaaaacagggccatctgatttatacctgaatgaatcttgcgaggatgaacctataccttttgagctattggtgcctaactatgactgtgatgagccagaccacaatcaaggcatccagacaaagttgctcatgcgccttcaaggatgcacttgtccccctgagccactgatgtctaactaactgtgataagccagaccacatgtttcaatcgagcatccatacataattgcacattgcttggttattttaatgaccatgagaggtgcctttccttttagtagatcgatgatcctaacaagtcaatccaaggtacctttttaacgaccggtggagagggagatggccacatgagaactttaagtgatggtttttatctccctccaaccctccaccaatcatggatgggtagaacaaagtcaccaatgaacgacttgagaatccttctctttgtgactgaggagatctagttgtgcttgcacctatgagtttgcttgagtttgagtatgctaacaagaatgaagtgagttcatctttgtttctttttaaccttgtatttgtcagcacaaaattaataatttgtcgtagtctgtagcacgaatatgggaaatgtcattacaatgagtgggtatatagacctaaatctcattggacggatccaaagcaagagaaagagaaggaacatattgtagcctctagtactctgcaaatatggtgttgaagcctactacgacctagttttttagaggctagaatatgtcattatgcggtcatacggttggttatgatgaggttggttataccttttaagaaaatttttaatttaacttgtggtatgcaatgattatttttaatagagcactagaaaatatgactaggatgattttgatttttagatgtgaattcgaggatacaaccaggcaaacacaagtgatgcaacaaaagttaaagtgtggatttcagctcatcaataatttagttaagccccacaaagagaagttacaccatcaaacatgagaattgagtctacttcatctgatacatctatgtacaaacgagtggtatgtttgggagatacagtggcagtgggttgagtccactagaagataaagctccaacggtcgacagcgcccgaaccctaacggttgggtgacgtggctggcgcaccggactgtccggtgcgtccatcgacagcagccactcccaacgactatatggtggttgagggctataaataccccccaaccaccaccactccaagcatccaagatttctgagtatcacatttattacaagagctctagcattcactcctaaacacaattcaaaagatcaaagcctctccaagtccccaattcatctcaaacatttagtgacttgtgagagagagattttgtgttcttttgagctcttgcctcttggattaccttcttcctttctcatttcttttctcaagtgatttgtaatcgaagcaagagacacctaagtgtgtagtggtccttgcggggtctaagtgacccagaagattaaggaaaaggctcactcggtctaagtgaccatttgagagagggaaagggttgaaagagacccggtctttgtgaccacctcaacggggactaggttcttaagaacagaacctcgataaaacaaatcaccgtgttcatccgccttatttcttggttgatttgttttccctctatcttccggacttaatattcattctaacgccaacctcggcttgtagtgtgtggttaaagttgtaaatttcagattctatctatccaccccctctagacgactttcagtaactcaagctaaaaatcatcatgctccgagtccttcccatctatgttcttatcatactatacttttatatatagaaatatgatatatagttttgcatatagaaatacaagatacaccttatagtcacggtagtgggctgactacaatgtaaacgagatatactatatttgaatacggcataatcctgtattaatacaagataaacggggtcgaaatatggcctaaaccatttttgttctgttttcattttccatctcgttttcgtattgttttcacatttgtccgaaaatacaaattcaagcagagtaaatataaaaatcggtagaaacgaacatgatttttccccaaccatttacatacctactccttcctaagacaaatcaacttctaaagttaacctaagtcaaattattttaagttaactaaactatagaaaaaattattaatacttgtgacattaaagtagtattgcaggacataccgaaaagtatacttttataatctgtttattcgcaaaacagtctctaactaagttggttttatgatctaagtagcactccttatgtcctaagttttttatagaaaaaatatatcatctatctcacgccaaaagcacaagtcttagacaaaatttacttcttaatacaatgcctgacggcggccttacctacatgcacagatcgagttttttataatctacttatttaatgtcatattttttttgttatttttactataaagttggtcaaactcaaggtagtttgacttagggtgattcaagaagttaatttattttgggacaaagagag

SEQ ID NO: 32722 - DNA, 2793 bp, Zea Mays
agcccctgctcggttctcgccctctctatcttttttctttcttcctctttttcttcttcctccccaaccaacgacattggtctttcctgccacatcgaccaccagctcaagttgttggttccccatgctcctctcgcctaagaggaaaatagatggaggacatgtggtgggagaagtggcgaaaacagggccatctgatttatacctgaatgaatcttgcgaggatgaacctataccttttgagctattggtgcctaactatgactgtgatgagccagaccacaatcaaggcatccagacaaagttgctcatgcgccttcaaggatgcacttgtccccctgagccactgatgtctaactaactgtgataagccagaccacatgtttcaatcgagcatccatacataattgcacattgcttggttattttaatgaccatgagaggtgcctttccttttagtagatcgatgatcctaacaagtcaatccaaggtacctttttaacgaccggtggagagggagatggccacatgagaactttaagtgatggtttttatctccctccaaccctccaccaatcatggatgggtagaacaaagtcaccaatgaacgacttgagaatccttctctttgtgactgaggagatctagttgtgcttgcacctatgagtttgcttgagtttgagtatgctaacaagaatgaagtgagttcatctttgtttctttttaaccttgtatttgtcagcacaaaattaataatttgtcgtagtctgtagcacgaatatgggaaatgtcattacaatgagtgggtatatagacctaaatctcattggacggatccaaagcaagagaaagagaaggaacatattgtagcctctagtactctgcaaatatggtgttgaagcctactacgacctagttttttagaggctagaatatgtcattatgcggtcatacggttggttatgatgaggttggttataccttttaagaaaatttttaatttaacttgtggtatgcaatgattatttttaatagagcactagaaaatatgactaggatgattttgatttttagatgtgaattcgaggatacaaccaggcaaacacaagtgatgcaacaaaagttaaagtgtggatttcagctcatcaataatttagttaagccccacaaagagaagttacaccatcaaacatgagaattgagtctacttcatctgatacatctatgtacaaacgagtggtatgtttgggagatacagtggcagtgggttgagtccactagaagataaagctccaacggtcgacagcgcccgaaccctaacggttgggtgacgtggctggcgcaccggactgtccggtgcgtccatcgacagcagccactcccaacgactatatggtggttgagggctataaataccccccaaccaccaccactccaagcatccaagatttctgagtatcacatttattacaagagctctagcattcactcctaaacacaattcaaaagatcaaagcctctccaagtccccaattcatctcaaacatttagtgacttgtgagagagagattttgtgttcttttgagctcttgcctcttggattaccttcttcctttctcatttcttttctcaagtgatttgtaatcgaagcaagagacacctaagtgtgtagtggtccttgcggggtctaagtgacccagaagattaaggaaaaggctcactcggtctaagtgaccatttgagagagggaaagggttgaaagagacccggtctttgtgaccacctcaacggggactaggttcttaagaacagaacctcgataaaacaaatcaccgtgttcatccgccttatttcttggttgatttgttttccctctatcttccggacttaatattcattctaacgccaacctcggcttgtagtgtgtggttaaagttgtaaatttcagattctatctatccaccccctctagacgactttcagtaactcaagctaaaaatcatcatgctccgagtccttcccatctatgttcttatcatactatacttttatatatagaaatatgatatatagttttgcatatagaaatacaagatacaccttatagtcacggtagtgggctgactacaatgtaaacgagatatactatatttgaatacggcataatcctgtattaatacaagataaacggggtcgaaatatggcctaaaccatttttgttctgttttcattttccatctcgttttcgtattgttttcacatttgtccgaaaatacaaattcaagcagagtaaatataaaaatcggtagaaacgaacatgatttttccccaaccatttacatacctactccttcctaagacaaatcaacttctaaagttaacctaagtcaaattattttaagttaactaaactatagaaaaaattattaatacttgtgacattaaagtagtattgcaggacataccgaaaagtatacttttataatctgtttattcgcaaaacagtctctaactaagttggttttatgatctaagtagcactccttatgtcctaagttttttatagaaaaaatatatcatctatctcacgccaaaagcacaagtcttagacaaaatttacttcttaatacaatgcctgacggcggccttacctacatgcacagatcgagttttttataatctacttatttaatgtcatattttttttgttatttttactataaagttggtcaaactcaaggtagtttgacttagggtgattcaagaagttaatttattttgggacaaagagag

SEQ ID NO: 32723 - DNA, 2469 bp, Zea Mays
cgacattggtctttcctgccacatcgaccaccagctcaagttgttggttccccatgctcctctcgcctaagaggaaagtaatattcttcttatttcttgtttctatggtggatttaaagattagccttgattgctagcgttcgaaggaaaagtatatttggctagagatgtaaagtattttaggtagatcgaatgcattatgaaacttcgattgaatgcgtccgaatgtagttgcatgtgctatatgtttaagtcaattagctataaatttgagttggtgtgtttaagtttaggttacatttggtcaacatatttatattttagtttgatagttataatgcttaggcttaattttagtgtatttagtttgtgagtataggttatatgtctacatgtacattaatttaaaatacttagattgttgtataaagacaaagaaacttgttttttataatcttatatttagatagatggaggacatgtggtgggagaagtggcgaaaacagggccatctgatttatacctgaatgaatcttgcgaggatgaacctataccttttgagctattggtgcctaactatgactgtgatgagccagaccacaatcaaggcatccagacaaagttgctcatgcgccttcaaggatgcacttgtccccctgagccactgatgtctaactaactgtgataagccagaccacatgtttcaatcgagcatccatacataattgcacattgcttggttattttaatatgtgaattcgaggatacaaccaggcaaacacaagtgatgcaacaaaagttaaagtgtggatttcagctcatcaataatttagttaagccccacaaagagaagttacaccatcaaacatgagaattgagtctacttcatctgatacatctatgtacaaacgagtggtatgtttgggagatacagtggcagtgggttgagtccactagaagataaagctccaacggtcgacagcgcccgaaccctaacggttgggtgacgtggctggcgcaccggactgtccggtgcgtccatcgacagcagccactcccaacgactatatggtggttgagggctataaataccccccaaccaccaccactccaagcatccaagatttctgagtatcacatttattacaagagctctagcattcactcctaaacacaattcaaaagatcaaagcctctccaagtccccaattcatctcaaacatttagtgacttgtgagagagagattttgtgttcttttgagctcttgcctcttggattaccttcttcctttctcatttcttttctcaagtgatttgtaatcgaagcaagagacacctaagtgtgtagtggtccttgcggggtctaagtgacccagaagattaaggaaaaggctcactcggtctaagtgaccatttgagagagggaaagggttgaaagagacccggtctttgtgaccacctcaacggggactaggttcttaagaacagaacctcgataaaacaaatcaccgtgttcatccgccttatttcttggttgatttgttttccctctatcttccggacttaatattcattctaacgccaacctcggcttgtagtgtgtggttaaagttgtaaatttcagattctatctatccaccccctctagacgactttcagtaactcaagctaaaaatcatcatgctccgagtccttcccatctatgttcttatcatactatacttttatatatagaaatatgatatatagttttgcatatagaaatacaagatacaccttatagtcacggtagtgggctgactacaatgtaaacgagatatactatatttgaatacggcataatcctgtattaatacaagataaacggggtcgaaatatggcctaaaccatttttgttctgttttcattttccatctcgttttcgtattgttttcacatttgtccgaaaatacaaattcaagcagagtaaatataaaaatcggtagaaacgaacatgatttttccccaaccatttacatacctactccttcctaagacaaatcaacttctaaagttaacctaagtcaaattattttaagttaactaaactatagaaaaaattattaatacttgtgacattaaagtagtattgcaggacataccgaaaagtatacttttataatctgtttattcgcaaaacagtctctaactaagttggttttatgatctaagtagcactccttatgtcctaagttttttatagaaaaaatatatcatctatctcacgccaaaagcacaagtcttagacaaaatttacttcttaatacaatgcctgacggcggccttacctacatgcacagatcgagttttttataatctacttatttaatgtcatattttttttgttatttttactataaagttggtcaaactcaaggtagtttgacttagggtgattcaagaagttaatttattttgggacaaagagag

SEQ ID NO: 32724 - DNA, 3547 bp, Zea Mays
ccgaagcggtcacaacacctcgcatgcctctacggctctacgcctcccgctacacacccacacccaccacggcccaccttccgccttgcgactccaaaaccctccctccttccccttccttgccccgccctagggttcgcgccgccgcgctgaccctgtcgtagccatggggtcctcgctcccgcccaaggaagccaacctcttcaaagtcatcgtcaaatcctacgagactaagcaatataagaaagggcttaaggctgcagattccatattaaaaaagtttccagagcatggtgaaacactatcaatgaaaggtttgacgctaaactgcatggaccgaaaatctgaagcgtacgagcttgttcgacgaggcctgaagaatgatctgaagagtcatgtctgttggcatgtttatggtttgctttatcggtcagatagagaatacagagaagctataaaatgttacagaaatgcattgaggattgatccagataacatagaaattcttcgtgacttgtcccttctccaggcacagatgagggacttgtctggctttgttgagactaggcaacaacttttgtcgttaaagccaaatcaccgcatgaactggattggttttgcggttgctcatcatttgaattctaattcttccaaggcagtagaagtattggaggcatacgagggaacactggaagatgattatcctccagagaatgagcgatatgaacacaatgaaatgctgctgtataagatatcattgtttgaagaatgtgggatgctagacagagcccttgaggaaatgcagaagaaggagagcaaaattgttgacaagctatcattcaaagaacaaatggcatccgtcttgttcaaacttggccgctttgatgaatctgagagcatatacagatccctgctttttatgaatcctgataactacaatgccttggcttatactctgataatggtcaatattctgctgctgatgttgagcgcttaagtgcattgtacaactcacttaaagagaagtatgcttggtcatctgctgtgaagcgtatccctcttgattttctggaaggtgagaagttccaggaggcagcagacaactatgtcagacctctattaacaaagggtgtgccctcactattttccgatttaagcccactgtatgaacatcctggcaaggcaaacatactggagcagttatttcttaaactagaagattcaattagggattctggatgctttcctggatgtccacagaaggagcctccttccacactgttgtggaccctgtttttgatttctcagcactacgacagaagagggcaatatgacattgctttgaataaaatcgatgaggctatctcacatacaccgactgtcatcgatctatattcagtaaagggaaagatattgcaacatgctggaaatttcacagcagcagccgcattagcagatgaagctaggtccatggatcttgctgatcgttatttaaacagcgagtgtgttatgcagatgcttcaggctgaccaggttggccttgccgagaagactgctgtcttgtttacaaaagatggtgatcaacacaataatcttcatgacatgcagtgcatgtggtatgagcttgcttctggggagagctattaccgtcaaggtgatcttggccgggccctaaaaaatttcttggcagttgaaaagcattacgctgatatgactgaagatcaatttgacttccattcatattgcttgcggaaaatgacacttcgagcatatgtttctatgctgaagtttcaggatcgtttgcatgctcatgaatacttccacaaggctgctgctggagctatcaggtgctatatgaaactacatgattctccaacaaaatcttctaaggaagagaatgatgagatatcaaaactgccacctgctcagaggaagaagttgaggcaaaagcagaagaaagcagaagcgcgtgctaaaagggaggctgaagagaaacaagaggatgaaacagcttcatctaacagttcaaaatctggcaagaaacaacatgcaagaccagttgatctggatccacatggtgaaaaattaatccagattgaagacccgcttgcagaagccacaaaatacttgaagcttctgcagaataactcgtcagactcattagagacccatatactttcatttgagctaagcatgagaaagcaaaaggttttacttgctttccaggcagttaaacagctcattaaattggatgaagataatccagacagtcaccgttgtttgataaagttcttccacaagataaacagtcttcctggacctgtgactgattctgagaagctaatttggaatgttctggaagctgaacgacctgacatgaggcaattacatggaaagtccctcgttgaagtaaacagaagtttccttgaaaaacacaatgcttccttgatgcaccgagcagctggtgctgaaatgatgtatctcttagagccaaataagaagatggaggcaattaatttaattgaagattcaacaaatattacatcatcagggcatagtttgcttggtcctgtaaaaacatggcaaattcaagattgtattgatgttcataaattgctggagacagtctttggtgatcagaatgttgcaaataggtggaaggcacggtgcgcggaatattttccgtactcgacgtactttgaaggcatcaagagcgctatttcaacctatgccattgaccatagtctcgagagcccaccagaaaatggaattgcttcaaaccctcatctgaaatcaaaagatggagaacaagggagtttgaatgggactctgcatattgtagatgatttgagcagcctaagcattcggtaatgcacgaacaagttgctgaatggtcacaactggaacacaacattttagaactggagccagtacccaattaaccaaagcgtacacgaacaaggggaacaaagtgctctggtgcaagtagttgtcggcacatcacatatgaagagtatattattgattgggagctgaggtgtccagtcaggttattgtcttggttccagcctgtacctttttgttgccattttgtagacagggaaagaaaaaaaatcttccgtctcaattacggtgaagttgtgacagcgtttgttgcctagcgatatcagggtgtgaccattcgtttgaaacagtgctccctctctttttggactacaaaattttggcacaaagcaggtgtacaaggttaaaccttttaaaactttcatctatttgtttcgggatagtttggtgtgtgggggggtttgtcttgatcctttgtgctactgcaacatttggtcctcgacattgtaaattagttaatcttaaacatagaaactgtattccagttgtcatgacaaataatgatcaatgttaaccctgggtgtttgatctattccatttgggatgcgttgaaaagcatgcattgtcggatttgaagataaaaatccataatgttacatttattaatcatacttgtatagtgacccatgttaccttgctctga

SEQ ID NO: 32725 - DNA, 3716 bp, Zea Mays
gcctctacggctctacgcctcccgctacacacccacacccaccacggcccaccttccgccttgcgactccaaaaccctccctccttccccttccttgccccgccctagggttcgcgccgccgcgctgaccctgtcgtagccatggggtcctcgctcccgcccaaggaagccaacctcttcaaagtcatcgtcaaatcctacgagactaagcaatataagaaagggcttaaggctgcagattccatattaaaaaagtttccagagcatggtgaaacactatcaatgaaaggtttgacgctaaactgcatggaccgaaaatctgaagcgtacgagcttgttcgacgaggcctgaagaatgatctgaagagtcatgtctgttggcatgtttatggtttgctttatcggtcagatagagaatacagagaagctataaaatgttacagaaatgcattgaggattgatccagataacatagaaattcttcgtgacttgtcccttctccaggttggcgtaaattaacaagcgttttttatttatattttggcagtggtgagagcattcccattgagtcaccaggtcacgggttcgaagcagcctctccgcatttgtggggggaaagcttgactcggtttatccctcccccagactccactcatgtgggagcctccgtcactgggcacagatgagggacttgtctggctttgttgagactaggcaacaacttttgtcgttaaagccaaatcaccgcatgaactggattggttttgcggttgctcatcatttgaattctaattcttccaaggcagtagaagtattggaggcatacgagggaacactggaagatgattatcctccagagaatgagcgatatgaacacaatgaaatgctgctgtataagatatcattgtttgaagaatgtgggatgctagacagagcccttgaggaaatgcagaagaaggagagcaaaattgttgacaagctatcattcaaagaacaaatggcatccgtcttgttcaaacttggccgctttgatgaatctgagagcatatacagatccctgctttttatgaatcctgataactacaaatacttcattgctgtgcaaaagtgccttggcttatactctgataatggtcaatattctgctgctgatgttgagcgcttaagtgcattgtacaactcacttaaagagaagtatgcttggtcatctgctgtgaagcgtatccctcttgattttctggaaggtgagaagttccaggaggcagcagacaactatgtcagacctctattaacaaagggtgtgccctcactattttccgatttaagcccactgtatgaacatcctggcaaggcaaacatactggagcagttatttcttaaactagaagattcaattagggattctggatgctttcctggatgtccacagaaggagcctccttccacactgttgtggaccctgtttttgatttctcagcactacgacagaagagggcaatatgacattgctttgaataaaatcgatgaggctatctcacatacaccgactgtcatcgatctatattcagtaaagggaaagatattgcaacatgctggaaatttcacagcagcagccgcattagcagatgaagctaggtccatggatcttgctgatcgttatttaaacagcgagtgtgttatgcagatgcttcaggctgaccaggttggccttgccgagaagactgctgtcttgtttacaaaagatggtgatcaacacaataatcttcatgacatgcagtgcatgtggtatgagcttgcttctggggagagctattaccgtcaaggtgatcttggccgggccctaaaaaatttcttggcagttgaaaagcattacgctgatatgactgaagatcaatttgacttccattcatattgcttgcggaaaatgacacttcgagcatatgtttctatgctgaagtttcaggatcgtttgcatgctcatgaatacttccacaaggctgctgctggagctatcaggtgctatatgaaactacatgattctccaacaaaatcttctaaggaagagaatgatgagatatcaaaactgccacctgctcagaggaagaagttgaggcaaaagcagaagaaagcagaagcgcgtgctaaaagggaggctgaagagaaacaagaggatgaaacagcttcatctaacagttcaaaatctggcaagaaacaacatgcaagaccagttgatctggatccacatggtgaaaaattaatccagattgaagacccgcttgcagaagccacaaaatacttgaagcttctgcagaataactcgtcagactcattagagacccatatactttcatttgagctaagcatgagaaagcaaaaggttttacttgctttccaggcagttaaacagctcattaaattggatgaagataatccagacagtcaccgttgtttgataaagttcttccacaagataaacagtcttcctggacctgtgactgattctgagaagctaatttggaatgttctggaagctgaacgacctgacatgaggcaattacatggaaagtccctcgttgaagtaaacagaagtttccttgaaaaacacaatgcttccttgatgcaccgagcagctggtgctgaaatgatgtatctcttagagccaaataagaagatggaggcaattaatttaattgaagattcaacaaatattacatcatcagggcatagtttgcttggtcctgtaaaaacatggcaaattcaagattgtattgatgttcataaattgctggagacagtctttggtgatcagaatgttgcaaataggtggaaggcacggtgcgcggaatattttccgtactcgacgtactttgaaggcatcaagagcgctatttcaacctatgccattgaccatagtctcgagagcccaccagaaaatggaattgcttcaaaccctcatctgaaatcaaaagatggagaacaagggagtttgaatgggactctgcatattgtagatgatttgagcagcctaagcattcggtaatgcacgaacaagttgctgaatggtcacaactggaacacaacattttagaactggagccagtacccaattaaccaaagcgtacacgaacaaggggaacaaagtgctctggtgcaagtagttgtcggcacatcacatatgaagagtatattattgattgggagctgaggtgtccagtcaggttattgtcttggttccagcctgtacctttttgttgccattttgtagacagggaaagaaaaaaaatcttccgtctcaattacggtgaagttgtgacagcgtttgttgcctagcgatatcagggtgtgaccattcgtttgaaacagtgctccctctctttttggactacaaaattttggcacaaagcaggtgtacaaggttaaaccttttaaaactttcatctatttgtttcgggatagtttggtgtgtgggggggtttgtcttgatcctttgtgctactgcaacatttggtcctcgacattgtaaattagttaatcttaaacatagaaactgtattccagttgtcatgacaaataatgatcaatgttaaccctgggtgtttgatctattccatttgggatgcgttgaaaagcatgcattgtcggatttgaagataaaaatccataatgttacatttattaatcatacttgtatagtgacccatgttaccttgctctga

SEQ ID NO: 32726 - DNA, 3378 bp, Zea Mays
cgcctcccgctacacacccacacccaccacggcccaccttccgccttgcgactccaaaaccctccctccttccccttccttgccccgccctagggttcgcgccgccgcgctgaccctgtcgtagccatggggtcctcgctcccgcccaaggaagccaacctcttcaaagtcatcgtcaaatcctacgagactaagcaatataagaaagggcttaaggctgcagattccatattaaaaaagtttccagagcatggtgaaacactatcaatgaaaggtttgacgctaaactgcatggaccgaaaatctgaagcgtacgagcttgttcgacgaggcctgaagaatgatctgaagagtcatgtctgttggcatgtttatggtttgctttatcggtcagatagagaatacagagaagctataaaatgttacagaaatgcattgaggattgatccagataacatagaaattcttcgtgacttgtcccttctccaggcacagatgagggacttgtctggctttgttgagactaggcaacaacttttgtcgttaaagccaaatcaccgcatgaactggattggttttgcggttgctcatcatttgaattctaattcttccaaggcagtagaagtattggaggcatacgagggaacactggaagatgattatcctccagagaatgagcgatatgaacacaatgaaatgctgctgtataagatatcattgtttgaagaatgtgggatgctagacagagcccttgaggaaatgcagaagaaggagagcaaaattgttgacaagctatcattcaaagaacaaatggcatccgtcttgttcaaacttggccgctttgatgaatctgagagcatatacagatccctgctttttatgaatcctgataactacaaatacttcattgctgtgcaaaagtgccttggcttatactctgataatggtcaatattctgctgctgatgttgagcgcttaagtgcattgtacaactcacttaaagagaagtatgcttggtcatctgctgtgaagcgtatccctcttgattttctggaaggtgagaagttccaggaggcagcagacaactatgtcagacctctattaacaaagggtgtgccctcactattttccgatttaagcccactgtatgaacatcctggcaaggcaaacatactggagcagttatttcttaaactagaagattcaattagggattctggatgctttcctggatgggaaagatattgcaacatgctggaaatttcacagcagcagccgcattagcagatgaagctaggtccatggatcttgctgatcgttatttaaacagcgagtgtgttatgcagatgcttcaggctgaccaggttggccttgccgagaagactgctgtcttgtttacaaaagatggtgatcaacacaataatcttcatgacatgcagtgcatgtggtatgagcttgcttctggggagagctattaccgtcaaggtgatcttggccgggccctaaaaaatttcttggcagttgaaaagcattacgctgatatgactgaagatcaatttgacttccattcatattgcttgcggaaaatgacacttcgagcatatgtttctatgctgaagtttcaggatcgtttgcatgctcatgaatacttccacaaggctgctgctggagctatcaggtgctatatgaaactacatgattctccaacaaaatcttctaaggaagagaatgatgagatatcaaaactgccacctgctcagaggaagaagttgaggcaaaagcagaagaaagcagaagcgcgtgctaaaagggaggctgaagagaaacaagaggatgaaacagcttcatctaacagttcaaaatctggcaagaaacaacatgcaagaccagttgatctggatccacatggtgaaaaattaatccagattgaagacccgcttgcagaagccacaaaatacttgaagcttctgcagaataactcgtcagactcattagagacccatatactttcatttgagctaagcatgagaaagcaaaaggttttacttgctttccaggcagttaaacagctcattaaattggatgaagataatccagacagtcaccgttgtttgataaagttcttccacaagataaacagtcttcctggacctgtgactgattctgagaagctaatttggaatgttctggaagctgaacgacctgacatgaggcaattacatggaaagtccctcgttgaagtaaacagaagtttccttgaaaaacacaatgcttccttgatgcaccgagcagctggtgctgaaatgatgtatctcttagagccaaataagaagatggaggcaattaatttaattgaagattcaacaaatattacatcatcagggcatagtttgcttggtcctgtaaaaacatggcaaattcaagattgtattgatgttcataaattgctggagacagtctttggtgatcagaatgttgcaaataggtggaaggcacggtgcgcggaatattttccgtactcgacgtactttgaaggcatcaagagcgctatttcaacctatgccattgaccatagtctcgagagcccaccagaaaatggaattgcttcaaaccctcatctgaaatcaaaagatggagaacaagggagtttgaatgggactctgcatattgtagatgatttgagcagcctaagcattcggtaatgcacgaacaagttgctgaatggtcacaactggaacacaacattttagaactggagccagtacccaattaaccaaagcgtacacgaacaaggggaacaaagtgctctggtgcaagtagttgtcggcacatcacatatgaagagtatattattgattgggagctgaggtgtccagtcaggttattgtcttggttccagcctgtacctttttgttgccattttgtagacagggaaagaaaaaaaatcttccgtctcaattacggtgaagttgtgacagcgtttgttgcctagcgatatcagggtgtgaccattcgtttgaaacagtgctccctctctttttggactacaaaattttggcacaaagcaggtgtacaaggttaaaccttttaaaactttcatctatttgtttcgggatagtttggtgtgtgggggggtttgtcttgatcctttgtgctactgcaacatttggtcctcgacattgtaaattagttaatcttaaacatagaaactgtattccagttgtcatgacaaataatgatcaatgttaaccctgggtgtttgatctattccatttgggatgcgttgaaaagcatgcattgtcggatttgaagataaaaatccataatgttacatttattaatcatacttgtatagtgacccatgttaccttgctctga

SEQ ID NO: 32727 - DNA, 3357 bp, Zea Mays
cgcctcccgctacacacccacacccaccacggcccaccttccgccttgcgactccaaaaccctccctccttccccttccttgccccgccctagggttcgcgccgccgcgctgaccctgtcgtagccatggggtcctcgctcccgcccaaggaagccaacctcttcaaagtcatcgtcaaatcctacgagactaagcaatataagaaagggcttaaggctgcagattccatattaaaaaagtttccagagcatggtgaaacactatcaatgaaaggtttgacgctaaactgcatggaccgaaaatctgaagcgtacgagcttgttcgacgaggcctgaaggcacagatgagggacttgtctggctttgttgagactaggcaacaacttttgtcgttaaagccaaatcaccgcatgaactggattggttttgcggttgctcatcatttgaattctaattcttccaaggcagtagaagtattggaggcatacgagggaacactggaagatgattatcctccagagaatgagcgatatgaacacaatgaaatgctgctgtataagatatcattgtttgaagaatgtgggatgctagacagagcccttgaggaaatgcagaagaaggagagcaaaattgttgacaagctatcattcaaagaacaaatggcatccgtcttgttcaaacttggccgctttgatgaatctgagagcatatacagatccctgctttttatgaatcctgataactacaatgccttggcttatactctgataatggtcaatattctgctgctgatgttgagcgcttaagtgcattgtacaactcacttaaagagaagtatgcttggtcatctgctgtgaagcgtatccctcttgattttctggaaggtgagaagttccaggaggcagcagacaactatgtcagacctctattaacaaagggtgtgccctcactattttccgatttaagcccactgtatgaacatcctggcaaggcaaacatactggagcagttatttcttaaactagaagattcaattagggattctggatgctttcctggatgtccacagaaggagcctccttccacactgttgtggaccctgtttttgatttctcagcactacgacagaagagggcaatatgacattgctttgaataaaatcgatgaggctatctcacatacaccgactgtcatcgatctatattcagtaaagggaaagatattgcaacatgctggaaatttcacagcagcagccgcattagcagatgaagctaggtccatggatcttgctgatcgttatttaaacagcgagtgtgttatgcagatgcttcaggctgaccaggttggccttgccgagaagactgctgtcttgtttacaaaagatggtgatcaacacaataatcttcatgacatgcagtgcatgtggtatgagcttgcttctggggagagctattaccgtcaaggtgatcttggccgggccctaaaaaatttcttggcagttgaaaagcattacgctgatatgactgaagatcaatttgacttccattcatattgcttgcggaaaatgacacttcgagcatatgtttctatgctgaagtttcaggatcgtttgcatgctcatgaatacttccacaaggctgctgctggagctatcaggtgctatatgaaactacatgattctccaacaaaatcttctaaggaagagaatgatgagatatcaaaactgccacctgctcagaggaagaagttgaggcaaaagcagaagaaagcagaagcgcgtgctaaaagggaggctgaagagaaacaagaggatgaaacagcttcatctaacagttcaaaatctggcaagaaacaacatgcaagaccagttgatctggatccacatggtgaaaaattaatccagattgaagacccgcttgcagaagccacaaaatacttgaagcttctgcagaataactcgtcagactcattagagacccatatactttcatttgagctaagcatgagaaagcaaaaggttttacttgctttccaggcagttaaacagctcattaaattggatgaagataatccagacagtcaccgttgtttgataaagttcttccacaagataaacagtcttcctggacctgtgactgattctgagaagctaatttggaatgttctggaagctgaacgacctgacatgaggcaattacatggaaagtccctcgttgaagtaaacagaagtttccttgaaaaacacaatgcttccttgatgcaccgagcagctggtgctgaaatgatgtatctcttagagccaaataagaagatggaggcaattaatttaattgaagattcaacaaatattacatcatcagggcatagtttgcttggtcctgtaaaaacatggcaaattcaagattgtattgatgttcataaattgctggagacagtctttggtgatcagaatgttgcaaataggtggaaggcacggtgcgcggaatattttccgtactcgacgtactttgaaggcatcaagagcgctatttcaacctatgccattgaccatagtctcgagagcccaccagaaaatggaattgcttcaaaccctcatctgaaatcaaaagatggagaacaagggagtttgaatgggactctgcatattgtagatgatttgagcagcctaagcattcggtaatgcacgaacaagttgctgaatggtcacaactggaacacaacattttagaactggagccagtacccaattaaccaaagcgtacacgaacaaggggaacaaagtgctctggtgcaagtagttgtcggcacatcacatatgaagagtatattattgattgggagctgaggtgtccagtcaggttattgtcttggttccagcctgtacctttttgttgccattttgtagacagggaaagaaaaaaaatcttccgtctcaattacggtgaagttgtgacagcgtttgttgcctagcgatatcagggtgtgaccattcgtttgaaacagtgctccctctctttttggactacaaaattttggcacaaagcaggtgtacaaggttaaaccttttaaaactttcatctatttgtttcgggatagtttggtgtgtgggggggtttgtcttgatcctttgtgctactgcaacatttggtcctcgacattgtaaattagttaatcttaaacatagaaactgtattccagttgtcatgacaaataatgatcaatgttaaccctgggtgtttgatctattccatttgggatgcgttgaaaagcatgcattgtcggatttgaagataaaaatccataatgttacatttattaatcatacttgtatagtgacccatgttaccttgctctga

SEQ ID NO: 32728 - DNA, 3379 bp, Zea Mays
cgcctcccgctacacacccacacccaccacggcccaccttccgccttgcgactccaaaaccctccctccttccccttccttgccccgccctagggttcgcgccgccgcgctgaccctgtcgtagccatggggtcctcgctcccgcccaaggaagccaacctcttcaaagtcatcgtcaaatcctacgagactaagcaatataagaaagggcttaaggctgcagattccatattaaaaaagtttccagagcatggtgaaacactatcaatgaaaggtttgacgctaaactgcatggaccgaaaatctgaagcgtacgagcttgttcgacgaggcctgaaggcacagatgagggacttgtctggctttgttgagactaggcaacaacttttgtcgttaaagccaaatcaccgcatgaactggattggttttgcggttgctcatcatttgaattctaattcttccaaggcagtagaagtattggaggcatacgagggaacactggaagatgattatcctccagagaatgagcgatatgaacacaatgaaatgctgctgtataagatatcattgtttgaagaatgtgggatgctagacagagcccttgaggaaatgcagaagaaggagagcaaaattgttgacaagctatcattcaaagaacaaatggcatccgtcttgttcaaacttggccgctttgatgaatctgagagcatatacagatccctgctttttatgaatcctgataactacaaatacttcattgctgtgcaaaagtgccttggcttatactctgataatggtcaatattctgctgctgatgttgagcgcttaagtgcattgtacaactcacttaaagagaagtatgcttggtcatctgctgtgaagcgtatccctcttgattttctggaaggtgagaagttccaggaggcagcagacaactatgtcagacctctattaacaaagggtgtgccctcactattttccgatttaagcccactgtatgaacatcctggcaaggcaaacatactggagcagttatttcttaaactagaagattcaattagggattctggatgctttcctggatgtccacagaaggagcctccttccacactgttgtggaccctgtttttgatttctcagcactacgacagaagagggcaatatgacattgctttgaataaaatcgatgaggctatctcacatacaccgactgtcatcgatctatattcagtaaagggaaagatattgcaacatgctggaaatttcacagcagcagccgcattagcagatgaagctaggtccatggatcttgctgatcgttatttaaacagcgagtgtgttatgcagatgcttcaggctgaccaggttggccttgccgagaagactgctgtcttgtttacaaaagatggtgatcaacacaataatcttcatgacatgcagtgcatgtggtatgagcttgcttctggggagagctattaccgtcaaggtgatcttggccgggccctaaaaaatttcttggcagttgaaaagcattacgctgatatgactgaagatcaatttgacttccattcatattgcttgcggaaaatgacacttcgagcatatgtttctatgctgaagtttcaggatcgtttgcatgctcatgaatacttccacaaggctgctgctggagctatcaggtgctatatgaaactacatgattctccaacaaaatcttctaaggaagagaatgatgagatatcaaaactgccacctgctcagaggaagaagttgaggcaaaagcagaagaaagcagaagcgcgtgctaaaagggaggctgaagagaaacaagaggatgaaacagcttcatctaacagttcaaaatctggcaagaaacaacatgcaagaccagttgatctggatccacatggtgaaaaattaatccagattgaagacccgcttgcagaagccacaaaatacttgaagcttctgcagaataactcgtcagactcattagagacccatatactttcatttgagctaagcatgagaaagcaaaaggttttacttgctttccaggcagttaaacagctcattaaattggatgaagataatccagacagtcaccgttgtttgataaagttcttccacaagataaacagtcttcctggacctgtgactgattctgagaagctaatttggaatgttctggaagctgaacgacctgacatgaggcaattacatggaaagtccctcgttgaagtaaacagaagtttccttgaaaaacacaatgcttccttgatgcaccgagcagctggtgctgaaatgatgtatctcttagagccaaataagaagatggaggcaattaatttaattgaagattcaacaaatattacatcatcagggcatagtttgcttggtcctgtaaaaacatggcaaattcaagattgtattgatgttcataaattgctggagacagtctttggtgatcagaatgttgcaaataggtggaaggcacggtgcgcggaatattttccgtactcgacgtactttgaaggcatcaagagcgctatttcaacctatgccattgaccatagtctcgagagcccaccagaaaatggaattgcttcaaaccctcatctgaaatcaaaagatggagaacaagggagtttgaatgggactctgcatattgtagatgatttgagcagcctaagcattcggtaatgcacgaacaagttgctgaatggtcacaactggaacacaacattttagaactggagccagtacccaattaaccaaagcgtacacgaacaaggggaacaaagtgctctggtgcaagtagttgtcggcacatcacatatgaagagtatattattgattgggagctgaggtgtccagtcaggttattgtcttggttccagcctgtacctttttgttgccattttgtagacagggaaagaaaaaaaatcttccgtctcaattacggtgaagttgtgacagcgtttgttgcctagcgatatcagggtgtgaccattcgtttgaaacagtgctccctctctttttggactacaaaattttggcacaaagcaggtgtacaaggttaaaccttttaaaactttcatctatttgtttcgggatagtttggtgtgtgggggggtttgtcttgatcctttgtgctactgcaacatttggtcctcgacattgtaaattagttaatcttaaacatagaaactgtattccagttgtcatgacaaataatgatcaatgttaaccctgggtgtttgatctattccatttgggatgcgttgaaaagcatgcattgtcggatttgaagataaaaatccataatgttacatttattaatcatacttgtatagtgacccatgttaccttgctctga

SEQ ID NO: 32729 - DNA, 3508 bp, Zea Mays
cgcctcccgctacacacccacacccaccacggcccaccttccgccttgcgactccaaaaccctccctccttccccttccttgccccgccctagggttcgcgccgccgcgctgaccctgtcgtagccatggggtcctcgctcccgcccaaggaagccaacctcttcaaagtcatcgtcaaatcctacgagactaagcaatataagaaagggcttaaggctgcagattccatattaaaaaagtttccagagcatggtgaaacactatcaatgaaaggtttgacgctaaactgcatggaccgaaaatctgaagcgtacgagcttgttcgacgaggcctgaagaatgatctgaagagtcatgtctgttggcatgtttatggtttgctttatcggtcagatagagaatacagagaagctataaaatgttacagaaatgcattgaggattgatccagataacatagaaattcttcgtgacttgtcccttctccaggcacagatgagggacttgtctggctttgttgagactaggcaacaacttttgtcgttaaagccaaatcaccgcatgaactggattggttttgcggttgctcatcatttgaattctaattcttccaaggcagtagaagtattggaggcatacgagggaacactggaagatgattatcctccagagaatgagcgatatgaacacaatgaaatgctgctgtataagatatcattgtttgaagaatgtgggatgctagacagagcccttgaggaaatgcagaagaaggagagcaaaattgttgacaagctatcattcaaagaacaaatggcatccgtcttgttcaaacttggccgctttgatgaatctgagagcatatacagatccctgctttttatgaatcctgataactacaaatacttcattgctgtgcaaaagtgccttggcttatactctgataatggtcaatattctgctgctgatgttgagcgcttaagtgcattgtacaactcacttaaagagaagtatgcttggtcatctgctgtgaagcgtatccctcttgattttctggaaggtgagaagttccaggaggcagcagacaactatgtcagacctctattaacaaagggtgtgccctcactattttccgatttaagcccactgtatgaacatcctggcaaggcaaacatactggagcagttatttcttaaactagaagattcaattagggattctggatgctttcctggatgtccacagaaggagcctccttccacactgttgtggaccctgtttttgatttctcagcactacgacagaagagggcaatatgacattgctttgaataaaatcgatgaggctatctcacatacaccgactgtcatcgatctatattcagtaaagggaaagatattgcaacatgctggaaatttcacagcagcagccgcattagcagatgaagctaggtccatggatcttgctgatcgttatttaaacagcgagtgtgttatgcagatgcttcaggctgaccaggttggccttgccgagaagactgctgtcttgtttacaaaagatggtgatcaacacaataatcttcatgacatgcagtgcatgtggtatgagcttgcttctggggagagctattaccgtcaaggtgatcttggccgggccctaaaaaatttcttggcagttgaaaagcattacgctgatatgactgaagatcaatttgacttccattcatattgcttgcggaaaatgacacttcgagcatatgtttctatgctgaagtttcaggatcgtttgcatgctcatgaatacttccacaaggctgctgctggagctatcaggtgctatatgaaactacatgattctccaacaaaatcttctaaggaagagaatgatgagatatcaaaactgccacctgctcagaggaagaagttgaggcaaaagcagaagaaagcagaagcgcgtgctaaaagggaggctgaagagaaacaagaggatgaaacagcttcatctaacagttcaaaatctggcaagaaacaacatgcaagaccagttgatctggatccacatggtgaaaaattaatccagattgaagacccgcttgcagaagccacaaaatacttgaagcttctgcagaataactcgtcagactcattagagacccatatactttcatttgagctaagcatgagaaagcaaaaggttttacttgctttccaggcagttaaacagctcattaaattggatgaagataatccagacagtcaccgttgtttgataaagttcttccacaagataaacagtcttcctggacctgtgactgattctgagaagctaatttggaatgttctggaagctgaacgacctgacatgaggcaattacatggaaagtccctcgttgaagtaaacagaagtttccttgaaaaacacaatgctggtgctgaaatgatgtatctcttagagccaaataagaagatggaggcaattaatttaattgaagattcaacaaatattacatcatcagggcatagtttgcttggtcctgtaaaaacatggcaaattcaagattgtattgatgttcataaattgctggagacagtctttggtgatcagaatgttgcaaataggtggaaggcacggtgcgcggaatattttccgtactcgacgtactttgaaggcatcaagagcgctatttcaacctatgccattgaccatagtctcgagagcccaccagaaaatggaattgcttcaaaccctcatctgaaatcaaaagatggagaacaagggagtttgaatgggactctgcatattgtagatgatttgagcagcctaagcattcggtaatgcacgaacaagttgctgaatggtcacaactggaacacaacattttagaactggagccagtacccaattaaccaaagcgtacacgaacaaggggaacaaagtgctctggtgcaagtagttgtcggcacatcacatatgaagagtatattattgattgggagctgaggtgtccagtcaggttattgtcttggttccagcctgtacctttttgttgccattttgtagacagggaaagaaaaaaaatcttccgtctcaattacggtgaagttgtgacagcgtttgttgcctagcgatatcagggtgtgaccattcgtttgaaacagtgctccctctctttttggactacaaaattttggcacaaagcaggtgtacaaggttaaaccttttaaaactttcatctatttgtttcgggatagtttggtgtgtgggggggtttgtcttgatcctttgtgctactgcaacatttggtcctcgacattgtaaattagttaatcttaaacatagaaactgtattccagttgtcatgacaaataatgatcaatgttaaccctgggtgtttgatctattccatttgggatgcgttgaaaagcatgcattgtcggatttgaagataaaaatccataatgttacatttattaatcatacttgtatagtgacccatgttaccttgctctga

SEQ ID NO: 32730 - DNA, 3504 bp, Zea Mays
cccacatccccgctccacttcgtctccacccttctagattcgagacgatccgccccccgcaaatctgctggcttcgtggtccggttccgctcgattcgatatgctggcgatccgagctgctccaggagtctccggacgcatggatttatctgaaatcctacgagactaagcaatataagaaagggcttaaggctgcagattccatattaaaaaagtttccagagcatggtgaaacactatcaatgaaaggtttgacgctaaactgcatggaccgaaaatctgaagcgtacgagcttgttcgacgaggcctgaagaatgatctgaagagtcatgtctgttggcatgtttatggtttgctttatcggtcagatagagaatacagagaagctataaaatgttacagaaatgcattgaggattgatccagataacatagaaattcttcgtgacttgtcccttctccaggcacagatgagggacttgtctggctttgttgagactaggcaacaacttttgtcgttaaagccaaatcaccgcatgaactggattggttttgcggttgctcatcatttgaattctaattcttccaaggcagtagaagtattggaggcatacgagggaacactggaagatgattatcctccagagaatgagcgatatgaacacaatgaaatgctgctgtataagatatcattgtttgaagaatgtgggatgctagacagagcccttgaggaaatgcagaagaaggagagcaaaattgttgacaagctatcattcaaagaacaaatggcatccgtcttgttcaaacttggccgctttgatgaatctgagagcatatacagatccctgctttttatgaatcctgataactacaaatacttcattgctgtgcaaaagtgccttggcttatactctgataatggtcaatattctgctgctgatgttgagcgcttaagtgcattgtacaactcacttaaagagaagtatgcttggtcatctgctgtgaagcgtatccctcttgattttctggaaggtgagaagttccaggaggcagcagacaactatgtcagacctctattaacaaagggtgtgccctcactattttccgatttaagcccactgtatgaacatcctggcaaggcaaacatactggagcagttatttcttaaactagaagattcaattagggattctggatgctttcctggatgtccacagaaggagcctccttccacactgttgtggaccctgtttttgatttctcagcactacgacagaagagggcaatatgacattgctttgaataaaatcgatgaggctatctcacatacaccgactgtcatcgatctatattcagtaaagggaaagatattgcaacatgctggaaatttcacagcagcagccgcattagcagatgaagctaggtccatggatcttgctgatcgttatttaaacagcgagtgtgttatgcagatgcttcaggctgaccaggttggccttgccgagaagactgctgtcttgtttacaaaagatggtgatcaacacaataatcttcatgacatgcagtgcatgtggtatgagcttgcttctggggagagctattaccgtcaaggtgatcttggccgggccctaaaaaatttcttggcagttgaaaagcattacgctgatatgactgaagatcaatttgacttccattcatattgcttgcggaaaatgacacttcgagcatatgtttctatgctgaagtttcaggatcgtttgcatgctcatgaatacttccacaaggctgctgctggagctatcaggtgctatatgaaactacatgattctccaacaaaatcttctaaggaagagaatgatgagatatcaaaactgccacctgctcagaggaagaagttgaggcaaaagcagaagaaagcagaagcgcgtgctaaaagggaggctgaagagaaacaagaggatgaaacagcttcatctaacagttcaaaatctggcaagaaacaacatgcaagaccagttgatctggatccacatggtgaaaaattaatccagattgaagacccgcttgcagaagccacaaaatacttgaagcttctgcagaataactcgtcagactcattagagacccatatactttcatttgagctaagcatgagaaagcaaaaggttttacttgctttccaggcagttaaacagctcattaaattggatgaagataatccagacagtcaccgttgtttgataaagttcttccacaagataaacagtcttcctggacctgtgactgattctgagaagctaatttggaatgttctggaagctgaacgacctgacatgaggcaattacatggaaagtccctcgttgaagtaaacagaagtttccttgaaaaacacaatgcttccttgatgcaccgagcagctggtgctgaaatgatgtatctcttagagccaaataagaagatggaggcaattaatttaattgaagattcaacaaatattacatcatcagggcatagtttgcttggtcctgtaaaaacatggcaaattcaagattgtattgatgttcataaattgctggagacagtctttggtgatcagaatgttgcaaataggtggaaggcacggtgcgcggaatattttccgtactcgacgtactttgaaggcatcaagagcgctatttcaacctatgccattgaccatagtctcgagagcccaccagaaaatggaattgcttcaaaccctcatctgaaatcaaaagatggagaacaagggagtttgaatgggactctgcatattgtagatgatttgagcagcctaagcattcggtaatgcacgaacaagttgctgaatggtcacaactggaacacaacattttagaactggagccagtacccaattaaccaaagcgtacacgaacaaggggaacaaagtgctctggtgcaagtagttgtcggcacatcacatatgaagagtatattattgattgggagctgaggtgtccagtcaggttattgtcttggttccagcctgtacctttttgttgccattttgtagacagggaaagaaaaaaaatcttccgtctcaattacggtgaagttgtgacagcgtttgttgcctagcgatatcagggtgtgaccattcgtttgaaacagtgctccctctctttttggactacaaaattttggcacaaagcaggtgtacaaggttaaaccttttaaaactttcatctatttgtttcgggatagtttggtgtgtgggggggtttgtcttgatcctttgtgctactgcaacatttggtcctcgacattgtaaattagttaatcttaaacatagaaactgtattccagttgtcatgacaaataatgatcaatgttaaccctgggtgtttgatctattccatttgggatgcgttgaaaagcatgcattgtcggatttgaagataaaaatccataatgttacatttattaatcatacttgtatagtgacccatgttaccttgctctga

SEQ ID NO: 32731 - DNA, 3386 bp, Zea Mays
gtttgtttgtaactcgatgaacgagtgcctcgtgaaatcctacgagactaagcaatataagaaagggcttaaggctgcagattccatattaaaaaagtttccagagcatggtgaaacactatcaatgaaaggtttgacgctaaactgcatggaccgaaaatctgaagcgtacgagcttgttcgacgaggcctgaagaatgatctgaagagtcatgtctgttggcatgtttatggtttgctttatcggtcagatagagaatacagagaagctataaaatgttacagaaatgcattgaggattgatccagataacatagaaattcttcgtgacttgtcccttctccaggcacagatgagggacttgtctggctttgttgagactaggcaacaacttttgtcgttaaagccaaatcaccgcatgaactggattggttttgcggttgctcatcatttgaattctaattcttccaaggcagtagaagtattggaggcatacgagggaacactggaagatgattatcctccagagaatgagcgatatgaacacaatgaaatgctgctgtataagatatcattgtttgaagaatgtgggatgctagacagagcccttgaggaaatgcagaagaaggagagcaaaattgttgacaagctatcattcaaagaacaaatggcatccgtcttgttcaaacttggccgctttgatgaatctgagagcatatacagatccctgctttttatgaatcctgataactacaaatacttcattgctgtgcaaaagtgccttggcttatactctgataatggtcaatattctgctgctgatgttgagcgcttaagtgcattgtacaactcacttaaagagaagtatgcttggtcatctgctgtgaagcgtatccctcttgattttctggaaggtgagaagttccaggaggcagcagacaactatgtcagacctctattaacaaagggtgtgccctcactattttccgatttaagcccactgtatgaacatcctggcaaggcaaacatactggagcagttatttcttaaactagaagattcaattagggattctggatgctttcctggatgtccacagaaggagcctccttccacactgttgtggaccctgtttttgatttctcagcactacgacagaagagggcaatatgacattgctttgaataaaatcgatgaggctatctcacatacaccgactgtcatcgatctatattcagtaaagggaaagatattgcaacatgctggaaatttcacagcagcagccgcattagcagatgaagctaggtccatggatcttgctgatcgttatttaaacagcgagtgtgttatgcagatgcttcaggctgaccaggttggccttgccgagaagactgctgtcttgtttacaaaagatggtgatcaacacaataatcttcatgacatgcagtgcatgtggtatgagcttgcttctggggagagctattaccgtcaaggtgatcttggccgggccctaaaaaatttcttggcagttgaaaagcattacgctgatatgactgaagatcaatttgacttccattcatattgcttgcggaaaatgacacttcgagcatatgtttctatgctgaagtttcaggatcgtttgcatgctcatgaatacttccacaaggctgctgctggagctatcaggtgctatatgaaactacatgattctccaacaaaatcttctaaggaagagaatgatgagatatcaaaactgccacctgctcagaggaagaagttgaggcaaaagcagaagaaagcagaagcgcgtgctaaaagggaggctgaagagaaacaagaggatgaaacagcttcatctaacagttcaaaatctggcaagaaacaacatgcaagaccagttgatctggatccacatggtgaaaaattaatccagattgaagacccgcttgcagaagccacaaaatacttgaagcttctgcagaataactcgtcagactcattagagacccatatactttcatttgagctaagcatgagaaagcaaaaggttttacttgctttccaggcagttaaacagctcattaaattggatgaagataatccagacagtcaccgttgtttgataaagttcttccacaagataaacagtcttcctggacctgtgactgattctgagaagctaatttggaatgttctggaagctgaacgacctgacatgaggcaattacatggaaagtccctcgttgaagtaaacagaagtttccttgaaaaacacaatgcttccttgatgcaccgagcagctggtgctgaaatgatgtatctcttagagccaaataagaagatggaggcaattaatttaattgaagattcaacaaatattacatcatcagggcatagtttgcttggtcctgtaaaaacatggcaaattcaagattgtattgatgttcataaattgctggagacagtctttggtgatcagaatgttgcaaataggtggaaggcacggtgcgcggaatattttccgtactcgacgtactttgaaggcatcaagagcgctatttcaacctatgccattgaccatagtctcgagagcccaccagaaaatggaattgcttcaaaccctcatctgaaatcaaaagatggagaacaagggagtttgaatgggactctgcatattgtagatgatttgagcagcctaagcattcggtaatgcacgaacaagttgctgaatggtcacaactggaacacaacattttagaactggagccagtacccaattaaccaaagcgtacacgaacaaggggaacaaagtgctctggtgcaagtagttgtcggcacatcacatatgaagagtatattattgattgggagctgaggtgtccagtcaggttattgtcttggttccagcctgtacctttttgttgccattttgtagacagggaaagaaaaaaaatcttccgtctcaattacggtgaagttgtgacagcgtttgttgcctagcgatatcagggtgtgaccattcgtttgaaacagtgctccctctctttttggactacaaaattttggcacaaagcaggtgtacaaggttaaaccttttaaaactttcatctatttgtttcgggatagtttggtgtgtgggggggtttgtcttgatcctttgtgctactgcaacatttggtcctcgacattgtaaattagttaatcttaaacatagaaactgtattccagttgtcatgacaaataatgatcaatgttaaccctgggtgtttgatctattccatttgggatgcgttgaaaagcatgcattgtcggatttgaagataaaaatccataatgttacatttattaatcatacttgtatagtgacccatgttaccttgctctga

SEQ ID NO: 32732 - DNA, 1458 bp, Zea Mays
ctccctcttgctggttcttcgctgggcgatggggacacctagccactttggggcgcctggacgcctaggcgacacctttaaaaccatggtggccatagaagatccctcttagtgttgtatgcaaggaactaaggaaggcagttaaacagctcattaaattggatgaagataatccagacagtcaccgttgtttgataaagttcttccacaagataaacagtcttcctggacctgtgactgattctgagaagctaatttggaatgttctggaagctgaacgacctgacatgaggcaattacatggaaagtccctcgttgaagtaaacagaagtttccttgaaaaacacaatgcttccttgatgcaccgagcagctggtgctgaaatgatgtatctcttagagccaaataagaagatggaggcaattaatttaattgaagattcaacaaatattacatcatcagggcatagtttgcttggtcctgtaaaaacatggcaaattcaagattgtattgatgttcataaattgctggagacagtctttggtgatcagaatgttgcaaataggtggaaggcacggtgcgcggaatattttccgtactcgacgtactttgaaggcatcaagagcgctatttcaacctatgccattgaccatagtctcgagagcccaccagaaaatggaattgcttcaaaccctcatctgaaatcaaaagatggagaacaagggagtttgaatgggactctgcatattgtagatgatttgagcagcctaagcattcggtaatgcacgaacaagttgctgaatggtcacaactggaacacaacattttagaactggagccagtacccaattaaccaaagcgtacacgaacaaggggaacaaagtgctctggtgcaagtagttgtcggcacatcacatatgaagagtatattattgattgggagctgaggtgtccagtcaggttattgtcttggttccagcctgtacctttttgttgccattttgtagacagggaaagaaaaaaaatcttccgtctcaattacggtgaagttgtgacagcgtttgttgcctagcgatatcagggtgtgaccattcgtttgaaacagtgctccctctctttttggactacaaaattttggcacaaagcaggtgtacaaggttaaaccttttaaaactttcatctatttgtttcgggatagtttggtgtgtgggggggtttgtcttgatcctttgtgctactgcaacatttggtcctcgacattgtaaattagttaatcttaaacatagaaactgtattccagttgtcatgacaaataatgatcaatgttaaccctgggtgtttgatctattccatttgggatgcgttgaaaagcatgcattgtcggatttgaagataaaaatccataatgttacatttattaatcatacttgtatagtgacccatgttaccttgctctga

SEQ ID NO: 32733 - DNA, 1375 bp, Zea Mays
gttaatcaatatttcaatacaatgctgataatttatctagttgaaagcatgcgggcagttaaacagctcattaaattggatgaagataatccagacagtcaccgttgtttgataaagttcttccacaagataaacagtcttcctggacctgtgactgattctgagaagctaatttggaatgttctggaagctgaacgacctgacatgaggcaattacatggaaagtccctcgttgaagtaaacagaagtttccttgaaaaacacaatgcttccttgatgcaccgagcagctggtgctgaaatgatgtatctcttagagccaaataagaagatggaggcaattaatttaattgaagattcaacaaatattacatcatcagggcatagtttgcttggtcctgtaaaaacatggcaaattcaagattgtattgatgttcataaattgctggagacagtctttggtgatcagaatgttgcaaataggtggaaggcacggtgcgcggaatattttccgtactcgacgtactttgaaggcatcaagagcgctatttcaacctatgccattgaccatagtctcgagagcccaccagaaaatggaattgcttcaaaccctcatctgaaatcaaaagatggagaacaagggagtttgaatgggactctgcatattgtagatgatttgagcagcctaagcattcggtaatgcacgaacaagttgctgaatggtcacaactggaacacaacattttagaactggagccagtacccaattaaccaaagcgtacacgaacaaggggaacaaagtgctctggtgcaagtagttgtcggcacatcacatatgaagagtatattattgattgggagctgaggtgtccagtcaggttattgtcttggttccagcctgtacctttttgttgccattttgtagacagggaaagaaaaaaaatcttccgtctcaattacggtgaagttgtgacagcgtttgttgcctagcgatatcagggtgtgaccattcgtttgaaacagtgctccctctctttttggactacaaaattttggcacaaagcaggtgtacaaggttaaaccttttaaaactttcatctatttgtttcgggatagtttggtgtgtgggggggtttgtcttgatcctttgtgctactgcaacatttggtcctcgacattgtaaattagttaatcttaaacatagaaactgtattccagttgtcatgacaaataatgatcaatgttaaccctgggtgtttgatctattccatttgggatgcgttgaaaagcatgcattgtcggatttgaagataaaaatccataatgttacatttattaatcatacttgtatagtgacccatgttaccttgctctga

SEQ ID NO: 32734 - DNA, 1615 bp, Zea Mays
aatctgatagtttttttcttttgtttgggtaaagtcagtgaggagaagtctatagttctctatttgtccactcaggaattaatgttgagtaaattgttgcattacaagttaatgttttgttgagtctatgaactcagggccactaagagtttatggctgcttgagtctatggattcatggtcatgaaaatatatttttagtgctttcttgcttcctgataacacttaatttatatagaattgttggtacctttattggcatgtttatgttgattatgttaggtgatggtgattagaagctacaacagtggtttatgttattagttattcaaagacagggctctaaatcaaaataaagttcttccacaagataaacagtcttcctggacctgtgactgattctgagaagctaatttggaatgttctggaagctgaacgacctgacatgaggcaattacatggaaagtccctcgttgaagtaaacagaagtttccttgaaaaacacaatgcttccttgatgcaccgagcagctggtgctgaaatgatgtatctcttagagccaaataagaagatggaggcaattaatttaattgaagattcaacaaatattacatcatcagggcatagtttgcttggtcctgtaaaaacatggcaaattcaagattgtattgatgttcataaattgctggagacagtctttggtgatcagaatgttgcaaataggtggaaggcacggtgcgcggaatattttccgtactcgacgtactttgaaggcatcaagagcgctatttcaacctatgccattgaccatagtctcgagagcccaccagaaaatggaattgcttcaaaccctcatctgaaatcaaaagatggagaacaagggagtttgaatgggactctgcatattgtagatgatttgagcagcctaagcattcggtaatgcacgaacaagttgctgaatggtcacaactggaacacaacattttagaactggagccagtacccaattaaccaaagcgtacacgaacaaggggaacaaagtgctctggtgcaagtagttgtcggcacatcacatatgaagagtatattattgattgggagctgaggtgtccagtcaggttattgtcttggttccagcctgtacctttttgttgccattttgtagacagggaaagaaaaaaaatcttccgtctcaattacggtgaagttgtgacagcgtttgttgcctagcgatatcagggtgtgaccattcgtttgaaacagtgctccctctctttttggactacaaaattttggcacaaagcaggtgtacaaggttaaaccttttaaaactttcatctatttgtttcgggatagtttggtgtgtgggggggtttgtcttgatcctttgtgctactgcaacatttggtcctcgacattgtaaattagttaatcttaaacatagaaactgtattccagttgtcatgacaaataatgatcaatgttaaccctgggtgtttgatctattccatttgggatgcgttgaaaagcatgcattgtcggatttgaagataaaaatccataatgttacatttattaatcatacttgtatagtgacccatgttaccttgctctga

SEQ ID NO: 32735 - DNA, 2169 bp, Zea Mays
atgcaagcatcctggaaacacgcacgcaccagccgcacaggaaacgaaggcgacggcccgcggcgtgcttcctcggagttttgggggattttgcaatgccaagacaaggcagtggggatttgagcagggatggatgtcgacgaagttcctgaaaggatctatccgaagaatgcttgtagagttgaggtcaatgtcaatgcatacttcagctttaaagatggaaaaaagaaaggtgtacgatcgaggtaggattgtgagctgggttgttgattcagaagagtatgccatcattgatctggaaaaggatatcactccatactttacatggaacgacaatcataaggcaaatttctgggttctaactggttctgatttgacatgctttttaacttcagatagtcagcttattgacttactaagggcatctcaactagtgaagttcctaatgatagtgagcaggtgtgaggggaatgagatgcctgttgcagtgaacatgatgtcgaggacatacctagtgcaacgaatgttgttgaggatatgcaaattggggaatttaaatgggcagaagtagcagaatatggagaaacaactgcaggtccactgatggttgaagaggacgaaaaggaacacttcatgactgttggatgtgattgaaagaaaaatatgcccttaggtcatttccatattgttttgatgattggaagcacaacacacttggtgagaactaacaaatgttaagcaaagtgacaggaactcaattaagacaagtccaaaaagagcaaaaggagttcagctgaaacgagtactgcaccagctgcgggtgcaccggacaatgtacggtgcccaggctggctcagcaacaaactcgctgctctcgggaatcgccgaggacgctgatgctaaaattcaccggagtgtccggtgggcaccggactgtccggtgagccaacaacgtccaagccaacggtcggcagcgcgatcggcgcgcaattaacggggatgcatggccagaggcaacggtcactaggccgcaccagactgtccagtgtgcaccggacagtgtccggtgtgccaaggggaccgagggttcaacggtcggcttcgccaaagaaggaaacaaatcgtgcactgttcatgtccgttggatgtgatcctcatggagatgagccaactggaatagatgaagagtggatgtactacaaaaatttagattctgtgtttcatgatgcaaatccaatagaggtgcagaaaaaaaaagacatagacttcgatactgaatgtgttcctgaagatgagtttactatgatagatgattgtgttgtgcctcacacaacacatcatagtgagaatctaatcattaaggaaggctaaacatgaagagccgagggctgcactatgatatcaagaaaagtggtcccatgtcagctgaaatatcaggtacaataaaggaagggaagacttggaggtatggggttgaccttgccaaaagagaatgtggttctggataatgggagttgtcagggaaaccatggactcatgctatatacttatttgggacagtgaaacagcgcatgagacaactaaacattgaggattttgtgcatgactactattcagtagagaggttcaagatggtgtatcagtttcagattaatctaatgagtgacaagtctggatggccaaaggttgatgttgggattgaaatgattcctctaccactgcagagggctgctggtatacctaggaagcaaaggatcaaggctagtggagagccaggaaaacgaggaccacatcaatgcaaaaggtgctttcaatttggacacgttgagaagggttgtaatgcaactcaagctgaattagcttccaccacatcgtccaaaaaaggaaaaaacccaaggaaaagcaatcatgaagatgaagctgttgaagcctctagatatgatgctcaggcatccacgtcagttgttgaaccatctccaatgcctcattcaagtgcagggataactactagaaggatggcgtctctatctccaactagcccaggtgtaacaactagaaaaatggctactatttcacctggtggtttctgtcagaggctcatcattgagtagatgaattagcaaacttagtattccacttttgattttttttaatgaaaggtaacgtgtg

SEQ ID NO: 32736 - DNA, 2849 bp, Zea Mays
gacgcctctcttcatcttccttatcccaacatccatcattcactctctcttcctcatttcctcaccaccgtctctcctcctcatagcgcttggcctcatcagcgcctctcccctcaagctcggcacggcgactgccagccaccatccccagctcattcttcccctcatccttctcacccatcacgcctaggtccggcgtgtttccatgtgttaccaacgacggtttgtgtgaaggggaaggaaaggtagggaaagagagaaggagcaggtaggatggagagacgacgacttagggtttcttttagggaattcttgttcaaagatagttacaccatgcctgcagcgctacttaagttctcagcttcaccacacacatcacaccttatatcctccattatgagcctgagacacggacattgggcttcctgacgcgacttgagaccctagggtcgttgcggctgcttgctaggcctgctatctgtccatgaacaccaccaacttctgatgtcgcgatgtctccctcctcacatccctgggcagtgtctgtaacaatcccccggcgatgagagcttgcttgcccccaagcaggagcaaatggaaacttctggcgcagtcttcccacgtagccaatgaaggaggcatgccggaccactggatgagcaattgagacaaccctgcagagttcagacgacattgtaaaattttgtcaggtacctgcaacccttccagggactgaggaagttgagcaacaacaacagttggagagatagccttctttagctgggaaacatggaaaatgggatgtattttagatgaagccggtaaatccaatttgtaagcaaccgatcccactctgttgagaacagtgaagggcccaaaataccggaaagcaagtttttggttcgatctgggagcaagggaagactgaatatatggttgtaaacgcaggtagacttgatccccaccgcaaacactctttcaaatctgcttttatcagcctgggccttcatacgcaattgagcacggtgcaggtgttactgaactaaagttgttatgacagccttgtcttgaagccattcatccagagactgattttgagaattaccaacaacattcaacccaaatggttttggtgagtaaccatataatacttcaaagggggagagacccagggcttcgtgcttgctggagttgtagcagaactcggctaggtaaagccaattgatccatttgctagtgcacacgttgacaaagcaacggagaaaggtttccatacactggttaacacgttccgtttgcccgtctgtttgtgggtggtaggaagaactcatgtgaagcttaacatcagctagcttaaacaaagcttgccacaattggatggtgaatatgctgtcacggtcagaaacaatcgctactggcatgccatggagcttgcatatatgctgcataaagtgttgggccacaaccagtgctgaaaaggggtgtttgagggcaataaagtgactgaattttgagaacttgtcgaccactaccattacacagttcttgttgccataagttgggagaccctccacaaaatccattgtaattgtctgccaagccccattgggtacaggtagaggctgcaagagtccaagatacttgatcctccccggcttggactgttgacacacagagcacgaagccacaaattgtttagcaaacttcctcataccgggccatgcaaacaactgtttcagcttgggatacgtggcagggaaacccgagtgcccacctacaacagaactgtgtatggcctccaagatggcttggtgcattgaccagttgttacccacccatatcatgtttttgaatttgataataccatcctaaagagaaaaatgaggaactgatgatccattcaccaccaatttggctaaaagttgtttagcttcttcatcccacagatagccatcgatgatgtcttgagaccattgtggggaaaatgccgagatggccaggacattaggtgtatcatgcactcgtcttgatagtgcatcaacaaccctattgtctgagccttatttgtaaactatcttgtactgcatgccaagtaactttgtaaagaccttctgttgccaaggggtgttaagcctttgttcattgagagcacctagagggggggtgaataggtgatcctgtaaaacttaaacttatagccacaaaaacttgttaagtgttagcacaataattgccaagtggctagagatgagtctcaacaaaacacaataccacaagagatcaaacacagagatgacacagtggtttatcccgtggttcggccaagaccaacgcttgcctactccacgttgtggcgtcccaacggatgagggttgcaatcaacccctctcaagcggtccaaagaccaacttgaataccacggtgttttgctttgcctttcaatatcccgtttgcgaggaatctccacaacttggagtctctcgcccttacacttgagattcacaaagaaatacggagtaagggggggaatgagcaacgcacacaagacttcaaaagatcagagcaacaacacgcacacaagtagcaacaagagcttgcaacacaactcaaagagttcacaactccacaagagctctatatgctatcacaatgaaacgaatgcgcgagatcgatgtcttggtgcttaggaatgttgtaggaatgcttggtgttctcctccatgcgcctaggggtcccttttatagccccaaggaagctaggagccgttgagaacaaatctggaaggccatccttgccttctgtcgtcgggcgcaccggacagtccggtgcacaccggacactgtccggtg

SEQ ID NO: 32737 - DNA, 1241 bp, Zea Mays
cattttgagctctcctgaggaagcgcttgagggtcccttgggtttcagacttatcctgcaaaaagaacacccaagtgaagcgggaaaagtcatcaaccactacaccatgacacaattttagcgtcaaacatctgacggtaaaaatagatgtttggcgacagcaagtatgtcacaaaataataccatcacactatctgtcggtaattattgcgttggcgtcaacaaatctgtcggcaataatttcgagttattgtggcggttcatctgtcggtataaatggttatgcgtggcacaccgactgtcgggaaaacatagcatcagatcatctgtcggtacatgaatgtcttgagtaattaataaattaatttcaactaatatatttaagtaattactaaatttcaactaatatatttatatactgtacgactgtaccaattaagctcctgcccacgcctggcctgtgggcagcacgctacaagcctaaaaggcaacaaaaaaaaaagacaaaagcaacccaggattcgaacctggcaccaatcgctcctaaggaacaactcaaaccagctgagctagagttcacttgtgttacatggtggagaaatattcttaagaagtaagatctataggaataaattaatgaaccgttttccctggccgaagcgctctctgttattctgtacgcatcttctcctatccgtgagtcctaaaccaccgcgccgctgccaaaaacctaaaccaccgcgccgctgcccccgacgccgtcttacttcgccctgttcttgccccttgagactcggacctccagccgcctgtcctgtggtgcgcagacgtgttcttgctcctgtaggatctttgatctcttgttgctcggctaatcaaaacggaagcgccaccatctctggacttcgaccacaggcgacggtgcacgccctgcgccgacgcgtcctcctccggtccctcccccatcgaccaccgcagcaccgtccaacgctgtgccctgtgatcgtgcggtggtgtagtctgctgctggtgcccaagactgaagaaagatagttcagtctactgctgctgctagcgaggacgagggcgggcgccggaccacctgaaggagaagtgcgtgaacaacgcttggacgacatccattgatcagtggtaatctttacttgttacttttccatctcctgttgatttgcaccggaaaaaactaattaattcagcttttatctttgatacttgtaatg

SEQ ID NO: 32738 - DNA, 803 bp, Zea Mays
agcggccggtccatggcacagcggggcgagctagggcggcagctcccgctgagaggccccctcaaagccctagaggcagacatccaccacgctaacgccatggcagatgctattcagaggaattatggtggatcatgtgtgcagatgaggctgtcgttcagctctctagctccattgttcttgtacttcatccaatggttggactgcggctgctgttatgcccttcccagctatttaggactatttcacattctcatatgcaaggtttatgctgatggagatagctcagtgtcgacatatgaaaggcgggcaagccttagggaattctatggggactggtttgtgtgattgaagcaagtgcatcttgaatctcaagaaggtgaactgcagagggcggatgttgttgtccatctcaaaaggggtatttctatcattgaccgttccttacaagcttactttaaccttacctttttcaaattcacttgtttgcatattttgattttctgcttctatataattcgtgttaggaaaggatacaactagagactactcgattatacagtactccctcgcaaaatcgtgcaacgctacctgtatggattggtctttacccgccaacagacatgcccatgcaccgggtctgcactttccgccccgtgcaccagcaagcatctacactgcatcggcatcaggcttggtttcgacgatgagatcttcgtcgtgagcaacctcacgaacacgtcctcccgatgacttccttcatttgagggagatggggatggtgtttctgagtgatgatgaag

SEQ ID NO: 32739 - DNA, 284 bp, Zea Mays
ctgatcttatacatgccccccgctctctcatcaaacatccaaaccctagccctcgttgtaacctccagatatcaaagcaatactacccaccgcaaacaggatgtagggtattacgcatttcgcggcccgaacctgtataaatcgcgtgttttgtcgcatctccaagcgaaccatcgagctacagtcgatgttgccaacttacaaaagcatctcgtggtacatctcgtggtgcattgccggtactaaacaccaacagtttctaaaggtgaattgctattccaagt

SEQ ID NO: 32740 - DNA, 1407 bp, Zea Mays
tcctcgtcgaacccgtcgccacacgtcttcacacctcaggcatggctcaacagtttcaggcattgccaaatagcagtgttctccactgttggcgcgttcggatcgcggtgcgatgcgtgctagaaatgtttgtgtggcttctgtggacttgttcagccaaaacagcgcagttgctactgctgcgagagaggatgggatacaatgtgtgacgctcctcacctacctcgccgccgcacagatctacaggacgaataggtctcggcactatcgtgttatggtcctcgataatgctcaccattccacacccgcaggggtctcctgttctgctgctgatggcgtgcgtgacctagatctggcgaaggcgtccgtggatacagatgcccaacacacattgttttaaagtgatgtgcgccaagtattaaagagatgcaaataaagaataaaggtaagatctagatgctttgtcaatagttttatatgctaaacaatcttgtccaagtgccagggactcatctaagtaaaggccaaaagagtcaaaggaaaacagacaaaggatcaaaaaaagggtgctgactgcgcagcaccggacggtccggcgcctctcaccggacagtccggtgtgcaccaaacagtctggtgcacggtctgcgaactcgtcgctctcgagttttttcctagctacatcggctataaatcaccgaacagtccacgggaggcgccggacagtccggtgctccagccgtgcaacggctaactaccacgtcgactagtgccaacggtcaaatggtgcaccggacggtccggtgccccacagaaaaggaaatcagccaatcaggggattctctatcgcgtactgtgctcatactattcactgtccgatgcgccaccggacagtccggtgcaccgacgaacagaaggcaagaattgcctatcaaatggagttccaacggctcctagctgccttggggctataaaagggacccctaggcgcatggagcactacatcaagcctccattgaacattctaagacgcctagactccacaaacacgcattcggatcatcgtgtttgagatttgagcacttcttgagtcgtgaactccctgcgttgtgtttgtgtgctcatctcttgacttgtgtgtgggattgctgtgattcttgttcttgcgtgtgtttctttccctcccttactcttgtgtgtttattgtgatcaacattgttagggcgagaggctccaacttgtggagattcctcgcaaacgggaaaagactgctaagaaagaaaatcatggcactcaaggttgatcattggatcacttgagagggattgagtgcaatccttgactgaaggaggtcaccacaatgtggagtaggcattggctgaaccacgggataaaaattaatgtgtc

SEQ ID NO: 32741 - DNA, 382 bp, Zea Mays
atgatggcaaaaacaagagttggagagcagccgggagctgacttaacgattgacaataatatcgcacgaggaacagtgaaacaggaggtggtcctcctagacgtcacgtacccatcatcctccgtgccggtgcgcccggtgcctggtccatcaggtttgttgccgagtcctaaattttggcttcggcgtccagctgacttgatggatctcccgtctcctctctcccgtgggggtggggctttaatgaccattagccggatatccaggcaaagcatggctatagctagttttgttcccagccctcgcgttgccatcgcgcattcaaagcaagatctccgacccaatcttccgcaactgacctaacggtggtggtaggacagcc

SEQ ID NO: 32742 - DNA, 2292 bp, Zea Mays
gttggtggcagagcggacgacaacgcacgcgcgcctcttcctcctcctccccgccgccgccgccgccgccgcgcgcgcctttgcgtgccccataccgtctcctccaacacgctcccctcgttggcatcaatttcccatcccacctgtccaccgtcgcccgccgctatctcgcacccgaacccagcgcctccctcgtcgccgccggcgcgccgccatggtgtcgcagcacggcatcctcctcgcagttaacatcatctccgaccatttcggtcctatcgtatccaaagtgtgtggctgccttctgcgccacggcgcgctgtcgttgcaggatatcgtccgccgcctcgaactctcgcccgggcaggtgaagaactccctcctcattctcattcagcacaactgcgttcaggcctacacaagccccagaggggctggcgataggacagtgacgctctacctggccatcttcgacaatgttctgcaccggctgcgcttctcaaagttcctttccgtcgtccgtgtggatattcctgaggattacttcagaatggtaggctaacatttgagcaacttgtggagcgaacaatatttaaagtatcagaagacagccccttaccaacaagggaagaagtacgaatgaacttcaacaaacttgtctatgcgcattatgtggaacgttgcccaaaaccagaacctttttttgatcctcttgcggttgaacaacctacatccacaaggaaacgggctcctaaaactgttgaggcggttctttcacttgagcagaaagttgtctgtactgcagctctatctgacgctgaaagattttctgagataccatacttcatggacgggtcatcgagtgcaaaagatggccatcatgctgttgctggtaataagcgaaaacatgaaaccttagaagttgatgaagatgattcgataattgcagaaagtgaagtactttggcggataaattttgagagattcatattttgtttaaagaagaagttttgtgcagaacgaaagaaagcaaagatgaggctcggaacacttgctatatgggaagcattttttgaggccaatgtaacaaacaacgacaacaagactgtgacatcaccaatagatggaattttggaaagagtaggacaaaaggaaggaggcatgtcaatgactttggatcacataacaagtgtgttgaatgatttagagtgcacttctaccgctaataacccagaagaattcacattcgatttgaataaattggttgagacatgtcgaaacgatgagatagagtctcttgtgaaaaagaaacatgggcaagaagcttatacaatctttaggttattgctgaaacaaggctctccagttgagacggatgaaattactgacaggacaattctagacaagcaggttgttcatgaaactctatacaagctttggaaagatgaatacatagattcagagagagtcccttcaacatcagcaacaggaacaggaagcgctcagttctttgtttggagagtaaaaaatatttatagggaacacttcatggacaatctttaccatgctgctttaaacttgcgccagatggtcaattatatggctgaactactacttgagggttcaaaggatgaaatcaagcttcggaacagaaaaaacattttgatcctagctctcactagacatgatgaatcccttatgttgttccatgatttttgagaatactggaacaggatctggttataaatttctggtctttggagaaaccaaagcatggtgatttttctttggaattgtcaaagcttcgtacctatgatgttgttgagggagttgctcgtcaacttgaattggaccatgcatgaaaattcggcttacatcccacaattgctaatctcagcaacctaaaccacagcctgtcaagtatcgaacagtggagcatctgttggacatgctcatcctttacaatcagattaaccttttttgtttcttttggtcaatatgagcatgatttccgtgtaacaaaatgtgttggacttcctgaactttaacaaagattattacattcagttaaaacatcgtttcccccagtttatatgtaacatcagaatagatgttctttgtggttaaatgtcattgtgcgccaagtcatgcatctggtatgcttgtctgttgctgttaacgcctcgtaggttgtctggacgacttcatttggaacacatgccaacaggcaaacaagaggggcatatttatattgcagtttagagtaacagacatgatatcctactatttctttgt

SEQ ID NO: 32743 - DNA, 2303 bp, Zea Mays
gttggtggcagagcggacgacaacgcacgcgcgcctcttcctcctcctccccgccgccgccgccgccgccgcgcgcgcctttgcgtgccccataccgtctcctccaacacgctcccctcgttggcatcaatttcccatcccacctgtccaccgtcgcccgccgctatctcgcacccgaacccagcgcctccctcgtcgccgccggcgcgccgccatggtgtcgcagcacggcatcctcctcgcagttaacatcatctccgaccatttcggtcctatcgtatccaaagtgtgtggctgccttctgcgccacggcgcgctgtcgttgcaggatatcgtccgccgcctcgaactctcgcccgggcaggtgaagaactccctcctcattctcattcagcacaactgcgttcaggcctacacaagccccagaggggctggcgataggacagtgacgctctacctggccatcttcgacaatgttctgcaccggctgcgcttctcaaagttcctttccgtcgtccgtgtggatattcctgagtcagaagttcttctcgaaggattacttcagaatggtaggctaacatttgagcaacttgtggagcgaacaatatttaaagtatcagaagacagccccttaccaacaagggaagaagtacgaatgaacttcaacaaacttgtctatgcgcattatgtggaacgttgcccaaaaccagaacctttttttgatcctcttgcggttgaacaacctacatccacaaggaaacgggctcctaaaactgttgaggcggttctttcacttgagcagaaagttgtctgtactgcagctctatctgacgctgaaagattttctgagataccatacttcatggacgggtcatcgagtgcaaaagatggccatcatgctgttgctgcgaaaacatgaaaccttagaagttgatgaagatgattcgataattgcagaaagtgaagtactttggcggataaattttgagagattcatattttgtttaaagaagaagttttgtgcagaacgaaagaaagcaaagatgaggctcggaacacttgctatatgggaagcattttttgaggccaatgtaacaaacaacgacaacaagactgtgacatcaccaatagatggaattttggaaagagtaggacaaaaggaaggaggcatgtcaatgactttggatcacataacaagtgtgttgaatgatttagagtgcacttctaccgctaataacccagaagaattcacattcgatttgaataaattggttgagacatgtcgaaacgatgagatagagtctcttgtgaaaaagaaacatgggcaagaagcttatacaatctttaggttattgctgaaacaaggctctccagttgagacggatgaaattactgacaggacaattctagacaagcaggttgttcatgaaactctatacaagctttggaaagatgaatacatagattcagagagagtcccttcaacatcagcaacaggaacaggaagcgctcagttctttgtttggagagtaaaaaatatttatagggaacacttcatggacaatctttaccatgctgctttaaacttgcgccagatggtcaattatatggctgaactactacttgagggttcaaaggatgaaatcaagcttcggaacagaaaaaacattttgatcctagctctcactagacatgatgaatcccttatgttgttccatgatttttgagaatactggaacaggatctggttataaatttctggtctttggagaaaccaaagcatggtgatttttctttggaattgtcaaagcttcgtacctatgatgttgttgagggagttgctcgtcaacttgaattggaccatgcatgaaaattcggcttacatcccacaattgctaatctcagcaacctaaaccacagcctgtcaagtatcgaacagtggagcatctgttggacatgctcatcctttacaatcagattaaccttttttgtttcttttggtcaatatgagcatgatttccgtgtaacaaaatgtgttggacttcctgaactttaacaaagattattacattcagttaaaacatcgtttcccccagtttatatgtaacatcagaatagatgttctttgtggttaaatgtcattgtgcgccaagtcatgcatctggtatgcttgtctgttgctgttaacgcctcgtaggttgtctggacgacttcatttggaacacatgccaacaggcaaacaagaggggcatatttatattgcagtttagagtaacagacatgatatcctactatttctttgt

SEQ ID NO: 32744 - DNA, 2190 bp, Zea Mays
gttggtggcagagcggacgacaacgcacgcgcgcctcttcctcctcctccccgccgccgccgccgccgccgcgcgcgcctttgcgtgccccataccgtctcctccaacacgctcccctcgttggcatcaatttcccatcccacctgtccaccgtcgcccgccgctatctcgcacccgaacccagcgcctccctcgtcgccgccggcgcgccgccatggtgtcgcagcacggcatcctcctcgcagttaacatcatctccgaccatttcggtcctatcgtatccaaagtgtgtggctgccttctgcgccacggcgcgctgtcgttgcaggatatcgtccgccgcctcgaactctcgcccgggcaggggctggcgataggacagtgacgctctacctggccatcttcgacaatgttctgcaccggctgcgcttctcaaagttcctttccgtcgtccgtgtggatattcctgagtcagaagttcttctcgaaggattacttcagaatggtaggctaacatttgagcaacttgtggagcgaacaatatttaaagtatcagaagacagccccttaccaacaagggaagaagtacgaatgaacttcaacaaacttgtctatgcgcattatgtggaacgttgcccaaaaccagaacctttttttgatcctcttgcggttgaacaacctacatccacaaggaaacgggctcctaaaactgttgaggcggttctttcacttgagcagaaagttgtctgtactgcagctctatctgacgctgaaagattttctgagataccatacttcatggacgggtcatcgagtgcaaaagatggccatcatgctgttgctggtaataagcgaaaacatgaaaccttagaagttgatgaagatgattcgataattgcagaaagtgaagtactttggcggataaattttgagagattcatattttgtttaaagaagaagttttgtgcagaacgaaagaaagcaaagatgaggctcggaacacttgctatatgggaagcattttttgaggccaatgtaacaaacaacgacaacaagactgtgacatcaccaatagatggaattttggaaagagtaggacaaaaggaaggaggcatgtcaatgactttggatcacataacaagtgtgttgaatgatttagagtgcacttctaccgctaataacccagaagaattcacattcgatagagtctcttgtgaaaaagaaacatgggcaagaagcttatacaatctttaggttattgctgaaacaaggctctccagttgagacggatgaaattactgacaggacaattctagacaagcaggttgttcatgaaactctatacaagctttggaaagatgaatacatagattcagagagagtcccttcaacatcagcaacaggaacaggaagcgctcagttctttgtttggagagtaaaaaatatttatagggaacacttcatggacaatctttaccatgctgctttaaacttgcgccagatggtcaattatatggctgaactactacttgagggttcaaaggatgaaatcaagcttcggaacagaaaaaacattttgatcctagctctcactagacatgatgaatcccttatgttgttccatgatttttgagaatactggaacaggatctggttataaatttctggtctttggagaaaccaaagcatggtcaaagcttcgtacctatgatgttgttgagggagttgctcgtcaacttgaattggaccatgcatgaaaattcggcttacatcccacaattgctaatctcagcaacctaaaccacagcctgtcaagtatcgaacagtggagcatctgttggacatgctcatcctttacaatcagattaaccttttttgtttcttttggtcaatatgagcatgatttccgtgtaacaaaatgtgttggacttcctgaactttaacaaagattattacattcagttaaaacatcgtttcccccagtttatatgtaacatcagaatagatgttctttgtggttaaatgtcattgtgcgccaagtcatgcatctggtatgcttgtctgttgctgttaacgcctcgtaggttgtctggacgacttcatttggaacacatgccaacaggcaaacaagaggggcatatttatattgcagtttagagtaacagacatgatatcctactatttctttgt

SEQ ID NO: 32745 - DNA, 2314 bp, Zea Mays
gttggtggcagagcggacgacaacgcacgcgcgcctcttcctcctcctccccgccgccgccgccgccgccgcgcgcgcctttgcgtgccccataccgtctcctccaacacgctcccctcgttggcatcaatttcccatcccacctgtccaccgtcgcccgccgctatctcgcacccgaacccagcgcctccctcgtcgccgccggcgcgccgccatggtgtcgcagcacggcatcctcctcgcagttaacatcatctccgaccatttcggtcctatcgtatccaaagtgtgtggctgccttctgcgccacggcgcgctgtcgttgcaggatatcgtccgccgcctcgaactctcgcccgggcaggtgaagaactccctcctcattctcattcagcacaactgcgttcaggcctacacaagccccagaggggctggcgataggacagtgacgctctacctggccatcttcgacaatgttctgcaccggctgcgcttctcaaagttcctttccgtcgtccgtgtggatattcctgaggtatcagaagttcttctcgaaggattacttcagaatggtaggctaacatttgagcaacttgtggagcgaacaatatttaaagtatcagaagacagccccttaccaacaagggaagaagtacgaatgaacttcaacaaacttgtctatgcgcattatgtggaacgttgcccaaaaccagaacctttttttgatcctcttgcggttgaacaacctacatccacaaggaaacgggctcctaaaactgttgaggcggttctttcacttgagcagaaagttgtctgtactgcagctctatctgacgctgaaagattttctgagataccatacttcatggacgggtcatcgagtgcaaaagatggccatcatgctgttgctggtaataagcgaaaacatgaaaccttagaagttgatgaagatgattcgataattgcagaaagtgaagtactttggcggataaattttgagagattcatattttgtttaaagaagaagttttgtgcagaacgaaagaaagcaaagatgaggctcggaacacttgctatatgggaagcattttttgaggccaatgtaacaaacaacgacaacaagactgtgacatcaccaatagatggaattttggaaagagtaggacaaaaggaaggaggcatgtcaatgactttggatcacataacaagtgtgttgaatgatttagagtgcacttctaccgctaataacccagaagaattcacattcgatttgaataaattggttgagacatgtcgaaacgatgagatagagtctcttgtgaaaaagaaacatgggcaagaagcttatacaatctttaggttattgctgaaacaaggctctccagttgagacggatgaaattactgacaggacaattctagacaagcaggttgttcatgaaactctatacaagctttggaaagatgaatacatagattcagagagagtcccttcaacatcagcaacaggaacaggaagcgctcagttctttgtttggagagtaaaaaatatttatagggaacacttcatggacaatctttaccatgctgctttaaacttgcgccagatggtcaattatatggctgaactactacttgagggttcaaaggatgaaatcaagcttcggaacagaaaaaacattttgatcctagctctcactagacatgatgaatcccttatgttgttccatgatttttgagaatactggaacaggatctggttataaatttctggtctttggagaaaccaaagcatggtgatttttctttggaattgtcaaagcttcgtacctatgatgttgttgagggagttgctcgtcaacttgaattggaccatgcatgaaaattcggcttacatcccacaattgctaatctcagcaacctaaaccacagcctgtcaagtatcgaacagtggagcatctgttggacatgctcatcctttacaatcagattaaccttttttgtttcttttggtcaatatgagcatgatttccgtgtaacaaaatgtgttggacttcctgaactttaacaaagattattacattcagttaaaacatcgtttcccccagtttatatgtaacatcagaatagatgttctttgtggttaaatgtcattgtgcgccaagtcatgcatctggtatgcttgtctgttgctgttaacgcctcgtaggttgtctggacgacttcatttggaacacatgccaacaggcaaacaagaggggcatatttatattgcagtttagagtaacagacatgatatcctactatttctttgt

SEQ ID NO: 32746 - DNA, 1029 bp, Zea Mays
gccattgaaatatctctatttctactatattaaaccaccaatgtctccaggttccacggtcgctgtgctcccccacatttaaatagtaaaaataacaaaaaaaatatacatacataaagatttgaactatggttgctagttttaaattttaaaactcacattcacatccacctatccaattgaacaaacattttcctaagctcggacttggaggctcgcaaaacgccacaagaagcccgatccacacgagagtctgtcgcttgaaacggaccttatcagcatcgtcgctcggcccattcgaggcccacagagtgaggaggagtcgaggagcaggaggctagggtttaaggtgcacggcgatggcgacggcggcgaagaccctagcgcgggctgagctcgctccccggcgagatctccttcccctgcggcctcccctcgctccgcttcttcatcgacgacgttgaggatcctgttgctaatgaccctctccagttgcttccgaaaagaacttaccagcccagtaccatcaagcggaaaagaacccatggattccttacacgtaaatcgaccaagggtgggcgcaaggtgattgcccggagaatcgcaaaaggcaggcacagaatttcagtttagcaagatcccatagcagcactggatgttttctgtactactacagattcgtatcgtgttccttgtgtgaacgacgtattttaagccttttgaagtttttgcatgccaccctgctgaagcatgaagctgagcccccgcgcaagcagctgaaacaaactcttgctgcgaaataaacaagtcaaaggaactggaaaattgccgcgccgaatgagttcatttggagcagctgcgtgccgcatttgtgtttgtttgtgctggaattgccacgtatcagagatgcgtgcgtggtctgagtgtggtcgcagtagcacttggccttgttttcagagtgggggtcaagggggggtcctagtgtaatactttcctctcttataaatcaccaggagagattttattcta

SEQ ID NO: 32747 - DNA, 654 bp, Zea Mays
gtcatactgttccctgtatatagagattgtagtgcgtgaccactcgaaactcgcatgacttctgtaggactgcgcaattactgtgttgaggatcctgttgctaatgaccctctccagttgcttccgaaaagaacttaccagcccagtaccatcaagcggaaaagaacccatggattccttacacgtaaatcgaccaagggtgggcgcaaggtgattgcccggagaatcgcaaaaggcaggcacagaatttcagtttagcaagatcccatagcagcactggatgttttctgtactactacagattcgtatcgtgttccttgtgtgaacgacgtattttaagccttttgaagtttttgcatgccaccctgctgaagcatgaagctgagcccccgcgcaagcagctgaaacaaactcttgctgcgaaataaacaagtcaaaggaactggaaaattgccgcgccgaatgagttcatttggagcagctgcgtgccgcatttgtgtttgtttgtgctggaattgccacgtatcagagatgcgtgcgtggtctgagtgtggtcgcagtagcacttggccttgttttcagagtgggggtcaagggggggtcctagtgtaatactttcctctcttataaatcaccaggagagattttattcta

SEQ ID NO: 32748 - DNA, 611 bp, Zea Mays
ctgagattgtgtggagcttgggaagttctgctactcgtaaacttgaggatcctgttgctaatgaccctctccagttgcttccgaaaagaacttaccagcccagtaccatcaagcggaaaagaacccatggattccttacacgtaaatcgaccaagggtgggcgcaaggtgattgcccggagaatcgcaaaaggcaggcacagaatttcagtttagcaagatcccatagcagcactggatgttttctgtactactacagattcgtatcgtgttccttgtgtgaacgacgtattttaagccttttgaagtttttgcatgccaccctgctgaagcatgaagctgagcccccgcgcaagcagctgaaacaaactcttgctgcgaaataaacaagtcaaaggaactggaaaattgccgcgccgaatgagttcatttggagcagctgcgtgccgcatttgtgtttgtttgtgctggaattgccacgtatcagagatgcgtgcgtggtctgagtgtggtcgcagtagcacttggccttgttttcagagtgggggtcaagggggggtcctagtgtaatactttcctctcttataaatcaccaggagagattttattcta

SEQ ID NO: 32749 - DNA, 1829 bp, Zea Mays
gcgcgttcaaaatgcttcaccggaggtgtcttcaagggaccacatacaaaaaaaaacttcaaacggtcctgtttttttttcccaaaaacttttacaatttccgttccataatggccttggtcgtatgcagctgtttatataaaatgcctaaaccccgtacccctagtccccgaccacctcaccgcatcgccaccggcccaccgcgcagccagatggcctcttcctcctcgtgcccgctcgcccccgggacaagcggatgcaagcccaggacgacgcggaccagcggcgtcgggttcggagtcgaagcaatggcgcggagcgtggcggcagtgaagctggagccgaagccggagccgtgggcggcggaagcagaggaggggtcgtcagttgtgccgcggtcgatggaggggccaccgtttccggcgccgttcgtggcgaagacgtacgagatggtgtcggacgcggccacggacgccgtagtgtcgtgggcgccctgcggcgcggggaacactttcgtggtgtgggacccgcaggcgctcgccaccggcatcctcccgcgcttcttcaagcacgccaacttcgcgtccttcgtcaggcagctcaacgtctacgaaggtgaatccagatcgttgggagtttgcaaacgaatcattcttagcaggccagaagcatctgctgaaaagcatcaggaggaggcgcgcgtccaagcctcaggtagaagcatcgccaagaaacagcgcaagtgcttgttccggacagcccaacaaggatcccggggtggtcgagagtttgaaacgggaccgcgcagcgctcagggctgaagtcatcacgctaaggcagcagtacagcatttgcaaatcccaactcgtcgccctggaggagaggatcctgaacaacgagagggaccagcagaaggccatcgccttcttcgcaaaggtgctcagcaacccagctttcgtgcagcaggtcctgcgcaactacgccagggagagagagctacacggcgcttccaaaagacagcggctgatggaaaacgaaggacatcggcagggcgatttgccactgaggggtagcaccgaagccgcgtttgcgaccggtgcggctggcgtctctgtggggactgggagcacaaatgttggcacagccgcgagacaggaggagtctggttctgagttgaatgatcaggaggtgaacagtatttggtctgacgtgtgggacgagctggacctggacctggacgcggtaccaggcgctgaaatggaccggcgagaagcggacaagggcgtcgctggcttccacgacgtcgaggacttgagtggccggccttgcggttggggtgatgagttctcgtatctcgcggagccgatgcagttcgtggagcactatgactagtggtgcaagaatagcttgatctggagctggaggggatgatcagtggcttgttcatagcttcaccatactaggattctgccagctgagattcgtatatactggttgagttgacatgctggctgtggtgtggtgtatagcgtcagctcggacttctcagaacgtactgcaaaccaggatgtgataatttgtccttttcttttctaacttttgctggataaagtacagggtgcagcgaatgataccatcgtggagcatttagctttcggacattggtaccgccaacgatggcatatttcgcgatgttagaacttaacatgttgtgtcaagagtttgctcgacttgacctactatgttggtatcacttaggtctttgagcttgatattatgtattatttggatctccaaactttgattaatgtactccaatgtggcacggc

SEQ ID NO: 32750 - DNA, 3549 bp, Zea Mays
agcagcggcaaaaatgcagcgccaccgactcaccgtatacttggcggatttcgcccacgcccgcctctgccgaagaccagccgccgctgtcgacggcgaactcccgcggcgagtcgaccgccgtctcagaccctaaggcctaagccctagttccagcccacccagttccttaaccatggaggatgccctcgcgccgccgtctgtggccccgactccctcccccctcgccgccgctgccgtcctcacccgtcgtcggtcacacctcgacagtgcctccttccgcacgctctcccgcctcttctctcactgtctccacatcaacccgtcgccctgtggcatctcgccgcccgtgcccgagcccgtcgccgcggacttcgtcggtggggaccccgacgattccccagaaaggcctaatggcgctgatttcgatcggctaaaggatgtgcaaatcgaggcggcggatgcgggaggcccttcgcttcacgggactgtccatcaaccggccgcggcgaactctaccctcgacctggttgaggctgaggctgaggctctgcagctcgagggtgcggacgcggtaggggtcgtagaaagcacctcgtgtatgaccagagccgaggctggggaatcagcggtacttgtggtagaaagcacctcatgtaagaccactgctgaggtggaggagtcagcggttggagctggactggcgatggtgggtgacgtatctttgaagtcggtggagtctctcttggagacgaaggttgacgaatcggtagaggtagcagtgggtgatgatgaaggctgtcttttgtttgaagcgatgctgacaaacttcacagggttgattgatgatgttgatgctggagcaataccaacacagaggtgtgcagtttctggaggtgacctgcagaatagcaaggcatctgaggatttgaaacaactgggtgataggattgaagaaggagaacctcttagaaactgtgataatgggcagaatgatggtggtggtttcgaggaaggagagattgagggcgagtttcaggatttgggttcagaagaatctggaaattccgaacatggagacgaagatggtgaagatgagaaattggaagacaattccattagcagaggctcagggccaaataaatcttgtgattatggcacacaattcgggaatttgcaatcaattcctgaaacaggaaatgatcatcttatactgaacagggatgctattgtcagaggtgatgcacaaatatctgttaccagggctcaagccgtcacttatgatgaagttgtggattggaatgagactccgctgcctgacaatgagactgtcaaccctgggaagaagagaaaacgcattctgacagaagagagaaaagctaaaaaaacaaaaaataaaagaaagaaccgggcactgcaacggatagcggatggagtcaaaagaccaaaacttactcctgttacaaagccaaaaaaaccttgccacttctatgaccatgggaagtgccgccaaggaaataattgcaagttttcccatgattttacaccttcaacaaaatctaagccctgcacacattttgcatgtggttcttgtttgaaaggagaagagtgtccatatgaccatgagttgtcaaagtacgaatgccataactataaaaacaatggaacatgtgccagaggtgataattgcaaattctctcatgtgatgccaactacagaaggtactcccacacaagatgcaaagacttctgatgcttcactggcatatgagaaaacaaacaccagagagcatacaagaagccagaagaacgcaacagttcacaatgttgctcctagtaattctatcctaagaaacctggctggcgtctccagcaaatcccagaatgtttctaaccatattccaaagggcgtgcagtttctttccattggtaaaggtcaatccaatctggacagcctgcacctggatgctttgttcatggagaagcaaaggaatgcaaatggtactcaacataaccttggaggacatgaagcagaaaggcaaaaaattgtgaagcaaaatagccagaaaccgaatctattgctagacgataagaattcatcagaaggagctactaggcatccatgttcagacccccaaaaagctactttacctgttaattctattgcaacacctggatcaatacatactcagcatgaagtctcagaggcttctaggattttgcaggagttcttgtttggtgctggcagttagaggaaagtatgtgtgaactattctgccttttgatacctgtattttgcactatatatattaagtcgatataaaattttgccaattgctgtttacatggattgaattcatgcccatgtcctttcgactcttctgatacgctgccagtttccttgctggaactgcacctcaaagtttgttttctattttggctacttgcaaggtcaacaggaaaatatcactgtaggcaaatgtgtatcgttgttttgttactaacaaagttgaccgaggacttaattttgcagaagtaagcacaggtttactagtcttcaaaagctgacttttgtggactccgtgaacaagttcaacccacactgtagttacttggaatggagcaaacagttgggtcaacttactgatgtcatggaaaagttgaacctcaagtcacgaggtagaacaacaggacttgatgtgtcattattgggttcctaacaagctgactgtttagtgaggcgcacctcctgtcagggaactcagattcctattcctccatgcaagagctttacgtccgtccgtttgccacatgagaatggccggctggtttagtcttgaatcatcatcatgattcagtacacatctacctttgctggcgaccaacattagcctggtgcagtgcatggtctgggcttgcatgcatgcaatgcccccgggatctccgttcctatctcttgggttgagatttacatatgaagcatagctgaaaaggttgtggtccgccgcagcagatgctgaaggccccaggtatgtgctggagccaggcatgtgagctgtgtgcccctctacgcctgggcgtcgtcacatgaccaggtgaccgaccgtgacgcctgtttctccctacagcagtcaagtttgttctgtcgatcatatgatggtgttcaattccttggagcaaattacccctctcccgggccccggcagtaaatacacggttcgtgctctattgtttatttgcgtgtggaaggaggtggttcagatgacccccccccccccccccccggatttaccgagaatcccggccgaggtgtgtgtgtatgtgtggtggttatcttgattcgccaagtattactattactgtcactgtcagtctcgaaaggaaagaaagcgagacgaaattatggactgggcgacttgtgcgcctcaacaggtactctgtgcttcacgtcttgggaactgctggataggttcattttacgtgtctatctgcgggtgaaaatccttcctctgggaatcttgtcgtggctaatttgtcgcttacgattgca

SEQ ID NO: 32751 - DNA, 3864 bp, Zea Mays
caaaaatgcagcgccaccgactcaccgtatacttggcggatttcgcccacgcccgcctctgccgaagaccagccgccgctgtcgacggcgaactcccgcggcgagtcgaccgccgtctcagaccctaaggcctaagccctagttccagcccacccagttccttaaccatggaggatgccctcgcgccgccgtctgtggccccgactccctcccccctcgccgccgctgccgtcctcacccgtcgtcggtcacacctcgacagtgcctccttccgcacgctctcccgcctcttctctcactgtctccacatcaacccgtcgccctgtggcatctcgccgcccgtgcccgagcccgtcgccgcggacttcgtcggtggggaccccgacgattccccagaaaggcctaatggcgctgatttcgatcggctaaaggatgtgcaaatcgaggcggcggatgcgggaggcccttcgcttcacgggactgtccatcaaccggccgcggcgaactctaccctcgacctggttgaggctgaggctgaggctctgcagctcgagggtgcggacgcggtaggggtcgtagaaagcacctcgtgtatgaccagagccgaggctggggaatcagcggtacttgtggtagaaagcacctcatgtaagaccactgctgaggtggaggagtcagcggttggagctggactggcgatggtgggtgacgtatctttgaagtcggtggagtctctcttggagacgaaggttgacgaatcggtagaggtagcagtgggtgatgatgaaggctgtcttttgtttgaagcgatgctgacaaacttcacagggttgattgatgatgttgatgctggagcaataccaacacagaggtgtgcagtttctggaggtgacctgcagaatagcaaggcatctgaggatttgaaacaactgggtgataggattgaagaaggagaacctcttagaaactgtgataatgggcagaatgatggtggtggtttcgaggaaggagagattgagggcgagtttcaggatttgggttcagaagaatctggaaattccgaacatggagacgaagatggtgaagatgagaaattggaagacaattccattagcagaggctcagggccaaataaatcttgtgattatggcacacaattcgggaatttgcaatcaattcctgaaacaggaaatgatcatcttatactgaacagggatgctattgtcagaggtgatgcacaaatatctgttaccagggctcaagccgtcacttatgatgaagttgtggattggaatgagactccgctgcctgacaatgagactgtcaaccctgggaagaagagaaaacgcattctgacagaagagagaaaagctaaaaaaacaaaaaataaaagaaagaaccgggcactgcaacggatagcggatggagtcaaaagaccaaaacttactcctgttacaaagccaaaaaaaccttgccacttctatgaccatgggaagtgccgccaaggaaataattgcaagttttcccatgattttacaccttcaacaaaatctaagccctgcacacattttgcatgtggttcttgtttgaaaggagaagagtgtccatatgaccatgagttgtcaaagtacgaatgccataactataaaaacaatggaacatgtgccagaggtgataattgcaaattctctcatgtgatgccaactacagaaggtactcccacacaagatgcaaagacttctgatgcttcactggcatatgagaaaacaaacaccagagagcatacaagaagccagaagaacgcaacagttcacaatgttgctcctagtaattctatcctaagaaacctggctggcgtctccagcaaatcccagaatgtttctaaccatattccaaagggcgtgcagtttctttccattggtaaaggtcaatccaatctggacagcctgcacctggatgctttgttcatggagaagcaaaggaatgcaaatggtactcaacataaccttggaggacatgaagcagaaaggcaaaaaattgtgaagcaaaatagccagaaaccgaatctattgctagacgataagaattcatcagaaggagctactaggcatccatgttcagacccccaaaaagctactttacctgttaattctattgcaacacctggatcaatacatactcagcatgaagtctcagaggcttctaggattttgcaggagttcttgtttggtgctggcagttagaggaaaaagtaagcacaggtttactagtcttcaaaagctgacttttgtggactccgtgaacaagttcaacccacactgtagttacttggaatggagcaaacagttgggtcaacttactggtatgacagaatgcctcgtccaattagtacttgcatgaactaactcaacatgtaattatcatgagtacctccttggactaactttgacatattattatactgtattttactttggaagtcattttctccgttaagatgtgaactttacttctttcgtttatgtgaatttgtgcataatagtaatccatgacttctcaacgatccctgtgccaccaataattcatgaaattccctatatgccatcgtctgtgttggcctgtagggatttcagtgattttgctgtggtacagggataattgcatcgaatttgtgtgtaatccctctgctcaaatttattgacgcggttctttttctatgtaaaacggaggaataaaactcttcatggtcttgatggagcaactttgacaactatgtcttgccttgatgtattcgtagtggctacaagtgctgacaatttttgcaagggccaatgggtggtatccagttactgacgacagggcttgtttagttgattccttgtgagttatccacaggtttgatgcagaaatctgatgtggcccctctgcttagatgtcacgatgtgatccctttgctttagatgtcatggaaaagttgaacctcaagtcacgaggtagaacaacaggacttgatgtgtcattattgggttcctaacaagctgactgtttagtgaggcgcacctcctgtcagggaactcagattcctattcctccatgcaagagctttacgtccgtccgtttgccacatgagaatggccggctggtttagtcttgaatcatcatcatgattcagtacacatctacctttgctggcgaccaacattagcctggtgcagtgcatggtctgggcttgcatgcatgcaatgcccccgggatctccgttcctatctcttgggttgagatttacatatgaagcatagctgaaaaggttgtggtccgccgcagcagatgctgaaggccccaggtatgtgctggagccaggcatgtgagctgtgtgcccctctacgcctgggcgtcgtcacatgaccaggtgaccgaccgtgacgcctgtttctccctacagcagtcaagtttgttctgtcgatcatatgatggtgttcaattccttggagcaaattacccctctcccgggccccggcagtaaatacacggttcgtgctctattgtttatttgcgtgtggaaggaggtggttcagatgacccccccccccccccccccggatttaccgagaatcccggccgaggtgtgtgtgtatgtgtggtggttatcttgattcgccaagtattactattactgtcactgtcagtctcgaaaggaaagaaagcgagacgaaattatggactgggcgacttgtgcgcctcaacaggtactctgtgcttcacgtcttgggaactgctggataggttcattttacgtgtctatctgcgggtgaaaatccttcctctgggaatcttgtcgtggctaatttgtcgcttacgattgca

SEQ ID NO: 32752 - DNA, 2380 bp, Zea Mays
gcgccaccgactcaccgtatacttggcggatttcgcccacgcccgcctctgccgaagaccagccgccgctgtcgacggcgaactcccgcggcgagtcgaccgccgtctcagaccctaaggcctaagccctagttccagcccacccagttccttaaccatggaggatgccctcgcgccgccgtctgtggccccgactccctcccccctcgccgccgctgccgtcctcacccgtcgtcggtcacacctcgacagtgcctccttccgcacgctctcccgcctcttctctcactgtctccacatcaacccgtcgccctgtggcatctcgccgcccgtgcccgagcccgtcgccgcggacttcgtcggtggggaccccgacgattccccagaaaggcctaatggcgctgatttcgatcggctaaaggatgtgcaaatcgaggcggcggatgcgggaggcccttcgcttcacgggactgtccatcaaccggccgcggcgaactctaccctcgacctggttgaggctgaggctgaggctctgcagctcgagggtgcggacgcggtaggggtcgtagaaagcacctcgtgtatgaccagagccgaggctggggaatcagcggtacttgtggtagaaagcacctcatgtaagaccactgctgaggtggaggagtcagcggttggagctggactggcgatggtgggtgacgtatctttgaagtcggtggagtctctcttggagacgaaggttgacgaatcggtagaggtagcagtgggtgatgatgaaggctgtcttttgtttgaagcgatgctgacaaacttcacagggttgattgatgatgttgatgctggagcaataccaacacagaggtgtgcagtttctggaggtgacctgcagaatagcaaggcatctgaggatttgaaacaactgggtgataggattgaagaaggagaacctcttagaaactgtgataatgggcagaatgatggtggtggtttcgaggaaggagagattgagggcgagtttcaggatttgggttcagaagaatctggaaattccgaacatggagacgaagatggtgaagatgagaaattggaagacaattccattagcagaggctcagggccaaataaatcttgtgattatggcacacaattcgggaatttgcaatcaattcctgaaacaggaaatgatcatcttatactgaacagggatgctattgtcagaggtgatgcacaaatatctgttaccagggctcaagccgtcacttatgatgaagttgtggattggaatgagactccgctgcctgacaatgagactgtcaaccctgggaagaagagaaaacgcattctgacagaagagagaaaagctaaaaaaacaaaaaataaaagaaagaaccgggcactgcaacggatagcggatggagtcaaaagaccaaaacttactcctgttacaaagccaaaaaaaccttgccacttctatgaccatgggaagtgccgccaaggaaataattgcaagttttcccatgattttacaccttcaacaaaatctaagccctgcacacattttgcatgtggttcttgtttgaaaggagaagagtgtccatatgaccatgagttgtcaaagtacgaatgccataactataaaaacaatggaacatgtgccagaggtgataattgcaaattctctcatgtgatgccaactacagaaggtactcccacacaagatgcaaagacttctgatgcttcactggcatatgagaaaacaaacaccagagagcatacaagaagccagaagaacgcaacagttcacaatgttgctcctagtaattctatcctaagaaacctggctggcgtctccagcaaatcccagaatgtttctaaccatattccaaagggcgtgcagtttctttccattggtaaaggtcaatccaatctggacagcctgcacctggatgctttgttcatggagaagcaaaggaatgcaaatggtactcaacataaccttggaggacatgaagcagaaaggcaaaaaattgtgaagcaaaatagccagaaaccgaatctattgctagacgataagaattcatcagaaggagctactaggcatccatgttcagacccccaaaaagctactttacctgttaattctattgcaacacctggatcaatacatactcagcatgaagtctcagaggcttctaggattttgcaggagttcttgtttggtgctggcagttagaggaaaaagtaagcacaggtttactagtcttcaaaagctgacttttgtggactccgtgaacaagttcaacccacactgtagttacttggaatggagcaaacagttgggtcaacttactggaataaaactcttcatggtcttgatgga

SEQ ID NO: 32753 - DNA, 2377 bp, Zea Mays
gcgccaccgactcaccgtatacttggcggatttcgcccacgcccgcctctgccgaagaccagccgccgctgtcgacggcgaactcccgcggcgagtcgaccgccgtctcagaccctaaggcctaagccctagttccagcccacccagttccttaaccatggaggatgccctcgcgccgccgtctgtggccccgactccctcccccctcgccgccgctgccgtcctcacccgtcgtcggtcacacctcgacagtgcctccttccgcacgctctcccgcctcttctctcactgtctccacatcaacccgtcgccctgtggcatctcgccgcccgtgcccgagcccgtcgccgcggacttcgtcggtggggaccccgacgattccccagaaaggcctaatggcgctgatttcgatcggctaaaggatgtgcaaatcgaggcggcggatgcgggaggcccttcgcttcacgggactgtccatcaaccggccgcggcgaactctaccctcgacctggttgaggctgaggctgaggctctgcagctcgagggtgcggacgcggtaggggtcgtagaaagcacctcgtgtatgaccagagccgaggctggggaatcagcggtacttgtggtagaaagcacctcatgtaagaccactgctgaggtggaggagtcagcggttggagctggactggcgatggtgggtgacgtatctttgaagtcggtggagtctctcttggagacgaaggttgacgaatcggtagaggtagcagtgggtgatgatgaaggctgtcttttgtttgaagcgatgctgacaaacttcacagggttgattgatgatgttgatgctggagcaataccaacacagaggtgtgcagtttctggaggtgacctgcagaatagcaaggcatctgaggatttgaaacaactgggtgataggattgaagaaggagaacctcttagaaactgtgataatgggcagaatgatggtggtggtttcgaggaaggagagattgagggcgagtttcaggatttgggttcagaagaatctggaaattccgaacatggagacgaagatggtgaagatgagaaattggaagacaattccattagcagaggctcagggccaaataaatcttgtgattatggcacacaattcgggaatttgcaatcaattcctgaaacaggaaatgatcatcttatactgaacagggatgctattgtcagaggtgatgcacaaatatctgttaccagggctcaagccgtcacttatgatgaagttgtggattggaatgagactccgctgcctgacaatgagactgtcaaccctgggaagaagagaaaacgcattctgacagaagagagaaaagctaaaaaaacaaaaaataaaagaaagaaccgggcactgcaacggatagcggatggagtcaaaagaccaaaacttactcctgttacaaagccaaaaaaaccttgccacttctatgaccatgggaagtgccgccaaggaaataattgcaagttttcccatgattttacaccttcaacaaaatctaagccctgcacacattttgcatgtggttcttgtttgaaaggagaagagtgtccatatgaccatgagttgtcaaagtacgaatgccataactataaaaacaatggaacatgtgccagaggtgataattgcaaattctctcatgtgatgccaactacagaaggtactcccacacaagatgcaaagacttctgatgcttcactggcatatgagaaaacaaacaccagagagcatacaagaagccagaagaacgcaacagttcacaatgttgctcctagtaattctatcctaagaaacctggctggcgtctccagcaaatcccagaatgtttctaaccatattccaaagggcgtgcagtttctttccattggtaaaggtcaatccaatctggacagcctgcacctggatgctttgttcatggagaagcaaaggaatgcaaatggtactcaacataaccttggaggacatgaagcagaaaggcaaaaaattgtgaagcaaaatagccagaaaccgaatctattgctagacgataagaattcatcagaaggagctactaggcatccatgttcagacccccaaaaagctactttacctgttaattctattgcaacacctggatcaatacatactcagcatgaagtctcagaggcttctaggattttgcaggagttcttgtttggtgctggcagttagaggaaaaagtaagcacaggtttactagtcttcaaaagctgacttttgtggactccgtgaacaagttcaacccacactgtagttacttggaatggagcaaacagttgggtcaacttactggtttgatgcagaaatctgatgtggc

SEQ ID NO: 32754 - DNA, 3236 bp, Zea Mays
gcgccaccgactcaccgtatacttggcggatttcgcccacgcccgcctctgccgaagaccagccgccgctgtcgacggcgaactcccgcggcgagtcgaccgccgtctcagaccctaaggcctaagccctagttccagcccacccagttccttaaccatggaggatgccctcgcgccgccgtctgtggccccgactccctcccccctcgccgccgctgccgtcctcacccgtcgtcggtcacacctcgacagtgcctccttccgcacgctctcccgcctcttctctcactgtctccacatcaacccgtcgccctgtggcatctcgccgcccgtgcccgagcccgtcgccgcggacttcgtcggtggggaccccgacgattccccagaaaggcctaatggcgctgatttcgatcggctaaaggatgtgcaaatcgaggcggcggatgcgggaggcccttcgcttcacgggactgtccatcaaccggccgcggcgaactctaccctcgacctggttgaggctgaggctgaggctctgcagctcgagggtgcggacgcggtaggggtcgtagaaagcacctcgtgtatgaccagagccgaggctggggaatcagcggtacttgtggtagaaagcacctcatgtaagaccactgctgaggtggaggagtcagcggttggagctggactggcgatggtgggtgacgtatctttgaagtcggtggagtctctcttggagacgaaggttgacgaatcggtagaggtagcagtgggtgatgatgaaggctgtcttttgtttgaagcgatgctgacaaacttcacagggttgattgatgatgttgatgctggagcaataccaacacagaggtgtgcagtttctggaggtgacctgcagaatagcaaggcatctgaggatttgaaacaactgggtgataggattgaagaaggagaacctcttagaaactgtgataatgggcagaatgatggtggtggtttcgaggaaggagagattgagggcgagtttcaggatttgggttcagaagaatctggaaattccgaacatggagacgaagatggtgaagatgagaaattggaagacaattccattagcagaggctcagggccaaataaatcttgtgattatggcacacaattcgggaatttgcaatcaattcctgaaacaggaaatgatcatcttatactgaacagggatgctattgtcagaggtgatgcacaaatatctgttaccagggctcaagccgtcacttatgatgaagttgtggattggaatgagactccgctgcctgacaatgagactgtcaaccctgggaagaagagaaaacgcattctgacagaagagagaaaagctaaaaaaacaaaaaataaaagaaagaaccgggcactgcaacggatagcggatggagtcaaaagaccaaaacttactcctgttacaaagccaaaaaaaccttgccacttctatgaccatgggaagtgccgccaaggaaataattgcaagttttcccatgattttacaccttcaacaaaatctaagccctgcacacattttgcatgtggttcttgtttgaaaggagaagagtgtccatatgaccatgagttgtcaaagtacgaatgccataactataaaaacaatggaacatgtgccagaggtgataattgcaaattctctcatgtgatgccaactacagaaggtactcccacacaagatgcaaagacttctgatgcttcactggcatatgagaaaacaaacaccagagagcatacaagaagccagaagaacgcaacagttcacaatgttgctcctagtaattctatcctaagaaacctggctggcgtctccagcaaatcccagaatgtttctaaccatattccaaagggcgtgcagtttctttccattggtaaaggtcaatccaatctggacagcctgcacctggatgctttgttcatggagaagcaaaggaatgcaaatggtactcaacataaccttggaggacatgaagcagaaaggcaaaaaattgtgaagcaaaatagccagaaaccgaatctattgctagacgataagaattcatcagaaggagctactaggcatccatgttcagacccccaaaaagctactttacctgttaattctattgcaacacctggatcaatacatactcagcatgaagtctcagaggcttctaggattttgcaggagttcttgtttggtgctggcagttagaggaaaaagtaagcacaggtttactagtcttcaaaagctgacttttgtggactccgtgaacaagttcaacccacactgtagttacttggaatggagcaaacagttgggtcaacttactgatgtcatggaaaagttgaacctcaagtcacgagggaactcagattcctattcctccatgcaagagctttacgtccgtccgtttgccacatgagaatggccggctggtttagtcttgaatcatcatcatgattcagtacacatctacctttgctggcgaccaacattagcctggtgcagtgcatggtctgggcttgcatgcatgcaatgcccccgggatctccgttcctatctcttgggttgagatttacatatgaagcatagctgaaaaggttgtggtccgccgcagcagatgctgaaggccccagaattacgtcacatggtcatctgactgaagagggttcacatgacgattcatcggtgcagcttggcgtggaagcaggcatgtgagctgtgtgcccctctacgcctgggcgtcgtcacatgaccaggtgaccgaccgtgacgcctgtttctccctacagcagtcaagtttgttctgtcgatcatatgatggtgttcaattccttggagcaaattacccctctcccgggccccggcagtaaatacacggttcgtgctctattgtttatttgcgtgtggaaggaggtggttcagatgacccccccccccccccccccggatttaccgagaatcccggccgaggtgtgtgtgtatgtgtggtggttatcttgattcgccaagtattactattactgtcactgtcagtctcgaaaggaaagaaagcgagacgaaattatggactgggcgacttgtgcgcctcaacaggtactctgtgcttcacgtcttgggaactgctggataggttcattttacgtgtctatctgcgggtgaaaatccttcctctgggaatcttgtcgtggctaatttgtcgcttacgattgca

SEQ ID NO: 32755 - DNA, 3276 bp, Zea Mays
gcgccaccgactcaccgtatacttggcggatttcgcccacgcccgcctctgccgaagaccagccgccgctgtcgacggcgaactcccgcggcgagtcgaccgccgtctcagaccctaaggcctaagccctagttccagcccacccagttccttaaccatggaggatgccctcgcgccgccgtctgtggccccgactccctcccccctcgccgccgctgccgtcctcacccgtcgtcggtcacacctcgacagtgcctccttccgcacgctctcccgcctcttctctcactgtctccacatcaacccgtcgccctgtggcatctcgccgcccgtgcccgagcccgtcgccgcggacttcgtcggtggggaccccgacgattccccagaaaggcctaatggcgctgatttcgatcggctaaaggatgtgcaaatcgaggcggcggatgcgggaggcccttcgcttcacgggactgtccatcaaccggccgcggcgaactctaccctcgacctggttgaggctgaggctgaggctctgcagctcgagggtgcggacgcggtaggggtcgtagaaagcacctcgtgtatgaccagagccgaggctggggaatcagcggtacttgtggtagaaagcacctcatgtaagaccactgctgaggtggaggagtcagcggttggagctggactggcgatggtgggtgacgtatctttgaagtcggtggagtctctcttggagacgaaggttgacgaatcggtagaggtagcagtgggtgatgatgaaggctgtcttttgtttgaagcgatgctgacaaacttcacagggttgattgatgatgttgatgctggagcaataccaacacagaggtgtgcagtttctggaggtgacctgcagaatagcaaggcatctgaggatttgaaacaactgggtgataggattgaagaaggagaacctcttagaaactgtgataatgggcagaatgatggtggtggtttcgaggaaggagagattgagggcgagtttcaggatttgggttcagaagaatctggaaattccgaacatggagacgaagatggtgaagatgagaaattggaagacaattccattagcagaggctcagggccaaataaatcttgtgattatggcacacaattcgggaatttgcaatcaattcctgaaacaggaaatgatcatcttatactgaacagggatgctattgtcagaggtgatgcacaaatatctgttaccagggctcaagccgtcacttatgatgaagttgtggattggaatgagactccgctgcctgacaatgagactgtcaaccctgggaagaagagaaaacgcattctgacagaagagagaaaagctaaaaaaacaaaaaataaaagaaagaaccgggcactgcaacggatagcggatggagtcaaaagaccaaaacttactcctgttacaaagccaaaaaaaccttgccacttctatgaccatgggaagtgccgccaaggaaataattgcaagttttcccatgattttacaccttcaacaaaatctaagccctgcacacattttgcatgtggttcttgtttgaaaggagaagagtgtccatatgaccatgagttgtcaaagtacgaatgccataactataaaaacaatggaacatgtgccagaggtgataattgcaaattctctcatgtgatgccaactacagaaggtactcccacacaagatgcaaagacttctgatgcttcactggcatatgagaaaacaaacaccagagagcatacaagaagccagaagaacgcaacagttcacaatgttgctcctagtaattctatcctaagaaacctggctggcgtctccagcaaatcccagaatgtttctaaccatattccaaagggcgtgcagtttctttccattggtaaaggtcaatccaatctggacagcctgcacctggatgctttgttcatggagaagcaaaggaatgcaaatggtactcaacataaccttggaggacatgaagcagaaaggcaaaaaattgtgaagcaaaatagccagaaaccgaatctattgctagacgataagaattcatcagaaggagctactaggcatccatgttcagacccccaaaaagctactttacctgttaattctattgcaacacctggatcaatacatactcagcatgaagtctcagaggcttctaggattttgcaggagttcttgtttggtgctggcagttagaggaaaaagtaagcacaggtttactagtcttcaaaagctgacttttgtggactccgtgaacaagttcaacccacactgtagttacttggaatggagcaaacagttgggtcaacttactgatgtcatggaaaagttgaacctcaagtcacgaggtgggtttccgtacatttctttctgttgggctgtccattgaaagattcctccccatgaaaacgtactgtgtgtggcccgattcgtccagccgctttgggaactcagattcctattcctccatgcaagagctttacgtccgtccgtttgccacatgagaatggccggctggtttagtcttgaatcatcatcatgattcagtacacatctacctttgctggcgaccaacattagcctggtgcagtgcatggtctgggcttgcatgcatgcaatgcccccgggatctccgttcctatctcttgggttgagatttacatatgaagcatagctgaaaaggttgtggtccgccgcagcagatgctgaaggccccaggtatgtgctggagccaggcatgtgagctgtgtgcccctctacgcctgggcgtcgtcacatgaccaggtgaccgaccgtgacgcctgtttctccctacagcagtcaagtttgttctgtcgatcatatgatggtgttcaattccttggagcaaattacccctctcccgggccccggcagtaaatacacggttcgtgctctattgtttatttgcgtgtggaaggaggtggttcagatgacccccccccccccccccccggatttaccgagaatcccggccgaggtgtgtgtgtatgtgtggtggttatcttgattcgccaagtattactattactgtcactgtcagtctcgaaaggaaagaaagcgagacgaaattatggactgggcgacttgtgcgcctcaacaggtactctgtgcttcacgtcttgggaactgctggataggttcattttacgtgtctatctgcgggtgaaaatccttcctctgggaatcttgtcgtggctaatttgtcgcttacgattgca

SEQ ID NO: 32756 - DNA, 3599 bp, Zea Mays
gcgccaccgactcaccgtatacttggcggatttcgcccacgcccgcctctgccgaagaccagccgccgctgtcgacggcgaactcccgcggcgagtcgaccgccgtctcagaccctaaggcctaagccctagttccagcccacccagttccttaaccatggaggatgccctcgcgccgccgtctgtggccccgactccctcccccctcgccgccgctgccgtcctcacccgtcgtcggtcacacctcgacagtgcctccttccgcacgctctcccgcctcttctctcactgtctccacatcaacccgtcgccctgtggcatctcgccgcccgtgcccgagcccgtcgccgcggacttcgtcggtggggaccccgacgattccccagaaaggcctaatggcgctgatttcgatcggctaaaggatgtgcaaatcgaggcggcggatgcgggaggcccttcgcttcacgggactgtccatcaaccggccgcggcgaactctaccctcgacctggttgaggctgaggctgaggctctgcagctcgagggtgcggacgcggtaggggtcgtagaaagcacctcgtgtatgaccagagccgaggctggggaatcagcggtacttgtggtagaaagcacctcatgtaagaccactgctgaggtggaggagtcagcggttggagctggactggcgatggtgggtgacgtatctttgaagtcggtggagtctctcttggagacgaaggttgacgaatcggtagaggtagcagtgggtgatgatgaaggctgtcttttgtttgaagcgatgctgacaaacttcacagggttgattgatgatgttgatgctggagcaataccaacacagaggtgtgcagtttctggaggtgacctgcagaatagcaaggcatctgaggatttgaaacaactgggtgataggattgaagaaggagaacctcttagaaactgtgataatgggcagaatgatggtggtggtttcgaggaaggagagattgagggcgagtttcaggatttgggttcagaagaatctggaaattccgaacatggagacgaagatggtgaagatgagaaattggaagacaattccattagcagaggctcagggccaaataaatcttgtgattatggcacacaattcgggaatttgcaatcaattcctgaaacaggaaatgatcatcttatactgaacagggatgctattgtcagaggtgatgcacaaatatctgttaccagggctcaagccgtcacttatgatgaagttgtggattggaatgagactccgctgcctgacaatgagactgtcaaccctgggaagaagagaaaacgcattctgacagaagagagaaaagctaaaaaaacaaaaaataaaagaaagaaccgggcactgcaacggatagcggatggagtcaaaagaccaaaacttactcctgttacaaagccaaaaaaaccttgccacttctatgaccatgggaagtgccgccaaggaaataattgcaagttttcccatgattttacaccttcaacaaaatctaagccctgcacacattttgcatgtggttcttgtttgaaaggagaagagtgtccatatgaccatgagttgtcaaagtacgaatgccataactataaaaacaatggaacatgtgccagaggtgataattgcaaattctctcatgtgatgccaactacagaaggtactcccacacaagatgcaaagacttctgatgcttcactggcatatgagaaaacaaacaccagagagcatacaagaagccagaagaacgcaacagttcacaatgttgctcctagtaattctatcctaagaaacctggctggcgtctccagcaaatcccagaatgtttctaaccatattccaaagggcgtgcagtttctttccattggtaaaggtcaatccaatctggacagcctgcacctggatgctttgttcatggagaagcaaaggaatgcaaatggtactcaacataaccttggaggacatgaagcagaaaggcaaaaaattgtgaagcaaaatagccagaaaccgaatctattgctagacgataagaattcatcagaaggagctactaggcatccatgttcagacccccaaaaagctactttacctgttaattctattgcaacacctggatcaatacatactcagcatgaagtctcagaggcttctaggattttgcaggagttcttgtttggtgctggcagttagaggaaaaagtaagcacaggtttactagtcttcaaaagctgacttttgtggactccgtgaacaagttcaacccacactgtagttacttggaatggagcaaacagttgggtcaacttactgtggctacaagtgctgacaatttttgcaagggccaatgggtggtatccagttactgacgacagggcttgtttagttgattccttgtgagttatccacaggtttgatgcagaaatctgatgtggcccctctgcttagatgtcacgatgtgatccctttgctttagatgtcatggaaaagttgaacctcaagtcacgaggtagaacaacaggacttgatgtgtcattattgggttcctaacaagctgactgtttagtgaggcgcacctcctgtcaggtgggtttccgtacatttctttctgttgggctgtccattgaaagattcctccccatgaaaacgtactgtgtgtggcccgattcgtccagccgctttggtatgaagcttttgcctcgcctttagaaagagtttgaggaaacaaaagtgatcttgtcaacttctttctttttttcatttcagggaactcagattcctattcctccatgcaagagctttacgtccgtccgtttgccacatgagaatggccggctggtttagtcttgaatcatcatcatgattcagtacacatctacctttgctggcgaccaacattagcctggtgcagtgcatggtctgggcttgcatgcatgcaatgcccccgggatctccgttcctatctcttgggttgagatttacatatgaagcatagctgaaaaggttgtggtccgccgcagcagatgctgaaggccccaggtatgtgctggagccaggcatgtgagctgtgtgcccctctacgcctgggcgtcgtcacatgaccaggtgaccgaccgtgacgcctgtttctccctacagcagtcaagtttgttctgtcgatcatatgatggtgttcaattccttggagcaaattacccctctcccgggccccggcagtaaatacacggttcgtgctctattgtttatttgcgtgtggaaggaggtggttcagatgacccccccccccccccccccggatttaccgagaatcccggccgaggtgtgtgtgtatgtgtggtggttatcttgattcgccaagtattactattactgtcactgtcagtctcgaaaggaaagaaagcgagacgaaattatggactgggcgacttgtgcgcctcaacaggtactctgtgcttcacgtcttgggaactgctggataggttcattttacgtgtctatctgcgggtgaaaatccttcctctgggaatcttgtcgtggctaatttgtcgcttacgattgca

SEQ ID NO: 32757 - DNA, 1571 bp, Zea Mays
accgactcaccgtatacttggcggatttcgcccacgcccgcctctgccgaagaccagccgccgctgtcgacggcgaactcccgcggcgagtcgaccgccgtctcagaccctaaggcctaagccctagttccagcccacccagttccttaaccatggaggatgccctcgcgccgccgtctgtggccccgactccctcccccctcgccgccgctgccgtcctcacccgtcgtcggtcacacctcgacagtgcctccttccgcacgctctcccgcctcttctctcactgtctccacatcaacccgtcgccctgtggcatctcgccgcccgtgcccgagcccgtcgccgcggacttcgtcggtggggaccccgacgattccccagaaaggcctaatggcgctgatttcgatcggctaaaggatgtgcaaatcgaggcggcggatgcgggaggcccttcgcttcacgggactgtccatcaaccggccgcggcgaactctaccctcgacctggttgaggctgaggctgaggctctgcagctcgagggtgcggacgcggtaggggtcgtagaaagcacctcgtgtatgaccagagccgaggctggggaatcagcggtacttgtggtagaaagcacctcatgtaagaccactgctgaggtggaggagtcagcggttggagctggactggcgatggtgggtgacgtatctttgaagtcggtggagtctctcttggagacgaaggttgacgaatcggtagaggtagcagtgggtgatgatgaaggctgtcttttgtttgaagcgatgctgacaaacttcacagggttgattgatgatgttgatgctggagcaataccaacacagaggtgtgcagtttctggaggtgacctgcagaatagcaaggcatctgaggatttgaaacaactgggtgataggattgaagaaggagaacctcttagaaactgtgataatgggcagaatgatggtggtggtttcgaggaaggagagattgagggcgagtttcaggatttgggttcagaagaatctggaaattccgaacatggagacgaagatggtgaagatgagaaattggaagacaattccattagcagaggctcagggccaaataaatcttgtgattatggcacacaattcgggaatttgcaatcaattcctgaaacaggaaatgatcatcttatactgaacagggatgctattgtcagaggtgatgcacaaatatctgttaccagggctcaagccgtcacttatgatgaagttgtggattggaatgagactccgctgcctgacaatgagactgtcaaccctgggaagaagagaaaacgcattctgacagaagagagaaaagctaaaaaaacaaaaaataaaagaaagaaccgggcactgcaacggatagcggatggagtcaaaagaccaaaacttactcctgttacaaagccaaaaaaaccttgccacttctatgaccatgggaagtgccgccaaggaaataattgcaagttttcccatgattttacaccttcaacaaaatctaagataagtggcttaagggacgctccatcagag

SEQ ID NO: 32758 - DNA, 1734 bp, Zea Mays
aaacttttcagaatggtggggaaagccctgcacacattttgcatgtggttcttgtttgaaaggagaagagtgtccatatgaccatgagttgtcaaagtacgaatgccataactataaaaacaatggaacatgtgccagaggtgataattgcaaattctctcatgtgatgccaactacagaaggtactcccacacaagatgcaaagacttctgatgcttcactggcatatgagaaaacaaacaccagagagcatacaagaagccagaagaacgcaacagttcacaatgttgctcctagtaattctatcctaagaaacctggctggcgtctccagcaaatcccagaatgtttctaaccatattccaaagggcgtgcagtttctttccattggtaaaggtcaatccaatctggacagcctgcacctggatgctttgttcatggagaagcaaaggaatgcaaatggtactcaacataaccttggaggacatgaagcagaaaggcaaaaaattgtgaagcaaaatagccagaaaccgaatctattgctagacgataagaattcatcagaaggagctactaggcatccatgttcagacccccaaaaagctactttacctgttaattctattgcaacacctggatcaatacatactcagcatgaagtctcagaggcttctaggattttgcaggagttcttgtttggtgctggcagttagaggaaaaagtaagcacaggtttactagtcttcaaaagctgacttttgtggactccgtgaacaagttcaacccacactgtagttacttggaatggagcaaacagttgggtcaacttactgatgtcatggaaaagttgaacctcaagtcacgaggtagaacaacaggacttgatgtgtcattattgggttcctaacaagctgactgtttagtgaggcgcacctcctgtcagggaactcagattcctattcctccatgcaagagctttacgtccgtccgtttgccacatgagaatggccggctggtttagtcttgaatcatcatcatgattcagtacacatctacctttgctggcgaccaacattagcctggtgcagtgcatggtctgggcttgcatgcatgcaatgcccccgggatctccgttcctatctcttgggttgagatttacatatgaagcatagctgaaaaggttgtggtccgccgcagcagatgctgaaggccccagcttggcgtggaagcaggcatgtgagctgtgtgcccctctacgcctgggcgtcgtcacatgaccaggtgaccgaccgtgacgcctgtttctccctacagcagtcaagtttgttctgtcgatcatatgatggtgttcaattccttggagcaaattacccctctcccgggccccggcagtaaatacacggttcgtgctctattgtttatttgcgtgtggaaggaggtggttcagatgacccccccccccccccccccggatttaccgagaatcccggccgaggtgtgtgtgtatgtgtggtggttatcttgattcgccaagtattactattactgtcactgtcagtctcgaaaggaaagaaagcgagacgaaattatggactgggcgacttgtgcgcctcaacaggtactctgtgcttcacgtcttgggaactgctggataggttcattttacgtgtctatctgcgggtgaaaatccttcctctgggaatcttgtcgtggctaatttgtcgcttacgattgca

SEQ ID NO: 32759 - DNA, 3986 bp, Zea Mays
ctttgggatcctggctcgctctcttttcccttctccggttctcccctgaaagcgagcagcggatagataaagctcgggtcggctttggtgccacgtactggccttcttccccttcgctctgacactgttcctcttccctcctcctcctcctcctccccccacccacctcctcctgctctttccccgtgtgtccgtcctctcctccccggcgggcggccatgactgctgtggcctccctctagcctcgctgggcggctgctgtgccagctctagaaagatacgacagctgttggccttcagctgctggcgctgctcgactgcactgcacaccatagagaggaagggagagagagagagagggagggagaggcagaggcagaggcagaggggggagtgtgtgttatacagcaagtgcaagatcatcaggcgaagctagctactagccgccctcctcagctcggaggcggcttggacttcacctagtatgttccaccatcagcaggagctcctacaggcagaagctgcggcggcagatcgggagagcagcatgtccaacaacctcacctcctccgcgcccggcggccccaacgcggcgccagctgctgctgcggccaccggcaataataacaagcgaaagcggagcctcccaggcaaccccgaccccgaggcggaggtcgtggctctgtctccggcgacgctgatggcgacgaaccgcttcttgtgcgagatctgcgggaaagggttccagcgggaccagaacctgcagctgcaccggcgcgggcacaacctgccgtggaagctgaagcagcggggcgcgggcaaggaggcgcagcggaagaaggtgtacgtgtgcccggaggcgtcgtgcgtgcaccacgacccggcccgcgcgctgggcgacctcacgggcatcaagaagcacttcttccgcaagcacggcgagaagaagtggaagtgcgacaagtgctccaagaggtacgccgtccactccgactggaaggcgcactccaagatctgcggcaccagggagtacaagtgcgactgcggcaccgtattctccaggtaaaattgaagtaactaactagagagaccacctttgctatgctagctagatagcggctagccgatccatcttccttccatttgcccgctccagtgtgtcagtgtgcacgcacactggccaacctgatcctctcttgaactcttctttcaccatttggaggtcatgcatgcatgatgatcgtcagcccctgatgagatgagtgatgaatgcatgtggtgattgagatttcaactagtagatagggcactgattaattaaatgatgcgtcaggctagatcgataggatacgatgctagcagtagtagaggtagacaccagaccagagtgcagtgctgtggtgtactgcactggcaatggcactggggtcggctcggtttctgcctgctttgctgcttgcaaccagcgaagcgatgcagaagagagaaggatttgaaggttgcggattgggtgttggagaagaaaggcaagttgtccagggcgtcgtgcatgtgtgtccatggacagaaaagatggaccactttgtaactaagacctccgatccccctttgctcttttctttttgtccatggacgacgaggggaggcttcggaagcagctgttactgctgctagctgcatggtgaacggaacccgataataggcaatagggctcagagcttagcttgggcgcatgcgcgtgtctgattcatatattctttcgttcattttgttcgagctctgagagaagcccgagcaccgaaaagctagctagctagctacggggcatagggctgaggaagagagacctgcgacctccatccatggcgattggcgaggaaggaacgaggtgtagtggaggctggctgggagtgggacaggcatgtgattctctttgcagagccgaggcggccggctttctatctccgtcgctcgccccaatgctactccctatcctatgatcccctatccatgctgcctgctagagctagctgcatgactacacgcactgtcctcctctctcctgtgatgtcccttctctccccagtctttctctctctgtctctgtctctccaacaccagtcacacacggcagcattgcgttgctagcagcagcctaggcttgtagccatgacaggcaaacaagatcaaacgagatggaaggacgaaggaacttttgcttttagctttctctttctcttttcctttttttttttgcttccgatcgagctcgcctctgatcccggcagcacggacgggctacagctcctatgctgcagtctgcagcaggagagggtcgtaaagatttgattctcttcgtccttccttttctttttgcgtcgcatgcaatgcaacgcaacgtgtgcaggcgggacagcttcatcacgcaccgcgccttctgcgacgcgctcaccgaggagagcgccaaggccatcggcggcgtcaacgccatggcagcgccggtgcaccaccaccaccacccgatgctcttctcgccgccgcccgcgcacgtcatgcagcagcaggacgtcctcctcctccaggagcatcaacaccaccagcaccagcagcagcagcaggaggacgatgtcatgcagcagccgccgccgcagcagtgcaactacgccatgaagacggagatgccgccgtggccggcgatggcctacgaccacccgctgctgcagccgctctgcaacgccgccgccgcagcggcggcgcagggctcggcggccacgtccgcgccgcagctgcccgcggcctccgcgcacctgtcggccacggcgctgctgcagaaggcggcgcagatgggcgccaccatcggcggcgcgggctacacccagatggcgggtcccgcgacgagcgccaccgccgccttcggcctcggcctcccgggcctgcagaatgcccagcaccaccacccgcagcagcaagatggcggcggcggggtcatggcggccgggctcgcgaggacagccagctcccacggccgcggcggcgacgaaggcggcggaggcggatcaggcgacggcatgaccagggactttctcggcctgcgcgccttctcccaccgcgacatcctcggcctcgctggcctggactcctcgtgcatgggcgccatcaccgccagcgccagcatgggctgctacgagccacagcaacaacatacacagcctcaggcgccgcagcagcagcaaagcagcaacgaaccatggcacggcatggggcagccatagctagcttaggtcgtcgctacccattctggcaccaaagctactttctgtgcgtcttcctctcatcagccgtactacatcgccgtcgctgcttcaattctgattatcgctgccgccgcgcgcggtgcagaggcaaaactagctacggccggccgcccagagtgcaacgcgtggcttttgagtcgggtaatctcatcgtctcccgcccctcacttcggtcatcttttgctcctgttcatgctgtcatcccgtctgaacttttaaccacgcaatgcaagcaagcctgcaagctaggatgaggatgatagattggattggataatacacaagtacgcagggagttgtgtaattttttttcaggttggggaagaagatcgaccaacatgtaaactaataagctcggttcaattaagcagatgggaagaacaccatagctacgtgacagtaataataatacatgcatgcgttcatcgtctcttttgtctggtcactacatccatccatgtgtgcaattttggtgatataaaagtttctctttttttcccaaaaaccagtattatttggtggcattgacttgagagagtagattgtgaatgaactggagatggagtccttggtgtagtatagtagactgcaggatccgtagatgagctgaggtgcattcttgggtctacgagacatgcatgtgtggcctaccggctgtgatatatactattt

SEQ ID NO: 32760 - DNA, 4435 bp, Zea Mays
ctcgctctcttttcccttctccggttctcccctgaaagcgagcagcggatagataaagctcgggtcggctttggtgccacgtactggccttcttccccttcgctctgacactgttcctcttccctcctcctcctcctcctccccccacccacctcctcctgctctttccccgtgtgtccgtcctctcctccccggcgggcggccatgactgctgtggcctccctctagcctcgctgggcggctgctgtgccagctctagaaagatacgacagctgttggccttcagctgctggcgctgctcgactgcactgcacaccatagagaggaagggagagagagagagagggagggagaggcagaggcagaggcagaggggggagtgtgtgtgtgcgtgtctgtgcctgccatgtgtgatagaaagaatctggaattgctttccaagtcattgaccgcccagttccagtttccttccccccctcgttttgtccccctcctgagcctccttgattcctgtgttgcttgctgttcctccctccctccctgcctgcttgtgtgtgttgttgctgttattccctgcttggctgttcatgcatcaagcaagctccccagcatctttctctcccatacatacccccttgtctgatgcctgcttctgcttctgcttgcccatcccctccttcattcttgacgagttaaatgcatgcctttcagcagattgctgcacacatccctctcgatttattgcctgccaccacacccctttttcttccgctatcttccttctcctagctagctagctaggtagacacacagtcacacacacatatcagtagtggtgtgtatatgatagtatacagcaagtgcaagatcatcaggcgaagctagctactagccgccctcctcagctcggaggcggcttggacttcacctagtatgttccaccatcagcaggagctcctacaggcagaagctgcggcggcagatcgggagagcagcatgtccaacaacctcacctcctccgcgcccggcggccccaacgcggcgccagctgctgctgcggccaccggcaataataacaagcgaaagcggagcctcccaggcaaccccgaccccgaggcggaggtcgtggctctgtctccggcgacgctgatggcgacgaaccgcttcttgtgcgagatctgcgggaaagggttccagcgggaccagaacctgcagctgcaccggcgcgggcacaacctgccgtggaagctgaagcagcggggcgcgggcaaggaggcgcagcggaagaaggtgtacgtgtgcccggaggcgtcgtgcgtgcaccacgacccggcccgcgcgctgggcgacctcacgggcatcaagaagcacttcttccgcaagcacggcgagaagaagtggaagtgcgacaagtgctccaagaggtacgccgtccactccgactggaaggcgcactccaagatctgcggcaccagggagtacaagtgcgactgcggcaccgtattctccaggtaaaattgaagtaactaactagagagaccacctttgctatgctagctagatagcggctagccgatccatcttccttccatttgcccgctccagtgtgtcagtgtgcacgcacactggccaacctgatcctctcttgaactcttctttcaccatttggaggtcatgcatgcatgatgatcgtcagcccctgatgagatgagtgatgaatgcatgtggtgattgagatttcaactagtagatagggcactgattaattaaatgatgcgtcaggctagatcgataggatacgatgctagcagtagtagaggtagacaccagaccagagtgcagtgctgtggtgtactgcactggcaatggcactggggtcggctcggtttctgcctgctttgctgcttgcaaccagcgaagcgatgcagaagagagaaggatttgaaggttgcggattgggtgttggagaagaaaggcaagttgtccagggcgtcgtgcatgtgtgtccatggacagaaaagatggaccactttgtaactaagacctccgatccccctttgctcttttctttttgtccatggacgacgaggggaggcttcggaagcagctgttactgctgctagctgcatggtgaacggaacccgataataggcaatagggctcagagcttagcttgggcgcatgcgcgtgtctgattcatatattctttcgttcattttgttcgagctctgagagaagcccgagcaccgaaaagctagctagctagctacggggcatagggctgaggaagagagacctgcgacctccatccatggcgattggcgaggaaggaacgaggtgtagtggaggctggctgggagtgggacaggcatgtgattctctttgcagagccgaggcggccggctttctatctccgtcgctcgccccaatgctactccctatcctatgatcccctatccatgctgcctgctagagctagctgcatgactacacgcactgtcctcctctctcctgtgatgtcccttctctccccagtctttctctctctgtctctgtctctccaacaccagtcacacacggcagcattgcgttgctagcagcagcctaggcttgtagccatgacaggcaaacaagatcaaacgagatggaaggacgaaggaacttttgcttttagctttctctttctcttttcctttttttttttgcttccgatcgagctcgcctctgatcccggcagcacggacgggctacagctcctatgctgcagtctgcagcaggagagggtcgtaaagatttgattctcttcgtccttccttttctttttgcgtcgcatgcaatgcaacgcaacgtgtgcaggcgggacagcttcatcacgcaccgcgccttctgcgacgcgctcaccgaggagagcgccaaggccatcggcggcgtcaacgccatggcagcgccggtgcaccaccaccaccacccgatgctcttctcgccgccgcccgcgcacgtcatgcagcagcaggacgtcctcctcctccaggagcatcaacaccaccagcaccagcagcagcagcaggaggacgatgtcatgcagcagccgccgccgcagcagtgcaactacgccatgaagacggagatgccgccgtggccggcgatggcctacgaccacccgctgctgcagccgctctgcaacgccgccgccgcagcggcggcgcagggctcggcggccacgtccgcgccgcagctgcccgcggcctccgcgcacctgtcggccacggcgctgctgcagaaggcggcgcagatgggcgccaccatcggcggcgcgggctacacccagatggcgggtcccgcgacgagcgccaccgccgccttcggcctcggcctcccgggcctgcagaatgcccagcaccaccacccgcagcagcaagatggcggcggcggggtcatggcggccgggctcgcgaggacagccagctcccacggccgcggcggcgacgaaggcggcggaggcggatcaggcgacggcatgaccagggactttctcggcctgcgcgccttctcccaccgcgacatcctcggcctcgctggcctggactcctcgtgcatgggcgccatcaccgccagcgccagcatgggctgctacgagccacagcaacaacatacacagcctcaggcgccgcagcagcagcaaagcagcaacgaaccatggcacggcatggggcagccatagctagcttaggtcgtcgctacccattctggcaccaaagctactttctgtgcgtcttcctctcatcagccgtactacatcgccgtcgctgcttcaattctgattatcgctgccgccgcgcgcggtgcagaggcaaaactagctacggccggccgcccagagtgcaacgcgtggcttttgagtcgggtaatctcatcgtctcccgcccctcacttcggtcatcttttgctcctgttcatgctgtcatcccgtctgaacttttaaccacgcaatgcaagcaagcctgcaagctaggatgaggatgatagattggattggataatacacaagtacgcagggagttgtgtaattttttttcaggttggggaagaagatcgaccaacatgtaaactaataagctcggttcaattaagcagatgggaagaacaccatagctacgtgacagtaataataatacatgcatgcgttcatcgtctcttttgtctggtcactacatccatccatgtgtgcaattttggtgatataaaagtttctctttttttcccaaaaaccagtattatttggtggcattgacttgagagagtagattgtgaatgaactggagatggagtccttggtgtagtatagtagactgcaggatccgtagatgagctgaggtgcattcttgggtctacgagacatgcatgtgtggcctaccggctgtgatatatactattt

SEQ ID NO: 32761 - DNA, 3370 bp, Zea Mays
caggtttgtggtgatctgtaactttgcggggttcagacttcagacagaggtgctcttgtcaccgtttcagttaagacactctgatccactgaagaataagacttagtcatgccactcgatgccgataactcctcctgcaacaatgccaaggaaacagcagtatccaagtccataggtcgatgaataaaaactacaactttgatattagagcgaagactatcaacgaatctatttattatggctactgaatgaaggatcatgggcatgaagctggtgcataatagaatcaaagagatcaacatattcagtaacagttgctgtctgtctaatatggaagaactgacgtataaggtggttgtgttgatcacgttcgaaatgggcgctcacgtccgcacaaaattcagaccaatgagtgtgtcgtatagcaggatctacagattgaagccaaaaggcagctgtgcccacaaaattgagaggcaattttaacccacaactcaactgggatggcaaaaacttcgaagtaagactcacacttggtcttccacaccttgggatgatgaccatcgaattgaggaaaactgagattcggtagggatgcagttaaatgagcaggataaacagatgtaggcaacaccggctctaactggtgaggagcagtattaattggggaaccagagatcgaaaagtgctgcacacctgtgaccggaggtggagttagggtggtcagttggtcaccaccccaaaaccatcactccggtgagtatcatgaagacgatggccatttggtccttgagctgaattaagaaacggcattgcaaggcatcgaccagcaaaagcaatctacaatgaactagttgcttcctcccctttgggtgttcttcgaagtgacatcacttcaggtgccaggattagacatttacaagagaggaaccagtcaagttacattggtagccttgcacgccgggtccgagacttagaatcaccaagcggaacttctctgcttaaagagatttacagaagtgacccagagcgtgtcatacaaatatttgaaagccaaccttcattacattctaatcctgcagcactttcggagtatgtaaaagctcttgtaagggttgataggctggatgaaagtgccttgcttaaaacactgcagagaggtgttgcttcctcgacaaggggcgaagaaagctttagtagcattccagcattaattggtgctggtcaagtaacaaaagatggagctcttggcactgcaaatgcacctattcacatggtcacagcagaaacaggtcaatttaaggatcagctttggcgtaccttccgaagcattgcactaactttccttcttatctcgggcattggtgctctcatcgaagatagaggaatcagcaaaggccttggtctgaatgaggaggttcaaccaagcattgagtctaaaacaaaattcagtgatgtaaagggtgttgatgaagcaaaatctgaacttgaagaaatagttcattatcttcgagatcccatgcgcttcacatgtcttggtggaaaacttcctaaaggtgtcttgcttgtgggccctcctggcactgggaaaaccatgctagctagggctattgctggtgaagctggtgttcctttcttctcttgcagtggaagcgagtttgaggagatgtttgtgggagttggagctcggagagtgcgggacctttttgctgctgcaaagaagcgatctccttgcataatatttattgatgaaatagacgcaattggtgggagtcggaatcctaaggatcaacagtatatgaagatgaccttgaaccagctgctcgttgagttggatggctttaagcagaatgaggggataattgtcattgctgcaacgaactttcctgagtcgctagataaagccctagtcagacctgggcgttttgaccgtcatattgttgttcccaacccagatgttgaaggtcgacgccaaattctagaatcccatatgtcaaagatcttgaaaggtgatgatgtggacttaatgatcattgctagaggaacaccgggattctctggtgcagaccttgctaacttggtaaatgttgctgctcttaaggctgccatggatggtgcaaaagctgtcacaatggatgatcttgagtatgcaaaggaccgaatcatgatgggtagtgagcggaagtcggcagttatctctgacgaatgcaggaagctgacagcataccatgagggagggcatgcccttgttgcaatccacacagaaggagctcaccctgtccacaaggctaccatcgtacctagggggatggccctaggaatggtggcccaactccccgacaaagaccagacaagtgtgtcaaggaaacagatgctagcaaaactggatgtctgcatgggaggccgtgtggcagaagagcttatctttggggatactgaggtgacatccggtgcgtcgtcagatttccagcaagcgaccgcaatggcgagagcaatggttactaagtatggcatgagcaagcaggtcggccttgtctcttataactacgaggacgatggaaagagcatgagctcagaaacgagacttgcgatcgagcaggaggtgaagaacttcttggagaatgcatacagcaatgcgaagaccattcttacaaaacacaacaaagagctccatgctctagccaacgcacttcttgagcatgagaccctcacaggagcccagataaagaacatattagcccaggttcataacaaacagcaacatgagcatactatcgaagcaccacagaaggcctcagtcgcaccagcttcccccgcatcaccagctgcatcagctgctgcagcagcagcagccgccgccgcggcagcacagcaggcggcagccaaagctaagggggtggctggtatgggatcttagcacattagagcacccccactggtttgcattgtgtatatttcaccaaacaagcaaagctgttccagcaattaacgttcaacgagggtcctcggtagtatgctaaactgctgcagcaacagaacatactgattgtgtggaagctactgttcacgtgcctcgagtgcgaagcagaaacgaaaactttatgcattgtagtaggaggcacatttagctggtgattggatcagttttgtacccaaatcgaaaacaatttctgttgtttacaccccaagaattgttacatttcgatctgcctgccgccttcaccctaacagagcataaattgtaatacattctgaataagatgtcctgtgtgcttgaatacaatgtggcagctgccgaatcgattcgtcagccccttcgatgctcatttgttgtatgctatgttttgccaggctaaaacgatcctttgtt

SEQ ID NO: 32762 - DNA, 2256 bp, Zea Mays
caacattcagtgatgagaggagactgaaaactaacgtaataaataggtgttgcttcctcgacaaggggcgaagaaagctttagtagcattccagcattaattggtgctggtcaagtaacaaaagatggagctcttggcactgcaaatgcacctattcacatggtcacagcagaaacaggtcaatttaaggatcagctttggcgtaccttccgaagcattgcactaactttccttcttatctcgggcattggtgctctcatcgaagatagaggaatcagcaaaggccttggtctgaatgaggaggttcaaccaagcattgagtctaaaacaaaattcagtgatgtaaagggtgttgatgaagcaaaatctgaacttgaagaaatagttcattatcttcgagatcccatgcgcttcacatgtcttggtggaaaacttcctaaaggtgtcttgcttgtgggccctcctggcactgggaaaaccatgctagctagggctattgctggtgaagctggtgttcctttcttctcttgcagtggaagcgagtttgaggagatgtttgtgggagttggagctcggagagtgcgggacctttttgctgctgcaaagaagcgatctccttgcataatatttattgatgaaatagacgcaattggtgggagtcggaatcctaaggatcaacagtatatgaagatgaccttgaaccagctgctcgttgagttggatggctttaagcagaatgaggggataattgtcattgctgcaacgaactttcctgagtcgctagataaagccctagtcagacctgggcgttttgaccgtcatattgttgttcccaacccagatgttgaaggtcgacgccaaattctagaatcccatatgtcaaagatcttgaaaggtgatgatgtggacttaatgatcattgctagaggaacaccgggattctctggtgcagaccttgctaacttggtaaatgttgctgctcttaaggctgccatggatggtgcaaaagctgtcacaatggatgatcttgagtatgcaaaggaccgaatcatgatgggtagtgagcggaagtcggcagttatctctgacgaatgcaggaagctgacagcataccatgagggagggcatgcccttgttgcaatccacacagaaggagctcaccctgtccacaaggctaccatcgtacctagggggatggccctaggaatggtggcccaactccccgacaaagaccagacaagtgtgtcaaggaaacagatgctagcaaaactggatgtctgcatgggaggccgtgtggcagaagagcttatctttggggatactgaggtgacatccggtgcgtcgtcagatttccagcaagcgaccgcaatggcgagagcaatggttactaagtatggcatgagcaagcaggtcggccttgtctcttataactacgaggacgatggaaagagcatgagctcagaaacgagacttgcgatcgagcaggaggtgaagaacttcttggagaatgcatacagcaatgcgaagaccattcttacaaaacacaacaaagagctccatgctctagccaacgcacttcttgagcatgagaccctcacaggagcccagataaagaacatattagcccaggttcataacaaacagcaacatgagcatactatcgaagcaccacagaaggcctcagtcgcaccagcttcccccgcatcaccagctgcatcagctgctgcagcagcagcagccgccgccgcggcagcacagcaggcggcagccaaagctaagggggtggctggtatgggatcttagcacattagagcacccccactggtttgcattgtgtatatttcaccaaacaagcaaagctgttccagcaattaacgttcaacgagggtcctcggtagtatgctaaactgctgcagcaacagaacatactgattgtgtggaagctactgttcacgtgcctcgagtgcgaagcagaaacgaaaactttatgcattgtagtaggaggcacatttagctggtgattggatcagttttgtacccaaatcgaaaacaatttctgttgtttacaccccaagaattgttacatttcgatctgcctgccgccttcaccctaacagagcataaattgtaatacattctgaataagatgtcctgtgtgcttgaatacaatgtggcagctgccgaatcgattcgtcagccccttcgatgctcatttgttgtatgctatgttttgccaggctaaaacgatcctttgtt

SEQ ID NO: 32763 - DNA, 2282 bp, Zea Mays
atttggtgcatgtgttggacggatgactgaaacactaatctcttgagtaattggagagagatctctagttttgtgttgcttcctcgacaaggggcgaagaaagctttagtagcattccagcattaattggtgctggtcaagtaacaaaagatggagctcttggcactgcaaatgcacctattcacatggtcacagcagaaacaggtcaatttaaggatcagctttggcgtaccttccgaagcattgcactaactttccttcttatctcgggcattggtgctctcatcgaagatagaggaatcagcaaaggccttggtctgaatgaggaggttcaaccaagcattgagtctaaaacaaaattcagtgatgtaaagggtgttgatgaagcaaaatctgaacttgaagaaatagttcattatcttcgagatcccatgcgcttcacatgtcttggtggaaaacttcctaaaggtgtcttgcttgtgggccctcctggcactgggaaaaccatgctagctagggctattgctggtgaagctggtgttcctttcttctcttgcagtggaagcgagtttgaggagatgtttgtgggagttggagctcggagagtgcgggacctttttgctgctgcaaagaagcgatctccttgcataatatttattgatgaaatagacgcaattggtgggagtcggaatcctaaggatcaacagtatatgaagatgaccttgaaccagctgctcgttgagttggatggctttaagcagaatgaggggataattgtcattgctgcaacgaactttcctgagtcgctagataaagccctagtcagacctgggcgttttgaccgtcatattgttgttcccaacccagatgttgaaggtcgacgccaaattctagaatcccatatgtcaaagatcttgaaaggtgatgatgtggacttaatgatcattgctagaggaacaccgggattctctggtgcagaccttgctaacttggtaaatgttgctgctcttaaggctgccatggatggtgcaaaagctgtcacaatggatgatcttgagtatgcaaaggaccgaatcatgatgggtagtgagcggaagtcggcagttatctctgacgaatgcaggaagctgacagcataccatgagggagggcatgcccttgttgcaatccacacagaaggagctcaccctgtccacaaggctaccatcgtacctagggggatggccctaggaatggtggcccaactccccgacaaagaccagacaagtgtgtcaaggaaacagatgctagcaaaactggatgtctgcatgggaggccgtgtggcagaagagcttatctttggggatactgaggtgacatccggtgcgtcgtcagatttccagcaagcgaccgcaatggcgagagcaatggttactaagtatggcatgagcaagcaggtcggccttgtctcttataactacgaggacgatggaaagagcatgagctcagaaacgagacttgcgatcgagcaggaggtgaagaacttcttggagaatgcatacagcaatgcgaagaccattcttacaaaacacaacaaagagctccatgctctagccaacgcacttcttgagcatgagaccctcacaggagcccagataaagaacatattagcccaggttcataacaaacagcaacatgagcatactatcgaagcaccacagaaggcctcagtcgcaccagcttcccccgcatcaccagctgcatcagctgctgcagcagcagcagccgccgccgcggcagcacagcaggcggcagccaaagctaagggggtggctggtatgggatcttagcacattagagcacccccactggtttgcattgtgtatatttcaccaaacaagcaaagctgttccagcaattaacgttcaacgagggtcctcggtagtatgctaaactgctgcagcaacagaacatactgattgtgtggaagctactgttcacgtgcctcgagtgcgaagcagaaacgaaaactttatgcattgtagtaggaggcacatttagctggtgattggatcagttttgtacccaaatcgaaaacaatttctgttgtttacaccccaagaattgttacatttcgatctgcctgccgccttcaccctaacagagcataaattgtaatacattctgaataagatgtcctgtgtgcttgaatacaatgtggcagctgccgaatcgattcgtcagccccttcgatgctcatttgttgtatgctatgttttgccaggctaaaacgatcctttgtt

SEQ ID NO: 32764 - DNA, 1977 bp, Zea Mays
attttgtatatatatttctgtcatgagttattaagctcatctcatcttgacaacacatgatagtacctttctctatctctactccttttaaagcacgagtttcatgtgtcatgggcgaagcgctcgtagcgcttcacatgtcttggtggaaaacttcctaaaggtgtcttgcttgtgggccctcctggcactgggaaaaccatgctagctagggctattgctggtgaagctggtgttcctttcttctcttgcagtggaagcgagtttgaggagatgtttgtgggagttggagctcggagagtgcgggacctttttgctgctgcaaagaagcgatctccttgcataatatttattgatgaaatagacgcaattggtgggagtcggaatcctaaggatcaacagtatatgaagatgaccttgaaccagctgctcgttgagttggatggctttaagcagaatgaggggataattgtcattgctgcaacgaactttcctgagtcgctagataaagccctagtcagacctgggcgttttgaccgtcatattgttgttcccaacccagatgttgaaggtcgacgccaaattctagaatcccatatgtcaaagatcttgaaaggtgatgatgtggacttaatgatcattgctagaggaacaccgggattctctggtgcagaccttgctaacttggtaaatgttgctgctcttaaggctgccatggatggtgcaaaagctgtcacaatggatgatcttgagtatgcaaaggaccgaatcatgatgggtagtgagcggaagtcggcagttatctctgacgaatgcaggaagctgacagcataccatgagggagggcatgcccttgttgcaatccacacagaaggagctcaccctgtccacaaggctaccatcgtacctagggggatggccctaggaatggtggcccaactccccgacaaagaccagacaagtgtgtcaaggaaacagatgctagcaaaactggatgtctgcatgggaggccgtgtggcagaagagcttatctttggggatactgaggtgacatccggtgcgtcgtcagatttccagcaagcgaccgcaatggcgagagcaatggttactaagtatggcatgagcaagcaggtcggccttgtctcttataactacgaggacgatggaaagagcatgagctcagaaacgagacttgcgatcgagcaggaggtgaagaacttcttggagaatgcatacagcaatgcgaagaccattcttacaaaacacaacaaagagctccatgctctagccaacgcacttcttgagcatgagaccctcacaggagcccagataaagaacatattagcccaggttcataacaaacagcaacatgagcatactatcgaagcaccacagaaggcctcagtcgcaccagcttcccccgcatcaccagctgcatcagctgctgcagcagcagcagccgccgccgcggcagcacagcaggcggcagccaaagctaagggggtggctggtatgggatcttagcacattagagcacccccactggtttgcattgtgtatatttcaccaaacaagcaaagctgttccagcaattaacgttcaacgagggtcctcggtagtatgctaaactgctgcagcaacagaacatactgattgtgtggaagctactgttcacgtgcctcgagtgcgaagcagaaacgaaaactttatgcattgtagtaggaggcacatttagctggtgattggatcagttttgtacccaaatcgaaaacaatttctgttgtttacaccccaagaattgttacatttcgatctgcctgccgccttcaccctaacagagcataaattgtaatacattctgaataagatgtcctgtgtgcttgaatacaatgtggcagctgccgaatcgattcgtcagccccttcgatgctcatttgttgtatgctatgttttgccaggctaaaacgatcctttgtt

SEQ ID NO: 32765 - DNA, 3200 bp, Zea Mays
cacaggtttatactgtacggctgtacccataccgccatacggtcatgccccaaattcttatgcttttcgaaaattacaatcacccacccccaataaaagcgcccacaccctcctgcacctcccttcctcaacctccgccatcaccgacgctgactcccacaccggccgccgcgcgagccccggcaccatctccgcacgagcagaaatgggggatgcgtgtttctcaacacagctaattgatggagatggggtcttcaacgtctctggattggagaacttcatgaaggatgccagattgggtgaatgcgggctctcctatgctgttgtatcaataatgggcccgcaaagtagtgggaaaagtacacttttgaatcatctttttggcaccaattttagggagatggacgccttcagaggaaggtcacagactaccaaaggtatatggttagcgaaggcccagaatattgaaccgtgcacccttgtaatggatttggaaggaactgatggaagggagaggggagaggatgacacagcatttgagaagcaaagtgcattgtttgctttggccgtttcagacattgtgttgattaatatgtggtgtcatgacattggtagagaacaggctgcaaacaagcctcttttgaagactgttttccaggtcatgatgaggttgttcagtcctcgtaaaacaacattgttgtttgtcattcgtgacaaatcaaggacacccctagaaaatcttgaaccaattttaagggaagacattcagaagatatgggatgctgttccaaaaccccatgcccataaagaaactccacttagcgaatttttcgatgtacaagttgtggcactgtccagttatgaagaaaaagaagagttgttcaaacagcaggtttctgatttaagagataggtttcagtattctatcgctcctggtggacttgctggggatcgtcgtggtgtcgtcccagcttcaggattctcgtttagttcccagcaattttggaaagtcattaaggagaacaaagaccttgatctgcctgctcataaagttatggttgctactgtacgttgtgaggaaattggtaatgagaaagtcggcagttttacatctgatgaggaatggcaacaattagaggaggctgttcaacatgactttgttcctggatttgggaagaagatcagcagccttcttgatagatgtttatcagagtatgacatggaggctatttattttgatgaaggtgtcagaagctctaaacggcaacagcttgagtctaaactcctacagcttgtcaatcctgcctatcaatctcttctaggtcacttgcgtactagaactttagaagcatttaatgagtcctttgacaaggctctagaaaaggagggatttgctgcagccgctcgcaattgtactcaaactttcttggagaagtttgataaaggatctgaagatgctgctattcaacaagtgaattgggacacctcaaaagtgaaggataagcttagacgtgacattgaggctcatgtagcttcagttcgagctgctaaattatctgaactttgtgccaaatatgaggcacaacttaccaaagctctggcggaaccagttgaatctcttctagattcagccagtgaagatacgtggccagctattagaaagcttcttcaacgcgagacaaaaactgccgtttcaggtcttcaatctgctgtgtcagcttttgaacttgatgaagcaactgagaaagaactgcttgtgaagctggagaagcatggaaggagtgttgttgagtcaaaggcaaaagaagaagctggaagggttttgattcgcatgaaggacaggttttcaatgctgttcagccgagatgctgactctatgcccagggtgtggacaggaaaggaggacataaaagctataactaaaaccgctcgctcagcttccatgaagttgctttctacaatggctgcaattcggttggaggaggatggtgataacattgagaacactctttccgttgctcttgttgacacctcaaaacctgggactactgataggagtatccaattgaccgatccacttgcctccagttcatgggaaagggttggcgaggagaagactttaattacccctgtgcagtgcaaaaatttgtggaggcaattcaaggctgaaactgaatatacagtgactcaagccttagctgctcaggaagcaaataagaggaacaacaactggctaccacctccatgggcacttgctgcaatggctattcttggattcaacgagttcatgacattactgaggaacccgctttacctgtttgccatatttgtgatttatctcgttggaaaagccatttgggtgcaatcagaaatcggcagggaattccaacacggatttcttcctgccatcctttcactgtcgacgaagtttgtgcccactgtaatgaacatcctgaagagattagccgacgagggtcaagcacctgcagccgccccagagaggcagagagagatggagctccaaccaaaacccaccaggaacggttcttcatacaccaacgcgacgtcggcggggtcatccagcgtaaccacttcggagatcggacctgagtattcgagcccggtggcgcaatgatttagctgacctttagcctttggctggaagcccactctagcgcagttgagggaaacagggtgcctctcgagaacataggaacttaggaagattttaaggacagtcaggtgccttgcagttttttctaagcctgcccttcccccaaactgatgcaaggtggtgatggggtggcactgcccatcactattatttaaggatttttgggggctgggggggttgtttgtaagagcattgtagaatgatttcgtttaatttttttggtttctgtaacatgaatacatgatatgtgatggttgtatagaagatctggggggcgtagtagtgcccattctacacagcttatactgggcagggggttgcatagttgccagaagcttgtacatgtctttaaaccgccatcggattgcgatggagtagtattactggtgttctggaataacacggaggaacgtgttgtgacttggcaggccgttggtaactggctgttctcattcggtagttttgacgcgtgcctcgaaccgattcatatttgagccccatctggcgcagattggcagcgttttta

SEQ ID NO: 32766 - DNA, 3180 bp, Zea Mays
tacggctgtacccataccgccatacggtcatgccccaaattcttatgcttttcgaaaattacaatcacccacccccaataaaagcgcccacaccctcctgcacctcccttcctcaacctccgccatcaccgacgctgactcccacaccggccgccgcgcgagccccggcaccatctccgcacgaaatgggggatgcgtgtttctcaacacagctaattgatggagatggggtcttcaacgtctctggattggagaacttcatgaaggatgccagattgggtgaatgcgggctctcctatgctgttgtatcaataatgggcccgcaaagtagtgggaaaagtacacttttgaatcatctttttggcaccaattttagggagatggacgccttcagaggaaggtcacagactaccaaaggtatatggttagcgaaggcccagaatattgaaccgtgcacccttgtaatggatttggaaggaactgatggaagggagaggggagaggatgacacagcatttgagaagcaaagtgcattgtttgctttggccgtttcagacattgtgttgattaatatgtggtgtcatgacattggtagagaacaggctgcaaacaagcctcttttgaagactgttttccaggtcatgatgaggttgttcagtcctcgtaaaacaacattgttgtttgtcattcgtgacaaatcaaggacacccctagaaaatcttgaaccaattttaagggaagacattcagaagatatgggatgctgttccaaaaccccatgcccataaagaaactccacttagcgaatttttcgatgtacaagttgtggcactgtccagttatgaagaaaaagaagagttgttcaaacagcaggtttctgatttaagagataggtttcagtattctatcgctcctggtggacttgctggggatcgtcgtggtgtcgtcccagcttcaggattctcgtttagttcccagcaattttggaaagtcattaaggagaacaaagaccttgatctgcctgctcataaagttatggttgctactgtacgttgtgaggaaattggtaatgagaaagtcggcagttttacatctgatgaggaatggcaacaattagaggaggctgttcaacatgactttgttcctggatttgggaagaagatcagcagccttcttgatagatgtttatcagagtatgacatggaggctatttattttgatgaaggtgtcagaagctctaaacggcaacagcttgagtctaaactcctacagcttgtcaatcctgcctatcaatctcttctaggtcacttgcgtactagaactttagaagcatttaatgagtcctttgacaaggctctagaaaaggagggatttgctgcagccgctcgcaattgtactcaaactttcttggagaagtttgataaaggatctgaagatgctgctattcaacaagtgaattgggacacctcaaaagtgaaggataagcttagacgtgacattgaggctcatgtagcttcagttcgagctgctaaattatctgaactttgtgccaaatatgaggcacaacttaccaaagctctggcggaaccagttgaatctcttctagattcagccagtgaagatacgtggccagctattagaaagcttcttcaacgcgagacaaaaactgccgtttcaggtcttcaatctgctgtgtcagcttttgaacttgatgaagcaactgagaaagaactgcttgtgaagctggagaagcatggaaggagtgttgttgagtcaaaggcaaaagaagaagctggaagggttttgattcgcatgaaggacaggttttcaatgctgttcagccgagatgctgactctatgcccagggtgtggacaggaaaggaggacataaaagctataactaaaaccgctcgctcagcttccatgaagttgctttctacaatggctgcaattcggttggaggaggatggtgataacattgagaacactctttccgttgctcttgttgacacctcaaaacctgggactactgataggagtatccaattgaccgatccacttgcctccagttcatgggaaagggttggcgaggagaagactttaattacccctgtgcagtgcaaaaatttgtggaggcaattcaaggctgaaactgaatatacagtgactcaagccttagctgctcaggaagcaaataagaggaacaacaactggctaccacctccatgggcacttgctgcaatggctattcttggattcaacgagttcatgacattactgaggaacccgctttacctgtttgccatatttgtgatttatctcgttggaaaagccatttgggtgcaatcagaaatcggcagggaattccaacacggatttcttcctgccatcctttcactgtcgacgaagtttgtgcccactgtaatgaacatcctgaagagattagccgacgagggtcaagcacctgcagccgccccagagaggcagagagagatggagctccaaccaaaacccaccaggaacggttcttcatacaccaacgcgacgtcggcggggtcatccagcgtaaccacttcggagatcggacctgagtattcgagcccggtggcgcaatgatttagctgacctttagcctttggctggaagcccactctagcgcagttgagggaaacagggtgcctctcgagaacataggaacttaggaagattttaaggacagtcaggtgccttgcagttttttctaagcctgcccttcccccaaactgatgcaaggtggtgatggggtggcactgcccatcactattatttaaggatttttgggggctgggggggttgtttgtaagagcattgtagaatgatttcgtttaatttttttggtttctgtaacatgaatacatgatatgtgatggttgtatagaagatctggggggcgtagtagtgcccattctacacagcttatactgggcagggggttgcatagttgccagaagcttgtacatgtctttaaaccgccatcggattgcgatggagtagtattactggtgttctggaataacacggaggaacgtgttgtgacttggcaggccgttggtaactggctgttctcattcggtagttttgacgcgtgcctcgaaccgattcatatttgagccccatctggcgcagattggcagcgttttta

SEQ ID NO: 32767 - DNA, 1959 bp, Zea Mays
aaattcttatgcttttcgaaaattacaatcacccacccccaataaaagcgcccacaccctcctgcacctcccttcctcaacctccgccatcaccgacgctgactcccacaccggccgccgcgcgagccccggcaccatctccgcacgagcagaaatgggggatgcgtgtttctcaacacagctaattgatggagatggggtcttcaacgtctctggattggagaacttcatgaaggatgccagattgggtgaatgcgggctctcctatgctgttgtatcaataatgggcccgcaaagtagtgggaaaagtacacttttgaatcatctttttggcaccaattttagggagatggacgccttcagaggaaggtcacagactaccaaaggtatatggttagcgaaggcccagaatattgaaccgtgcacccttgtaatggatttggaaggaactgatggaagggagaggggagaggatgacacagcatttgagaagcaaagtgcattgtttgctttggccgtttcagacattgtgttgattaatatgtggtgtcatgacattggtagagaacaggctgcaaacaagcctcttttgaagactgttttccaggtcatgatgaggttgttcagtcctcgtaaaacaacattgttgtttgtcattcgtgacaaatcaaggacacccctagaaaatcttgaaccaattttaagggaagacattcagaagatatgggatgctgttccaaaaccccatgcccataaagaaactccacttagcgaatttttcgatgtacaagttgtggcactgtccagttatgaagaaaaagaagagttgttcaaacagcaggtttctgatttaagagataggtttcagtattctatcgctcctggtggacttgctggggatcgtcgtggtgtcgtcccagcttcaggattctcgtttagttcccagcaattttggaaagtcattaaggagaacaaagaccttgatctgcctgctcataaagttatggttgctactgtacgttgtgaggaaattggtaatgagaaagtcggcagttttacatctgatgaggaatggcaacaattagaggaggctgttcaacatgactttgttcctggatttgggaagaagatcagcagccttcttgatagatgtttatcagagtatgacatggaggctatttattttgatgaaggtgtcagaagctctaaacggcaacagcttgagtctaaactcctacagcttgtcaatcctgcctatcaatctcttctaggtcacttgcgtactagaactttagaagcatttaatgagtcctttgacaaggctctagaaaaggagggatttgctgcagccgctcgcaattgtactcaaactttcttggagaagtttgataaaggatctgaagatgctgctattcaacaagtgaattgggacacctcaaaagtgaaggataagcttagacgtgacattgaggctcatgtagcttcagttcgagctgctaaattatctgaactttgtgccaaatatgaggcacaacttaccaaagctctggcggaaccagttgaatctcttctagattcagccagtgaagatacgtggccagctattagaaagcttcttcaacgcgagacaaaaactgccgtttcaggtcttcaatctgctgtgtcagcttttgaacttgatgaagcaactgagaaagaactgcttgtgaagctggagaagcatggaaggagtgttgttgagtcaaaggcaaaagaagaagctggaagggttttgattcgcatgaaggacaggtgaactgtgctcgatgtctataactcacttatatttcttctgtacagactaaactgaaacaaatttacaggttttcaatgctgttcagccgagatgctgactctatgcccagggtgtggacaggaaaggaggacataaaagctataactaaaaccgctcgctcagag

SEQ ID NO: 32768 - DNA, 3188 bp, Zea Mays
cccacccccaataaaagcgcccacaccctcctgcacctcccttcctcaacctccgccatcaccgacgctgactcccacaccggccgccgcgcgagccccggcaccatctccgcacggcctccctcgacgtcgccggcgcgggggtggatctccgacctgaactttctctgattcctgattctattgagcagaaatgggggatgcgtgtttctcaacacagctaattgatggagatggggtcttcaacgtctctggattggagaacttcatgaaggatgccagattgggtgaatgcgggctctcctatgctgttgtatcaataatgggcccgcaaagtagtgggaaaagtacacttttgaatcatctttttggcaccaattttagggagatggacgccttcagaggaaggtcacagactaccaaaggtatatggttagcgaaggcccagaatattgaaccgtgcacccttgtaatggatttggaaggaactgatggaagggagaggggagaggatgacacagcatttgagaagcaaagtgcattgtttgctttggccgtttcagacattgtgttgattaatatgtggtgtcatgacattggtagagaacaggctgcaaacaagcctcttttgaagactgttttccaggtcatgatgaggttgttcagtcctcgtaaaacaacattgttgtttgtcattcgtgacaaatcaaggacacccctagaaaatcttgaaccaattttaagggaagacattcagaagatatgggatgctgttccaaaaccccatgcccataaagaaactccacttagcgaatttttcgatgtacaagttgtggcactgtccagttatgaagaaaaagaagagttgttcaaacagcaggtttctgatttaagagataggtttcagtattctatcgctcctggtggacttgctggggatcgtcgtggtgtcgtcccagcttcaggattctcgtttagttcccagcaattttggaaagtcattaaggagaacaaagaccttgatctgcctgctcataaagttatggttgctactgtacgttgtgaggaaattggtaatgagaaagtcggcagttttacatctgatgaggaatggcaacaattagaggaggctgttcaacatgactttgttcctggatttgggaagaagatcagcagccttcttgatagatgtttatcagagtatgacatggaggctatttattttgatgaaggtgtcagaagctctaaacggcaacagcttgagtctaaactcctacagcttgtcaatcctgcctatcaatctcttctaggtcacttgcgtactagaactttagaagcatttaatgagtcctttgacaaggctctagaaaaggagggatttgctgcagccgctcgcaattgtactcaaactttcttggagaagtttgataaaggatctgaagatgctgctattcaacaagtgaattgggacacctcaaaagtgaaggataagcttagacgtgacattgaggctcatgtagcttcagttcgagctgctaaattatctgaactttgtgccaaatatgaggcacaacttaccaaagctctggcggaaccagttgaatctcttctagattcagccagtgaagatacgtggccagctattagaaagcttcttcaacgcgagacaaaaactgccgtttcaggtcttcaatctgctgtgtcagcttttgaacttgatgaagcaactgagaaagaactgcttgtgaagctggagaagcatggaaggagtgttgttgagtcaaaggcaaaagaagaagctggaagggttttgattcgcatgaaggacaggttttcaatgctgttcagccgagatgctgactctatgcccagggtgtggacaggaaaggaggacataaaagctataactaaaaccgctcgctcagcttccatgaagttgctttctacaatggctgcaattcggttggaggaggatggtgataacattgagaacactctttccgttgctcttgttgacacctcaaaacctgggactactgataggagtatccaattgaccgatccacttgcctccagttcatgggaaagggttggcgaggagaagactttaattacccctgtgcagtgcaaaaatttgtggaggcaattcaaggctgaaactgaatatacagtgactcaagccttagctgctcaggaagcaaataagaggaacaacaactggctaccacctccatgggcacttgctgcaatggctattcttggattcaacgagttcatgacattactgaggaacccgctttacctgtttgccatatttgtgatttatctcgttggaaaagccatttgggtgcaatcagaaatcggcagggaattccaacacggatttcttcctgccatcctttcactgtcgacgaagtttgtgcccactgtaatgaacatcctgaagagattagccgacgagggtcaagcacctgcagccgccccagagaggcagagagagatggagctccaaccaaaacccaccaggaacggttcttcatacaccaacgcgacgtcggcggggtcatccagcgtaaccacttcggagatcggacctgagtattcgagcccggtggcgcaatgatttagctgacctttagcctttggctggaagcccactctagcgcagttgagggaaacagggtgcctctcgagaacataggaacttaggaagattttaaggacagtcaggtgccttgcagttttttctaagcctgcccttcccccaaactgatgcaaggtggtgatggggtggcactgcccatcactattatttaaggatttttgggggctgggggggttgtttgtaagagcattgtagaatgatttcgtttaatttttttggtttctgtaacatgaatacatgatatgtgatggttgtatagaagatctggggggcgtagtagtgcccattctacacagcttatactgggcagggggttgcatagttgccagaagcttgtacatgtctttaaaccgccatcggattgcgatggagtagtattactggtgttctggaataacacggaggaacgtgttgtgacttggcaggccgttggtaactggctgttctcattcggtagttttgacgcgtgcctcgaaccgattcatatttgagccccatctggcgcagattggcagcgttttta

SEQ ID NO: 32769 - DNA, 3082 bp, Zea Mays
aaagcgcccacaccctcctgcacctcccttcctcaacctccgccatcaccgacgctgactcccacaccggccgccgcgcgagccccggcaccatctccgcacgaaatgggggatgcgtgtttctcaacacagctaattgatggagatggggtcttcaacgtctctggattggagaacttcatgaaggatgccagattgggtgaatgcgggctctcctatgctgttgtatcaataatgggcccgcaaagtagtgggaaaagtacacttttgaatcatctttttggcaccaattttagggagatggacgccttcagaggaaggtcacagactaccaaaggtatatggttagcgaaggcccagaatattgaaccgtgcacccttgtaatggatttggaaggaactgatggaagggagaggggagaggatgacacagcatttgagaagcaaagtgcattgtttgctttggccgtttcagacattgtgttgattaatatgtggtgtcatgacattggtagagaacaggctgcaaacaagcctcttttgaagactgttttccaggtcatgatgaggttgttcagtcctcgtaaaacaacattgttgtttgtcattcgtgacaaatcaaggacacccctagaaaatcttgaaccaattttaagggaagacattcagaagatatgggatgctgttccaaaaccccatgcccataaagaaactccacttagcgaatttttcgatgtacaagttgtggcactgtccagttatgaagaaaaagaagagttgttcaaacagcaggtttctgatttaagagataggtttcagtattctatcgctcctggtggacttgctggggatcgtcgtggtgtcgtcccagcttcaggattctcgtttagttcccagcaattttggaaagtcattaaggagaacaaagaccttgatctgcctgctcataaagttatggttgctactgtacgttgtgaggaaattggtaatgagaaagtcggcagttttacatctgatgaggaatggcaacaattagaggaggctgttcaacatgactttgttcctggatttgggaagaagatcagcagccttcttgatagatgtttatcagagtatgacatggaggctatttattttgatgaaggtgtcagaagctctaaacggcaacagcttgagtctaaactcctacagcttgtcaatcctgcctatcaatctcttctaggtcacttgcgtactagaactttagaagcatttaatgagtcctttgacaaggctctagaaaaggagggatttgctgcagccgctcgcaattgtactcaaactttcttggagaagtttgataaaggatctgaagatgctgctattcaacaagtgaattgggacacctcaaaagtgaaggataagcttagacgtgacattgaggctcatgtagcttcagttcgagctgctaaattatctgaactttgtgccaaatatgaggcacaacttaccaaagctctggcggaaccagttgaatctcttctagattcagccagtgaagatacgtggccagctattagaaagcttcttcaacgcgagacaaaaactgccgtttcaggtcttcaatctgctgtgtcagcttttgaacttgatgaagcaactgagaaagaactgcttgtgaagctggagaagcatggaaggagtgttgttgagtcaaaggcaaaagaagaagctggaagggttttgattcgcatgaaggacagccgagatgctgactctatgcccagggtgtggacaggaaaggaggacataaaagctataactaaaaccgctcgctcagcttccatgaagttgctttctacaatggctgcaattcggttggaggaggatggtgataacattgagaacactctttccgttgctcttgttgacacctcaaaacctgggactactgataggagtatccaattgaccgatccacttgcctccagttcatgggaaagggttggcgaggagaagactttaattacccctgtgcagtgcaaaaatttgtggaggcaattcaaggctgaaactgaatatacagtgactcaagccttagctgctcaggaagcaaataagaggaacaacaactggctaccacctccatgggcacttgctgcaatggctattcttggattcaacgagttcatgacattactgaggaacccgctttacctgtttgccatatttgtgatttatctcgttggaaaagccatttgggtgcaatcagaaatcggcagggaattccaacacggatttcttcctgccatcctttcactgtcgacgaagtttgtgcccactgtaatgaacatcctgaagagattagccgacgagggtcaagcacctgcagccgccccagagaggcagagagagatggagctccaaccaaaacccaccaggaacggttcttcatacaccaacgcgacgtcggcggggtcatccagcgtaaccacttcggagatcggacctgagtattcgagcccggtggcgcaatgatttagctgacctttagcctttggctggaagcccactctagcgcagttgagggaaacagggtgcctctcgagaacataggaacttaggaagattttaaggacagtcaggtgccttgcagttttttctaagcctgcccttcccccaaactgatgcaaggtggtgatggggtggcactgcccatcactattatttaaggatttttgggggctgggggggttgtttgtaagagcattgtagaatgatttcgtttaatttttttggtttctgtaacatgaatacatgatatgtgatggttgtatagaagatctggggggcgtagtagtgcccattctacacagcttatactgggcagggggttgcatagttgccagaagcttgtacatgtctttaaaccgccatcggattgcgatggagtagtattactggtgttctggaataacacggaggaacgtgttgtgacttggcaggccgttggtaactggctgttctcattcggtagttttgacgcgtgcctcgaaccgattcatatttgagccccatctggcgcagattggcagcgttttta

SEQ ID NO: 32770 - DNA, 2875 bp, Zea Mays
ccgacgctgactcccacaccggccgccgcgcgagccccggcaccatctccgcacgaaatgggggatgcgtgtttctcaacacagctaattgatggagatggggtcttcaacgtctctggattggagaacttcatgaaggatgccagattgggtgaatgcgggctctcctatgctgttgtatcaataatgggcccgcaaagtagtgggaaaagtacacttttgaatcatctttttggcaccaattttagggagatggacgccttcagaggaaggtcacagactaccaaaggtatatggttagcgaaggcccagaatattgaaccgtgcacccttgtaatggatttggaaggaactgatggaagggagaggggagaggatgacacagcatttgagaagcaaagtgcattgtttgctttggccgtttcagacattgtgttgattaatatgtggtgtcatgacattggtagagaacaggctgcaaacaagcctcttttgaagactgttttccaggtacaagttgtggcactgtccagttatgaagaaaaagaagagttgttcaaacagcaggtttctgatttaagagataggtttcagtattctatcgctcctggtggacttgctggggatcgtcgtggtgtcgtcccagcttcaggattctcgtttagttcccagcaattttggaaagtcattaaggagaacaaagaccttgatctgcctgctcataaagttatggttgctactgtacgttgtgaggaaattggtaatgagaaagtcggcagttttacatctgatgaggaatggcaacaattagaggaggctgttcaacatgactttgttcctggatttgggaagaagatcagcagccttcttgatagatgtttatcagagtatgacatggaggctatttattttgatgaaggtgtcagaagctctaaacggcaacagcttgagtctaaactcctacagcttgtcaatcctgcctatcaatctcttctaggtcacttgcgtactagaactttagaagcatttaatgagtcctttgacaaggctctagaaaaggagggatttgctgcagccgctcgcaattgtactcaaactttcttggagaagtttgataaaggatctgaagatgctgctattcaacaagtgaattgggacacctcaaaagtgaaggataagcttagacgtgacattgaggctcatgtagcttcagttcgagctgctaaattatctgaactttgtgccaaatatgaggcacaacttaccaaagctctggcggaaccagttgaatctcttctagattcagccagtgaagatacgtggccagctattagaaagcttcttcaacgcgagacaaaaactgccgtttcaggtcttcaatctgctgtgtcagcttttgaacttgatgaagcaactgagaaagaactgcttgtgaagctggagaagcatggaaggagtgttgttgagtcaaaggcaaaagaagaagctggaagggttttgattcgcatgaaggacaggttttcaatgctgttcagccgagatgctgactctatgcccagggtgtggacaggaaaggaggacataaaagctataactaaaaccgctcgctcagcttccatgaagttgctttctacaatggctgcaattcggttggaggaggatggtgataacattgagaacactctttccgttgctcttgttgacacctcaaaacctgggactactgataggagtatccaattgaccgatccacttgcctccagttcatgggaaagggttggcgaggagaagactttaattacccctgtgcagtgcaaaaatttgtggaggcaattcaaggctgaaactgaatatacagtgactcaagccttagctgctcaggaagcaaataagaggaacaacaactggctaccacctccatgggcacttgctgcaatggctattcttggattcaacgagttcatgacattactgaggaacccgctttacctgtttgccatatttgtgatttatctcgttggaaaagccatttgggtgcaatcagaaatcggcagggaattccaacacggatttcttcctgccatcctttcactgtcgacgaagtttgtgcccactgtaatgaacatcctgaagagattagccgacgagggtcaagcacctgcagccgccccagagaggcagagagagatggagctccaaccaaaacccaccaggaacggttcttcatacaccaacgcgacgtcggcggggtcatccagcgtaaccacttcggagatcggacctgagtattcgagcccggtggcgcaatgatttagctgacctttagcctttggctggaagcccactctagcgcagttgagggaaacagggtgcctctcgagaacataggaacttaggaagattttaaggacagtcaggtgccttgcagttttttctaagcctgcccttcccccaaactgatgcaaggtggtgatggggtggcactgcccatcactattatttaaggatttttgggggctgggggggttgtttgtaagagcattgtagaatgatttcgtttaatttttttggtttctgtaacatgaatacatgatatgtgatggttgtatagaagatctggggggcgtagtagtgcccattctacacagcttatactgggcagggggttgcatagttgccagaagcttgtacatgtctttaaaccgccatcggattgcgatggagtagtattactggtgttctggaataacacggaggaacgtgttgtgacttggcaggccgttggtaactggctgttctcattcggtagttttgacgcgtgcctcgaaccgattcatatttgagccccatctggcgcagattggcagcgttttta

SEQ ID NO: 32771 - DNA, 1765 bp, Zea Mays
tgacgttttgctctccatcagcccaacagctaccgactgggctattatttctccccgcgtgctctctctcgccgactaggctattgccgccgccgccctacaccagatgcccagttcttcgtcagccccttctccggcaacgagcacctaacagaggctgcagtatattctgtgagaatggcatggggtcaaggtgctaagaggtccatactagggcttctctttcgttctcagcaccaaactgctcgggcatactcttcttcagcattccagactcaccaattgagcactcatgttccccaagatggagtgtttattaggagattcggctctgaggtgtcttcttcagagcaaatgaaccttattaagcaactcagacaaagaacgagtgctccaatcaaagatgtcaaggcctctctagttacctgcaactgggatattgaggctgcacagaaggacctaaggaagagaggtgttgctcttgctgccaaaaagtcttcacgcactgctgctgaaggtttgctagctatcgcacaagatgacaaaagggctgctgtagttgagcttaactgtgaaactgatttcgtagcaagaaatgatgttttccagtacctggcttcatcattggcaaagatggctttatctgctcagggtcctggtgaattgttcatgccttttggtcctgagcttttagagaacatgcctatcaatctagatcaccctaagctcagtgtggaaacaactgtccaaagtgccgttacagaagttgctgcaatggttggggagaatgtgaaactcagaagaggcttcatgctttccacaactgcacatggtgttgtttcatcttatatgcatacctgccctcagccaggtatgggtcgtatagctggattggtcacactagaaacagaagacagcagtactcttcttgattctgtcaaaagtgttgggtcatctattgcgatgcatattgttgcggcaaagccattattcttatcaaaagaactggtttctgcttcggctttagaaaatgagcgtgaaatacttcgaactcaggcccaaagttcagggaaatcccaaatggctatggataagatggtggaaggacgattgaggaagtactttgaggaagttgtgctcatggagcaaaaatatgttttaaatgacagcactaacattaagaccgtgctgaatgacttgtcgaaagaggttggttctaaggtaacaatcggtaacttcatcagaatggaggttggcgaagggattgagagaactgaagccgctgatggtttagaggttgctggtggcgctatgtagattccaggcagagatggttcgaacgagatcattaggatctatatgaaggtgtgggctaggacggagataatgtttaggcaggcactagcgttctgggacctgcgaggctgcctagttgatttgtcagttcctagcttgtttggttacagttttggttgaaccctctctgattgaattacagttcgtgtggacgtataaaaaatcgaaatagagtgggaattgccccttgaactttttgcactgagtctggagtgaattagtgttagtgcaaagtagttgttttagctgtcatttttgtattaattaaactttgctagaatgacttgtgagtttgtaggataccttttgcaggctattcacccatcttttgccatctaggtactatcgccatgctaagggtatttggtttctagggactaatatttaatttctttattttattttattt

SEQ ID NO: 32772 - DNA, 1232 bp, Zea Mays
aacagctaccgactgggctattatttctccccgcgtgctctctctcgccgactaggctattgccgccgccgccctacaccagatgcccagttcttcgtcagccccttctccggcaacgagcacctaacaggctgaaaaaaaatcattgatacacgtacgccgtcagaggctgcagtatattctgtgagaatggcatggggtcaaggtgctaagaggtccatactagggcttctctttcgttctcagcaccaaactgctcgggcatactcttcttcagcattccagactcaccaattgagcactcatgttccccaagatggagtgtttattaggagattcggctctgaggtgtcttcttcagagcaaatgaaccttattaagcaactcagacaaagaacgagtgctccaatcaaagatgtcaaggcctctctagttacctgcaactgggatattgaggctgcacagaaggacctaaggaagagaggtgttgctcttgctgccaaaaagtcttcacgcactgctgctgaaggtttgctagctatcgcacaagatgacaaaagggctgctgtagttgagcttaactgtgaaactgatttcgtagcaagaaatgatgttttccagtacctggcttcatcattggcaaagatggctttatctgctcagggtcctggtgaattgttcatgccttttggtcctgagcttttagagaacatgcctatcaatctagatcaccctaagctcagtgtggaaacaactgtccaaagtgccgttacagaagttgctgcaatggttggggagaatgtgaaactcagaagaggcttcatgctttccacaactgcacatggtgttgtttcatcttatatgcatacctgccctcagccaggtgatggaatctcagttgtctgtgtttcttttcaagaatgtatattctttactcttcagattttattacccccctccccccaaggctaagttagattaaccattaccaatactcagcagtcttctactgaccagggagcatgcttacatgcttctcaccttttctaaccacttcactattctaaagctttttgacaactagaaaccacagttcgtttgtgtgtattcacgctaattctagtaactaatctattttcttagatttgttactgatgaaataatttattatcctgttttactggtatacggatgttttttaaaaattttgatgatagtgcggccatggatgt

SEQ ID NO: 32773 - DNA, 2406 bp, Zea Mays
aacagctaccgactgggctattatttctccccgcgtgctctctctcgccgactaggctattgccgccgccgccctacaccagatgcccagttcttcgtcagccccttctccggcaacgagcacctaacagaggctgcagtatattctgtgagaatggcatggggtcaaggtgctaagaggtccatactagggcttctctttcgttctcagcaccaaactgctcgggcatactcttcttcagcattccagactcaccaattgagcactcatgttccccaagatggagtgtttattaggagattcggctctgaggtgtcttcttcagagcaaatgaaccttattaagcaactcagacaaagaacgagtgctccaatcaaagatgtcaaggcctctctagttacctgcaactgggatattgaggctgcacagaaggacctaaggaagagaggtgttgctcttgctgccaaaaagtcttcacgcactgctgctgaaggtttgctagctatcgcacaagatgacaaaagggctgctgtagttgagcttaactgtgaaactgatttcgtagcaagaaatgatgttttccagtacctggcttcatcattggcaaagatggctttatctgctcagggtcctggtgaattgttcatgccttttggtcctgagcttttagagaacatgcctatcaatctagatcaccctaagctcagtgtggaaacaactgtccaaagtgccgttacagaagttgctgcaatggttggggagaatgtgaaactcagaagaggcttcatgctttccacaactgcacatggtgttgtttcatcttatatgcatacctgccctcagccaggtgatggaatctcagttgtctgtgtttcttttcaagaatgtatattctttactcttcagattttattacccccctccccccaaggctaagttagattaaccattaccaatactcagcagtcttctactgaccagggagcatgcttacatgcttctcaccttttctaaccacttcactattctaaagctttttgacaactagaaaccacagttcgtttgtgtgtattcacgctaattctagtaactaatctattttcttagatttgttactgatgaaataatttattatcctgttttactggtatacggatgttttttaaaaattttgatgatagtgcggccatggatgtacactcatgataaattagaatttgaacacaactattatcttgaatataccactaacactacgatcttttagagaggaaagtgaaatttcatctgcgtaggataatatgcttatttgggtactcttgaagtacaataattgaatatgttagtttggtactaattgttatttgttctgctgagctgacttgtgttagtaatttgagaaatctcctagtttgcagcctccttttggttgtttttgatactttgctaaaataaggggccctttttcttcgatctttttccaacaggaatgatgcatttgctcattctataattcgcttaactcctgattattttagcttcaggtatgggtcgtatagctggattggtcacactagaaacagaagacagcagtactcttcttgattctgtcaaaagtgttgggtcatctattgcgatgcatattgttgcggcaaagccattattcttatcaaaagaactggtttctgcttcggctttagaaaatgagcgtgaaatacttcgaactcaggcccaaagttcagggaaatcccaaatggctatggataagatggtggaaggacgattgaggaagtactttgaggaagttgtgctcatggagcaaaaatatgttttaaatgacagcactaacattaagaccgtgctgaatgacttgtcgaaagaggttggttctaaggtaacaatcggtaacttcatcagaatggaggttggcgaagggattgagagaactgaagccgctgatggtttagaggttgctggtggcgctatgtagattccaggcagagatggtgtgggctaggacggagataatgtttaggcaggcactagcgttctgggacctgcgaggctgcctagttgatttgtcagttcctagcttgtttggttacagttttggttgaaccctctctgattgaattacagttcgtgtggacgtataaaaaatcgaaatagagtgggaattgccccttgaactttttgcactgagtctggagtgaattagtgttagtgcaaagtagttgttttagctgtcatttttgtattaattaaactttgctagaatgacttgtgagtttgtaggataccttttgcaggctattcacccatcttttgccatctaggtactatcgccatgctaagggtatttggtttctagggactaatatttaatttctttattttattttattt

SEQ ID NO: 32774 - DNA, 1783 bp, Zea Mays
aacagctaccgactgggctattatttctccccgcgtgctctctctcgccgactaggctattgccgccgccgccctacaccagatgcccagttcttcgtcagccccttctccggcaacgagcacctaacaggctgaaaaaaaatcattgatacacgtacgccgtcagaggctgcagtatattctgtgagaatggcatggggtcaaggtgctaagaggtccatactagggcttctctttcgttctcagcaccaaactgctcgggcatactcttcttcagcattccagactcaccaattgagcactcatgttccccaagatggagtgtttattaggagattcggctctgaggtgtcttcttcagagcaaatgaaccttattaagcaactcagacaaagaacgagtgctccaatcaaagatgtcaaggcctctctagttacctgcaactgggatattgaggctgcacagaaggacctaaggaagagaggtgttgctcttgctgccaaaaagtcttcacgcactgctgctgaaggtttgctagctatcgcacaagatgacaaaagggctgctgtagttgagcttaactgtgaaactgatttcgtagcaagaaatgatgttttccagtacctggcttcatcattggcaaagatggctttatctgctcagggtcctggtgaattgttcatgccttttggtcctgagcttttagagaacatgcctatcaatctagatcaccctaagctcagtgtggaaacaactgtccaaagtgccgttacagaagttgctgcaatggttggggagaatgtgaaactcagaagaggcttcatgctttccacaactgcacatggtgttgtttcatcttatatgcatacctgccctcagccagcttcaggtatgggtcgtatagctggattggtcacactagaaacagaagacagcagtactcttcttgattctgtcaaaagtgttgggtcatctattgcgatgcatattgttgcggcaaagccattattcttatcaaaagaactggtttctgcttcggctttagaaaatgagcgtgaaatacttcgaactcaggcccaaagttcagggaaatcccaaatggctatggataagatggtggaaggacgattgaggaagtactttgaggaagttgtgctcatggagcaaaaatatgttttaaatgacagcactaacattaagaccgtgctgaatgacttgtcgaaagaggttggttctaaggtaacaatcggtaacttcatcagaatggaggttggcgaagggattgagagaactgaagccgctgatggtttagaggttgctggtggcgctatgtagattccaggcagagatggttcgaacgagatcattaggatctatatgaaggtgtgggctaggacggagataatgtttaggcaggcactagcgttctgggacctgcgaggctgcctagttgatttgtcagttcctagcttgtttggttacagttttggttgaaccctctctgattgaattacagttcgtgtggacgtataaaaaatcgaaatagagtgggaattgccccttgaactttttgcactgagtctggagtgaattagtgttagtgcaaagtagttgttttagctgtcatttttgtattaattaaactttgctagaatgacttgtgagtttgtaggataccttttgcaggctattcacccatcttttgccatctaggtactatcgccatgctaagggtatttggtttctagggactaatatttaatttctttattttattttattt

SEQ ID NO: 32775 - DNA, 1738 bp, Zea Mays
aacagctaccgactgggctattatttctccccgcgtgctctctctcgccgactaggctattgccgccgccgccctacaccagatgcccagttcttcgtcagccccttctccggcaacgagcacctaacagtatattctgtgagaatggcatggggtcaaggtgctaagaggtccatactagggcttctctttcgttctcagcaccaaactgctcgggcatactcttcttcagcattccagactcaccaattgagcactcatgttccccaagatggagtgtttattaggagattcggctctgaggtgtcttcttcagagcaaatgaaccttattaagcaactcagacaaagaacgagtgctccaatcaaagatgtcaaggcctctctagttacctgcaactgggatattgaggctgcacagaaggacctaaggaagagaggtgttgctcttgctgccaaaaagtcttcacgcactgctgctgaaggtttgctagctatcgcacaagatgacaaaagggctgctgtagttgagcttaactgtgaaactgatttcgtagcaagaaatgatgttttccagtacctggcttcatcattggcaaagatggctttatctgctcagggtcctggtgaattgttcatgccttttggtcctgagcttttagagaacatgcctatcaatctagatcaccctaagctcagtgtggaaacaactgtccaaagtgccgttacagaagttgctgcaatggttggggagaatgtgaaactcagaagaggcttcatgctttccacaactgcacatggtgttgtttcatcttatatgcatacctgccctcagccagcttcaggtatgggtcgtatagctggattggtcacactagaaacagaagacagcagtactcttcttgattctgtcaaaagtgttgggtcatctattgcgatgcatattgttgcggcaaagccattattcttatcaaaagaactggtttctgcttcggctttagaaaatgagcgtgaaatacttcgaactcaggcccaaagttcagggaaatcccaaatggctatggataagatggtggaaggacgattgaggaagtactttgaggaagttgtgctcatggagcaaaaatatgttttaaatgacagcactaacattaagaccgtgctgaatgacttgtcgaaagaggttggttctaaggtaacaatcggtaacttcatcagaatggaggttggcgaagggattgagagaactgaagccgctgatggtttagaggttgctggtggcgctatgtagattccaggcagagatggttcgaacgagatcattaggatctatatgaaggtgtgggctaggacggagataatgtttaggcaggcactagcgttctgggacctgcgaggctgcctagttgatttgtcagttcctagcttgtttggttacagttttggttgaaccctctctgattgaattacagttcgtgtggacgtataaaaaatcgaaatagagtgggaattgccccttgaactttttgcactgagtctggagtgaattagtgttagtgcaaagtagttgttttagctgtcatttttgtattaattaaactttgctagaatgacttgtgagtttgtaggataccttttgcaggctattcacccatcttttgccatctaggtactatcgccatgctaagggtatttggtttctagggactaatatttaatttctttattttattttattt

SEQ ID NO: 32776 - DNA, 1715 bp, Zea Mays
aacagctaccgactgggctattatttctccccgcgtgctctctctcgccgactaggctattgccgccgccgccctacaccagatgcccagttcttcgtcagccccttctccggcaacgagcacctaacagaggctgcagtatattctgtgagaatggcatggggtcaaggtgctaagaggtccatactagggcttctctttcgttctcagcaccaaactgctcgggcatactcttcttcagcattccagactcaccaattgagcactcatgttccccaagatggagtgtttattaggagattcggctctgaggtgtcttcttcagagcaaatgaaccttattaagcaactcagacaaagaacgagtgctccaatcaaagatgtcaaggcctctctagttacctgcaactgggatattgaggctgcacagaaggacctaaggaagagaggtgttgctcttgctgccaaaaagtcttcacgcactgctgctgaaggtttgctagctatcgcacaagatgacaaaagggctgctgtagttgagcttaactgtgaaactgatttcgtagcaagaaatgatgttttccagtacctggcttcatcattggcaaagatggctttatctgctcagggtcctggtgaattgttcatgccttttggtcctgagcttttagagaacatgcctatcaatctagatcaccctaagctcagtgtggaaacaactgtccaaagtgccgttacagaagttgctgcaatggttggggagaatgtgaaactcagaagaggcttcatgctttccacaactgcacatggtgttgtttcatcttatatgcatacctgccctcagccagcttcaggtatgggtcgtatagctggattggtcacactagaaacagaagacagcagtactcttcttgattctgtcaaaagtgttgggtcatctattgcgatgcatattgttgcggcaaagccattattcttatcaaaagaactggtttctgcttcggctttagaaaatgagcgtgaaatacttcgaactcaggcccaaagttcagggaaatcccaaatggctatggataagatggtggaaggacgattgaggaagtactttgaggaagttgtgctcatggagcaaaaatatgttttaaatgacagcactaacattaagaccgtgctgaatgacttgtcgaaagaggttggttctaaggtaacaatcggtaacttcatcagaatggaggttggcgaagggattgagagaactgaagccgctgatggtttagaggttgctggtggcgctatgtagattccaggcagagatggtgtgggctaggacggagataatgtttaggcaggcactagcgttctgggacctgcgaggctgcctagttgatttgtcagttcctagcttgtttggttacagttttggttgaaccctctctgattgaattacagttcgtgtggacgtataaaaaatcgaaatagagtgggaattgccccttgaactttttgcactgagtctggagtgaattagtgttagtgcaaagtagttgttttagctgtcatttttgtattaattaaactttgctagaatgacttgtgagtttgtaggataccttttgcaggctattcacccatcttttgccatctaggtactatcgccatgctaagggtatttggtttctagggactaatatttaatttctttattttattttattt

SEQ ID NO: 32777 - DNA, 1547 bp, Zea Mays
aacagctaccgactgggctattatttctccccgcgtgctctctctcgccgactaggctattgccgccgccgccctacaccagatgcccagttcttcgtcagccccttctccggcaacgagcacctaacagtatattctgtgagaatggcatggggtcaaggtgctaagaggtccatactagggcttctctttcgttctcagcaccaaactgctcgggcatactcttcttcagcattccagactcaccaattgagcactcatgttccccaagatggagtgtttattaggagattcggctctgaggtgtcttcttcagagcaaatgaaccttattaagcaactcagacaaagaacgagtgctccaatcaaagatgtcaaggcctctctagttacctgcaactgggatattgaggctgcacagaaggacctaaggaagagaggtgttgctcttgctgccaaaaagtcttcacgcactgctgctgaaggtttgctagctatcgcacaagatgacaaaagggctgctgtagttgagcttaactgtgaaactgatttcgtagcaagaaatgatgttttccagtacctggcttcatcattggcaaagatggctttatctgctcagggtcctggtgaattgttcatgccttttggtcctgagcttttagagaacatgcctatcaatctagatcaccctaagctcagtgtggaaacaactgtccaaagtgccgttacagaagttgctgcaatggttggggagaatgtgaaactcagaagaggcttcatgctttccacaactgcacatggtgttgtttcatcttatatgcatacctgccctcagccaggcccaaagttcagggaaatcccaaatggctatggataagatggtggaaggacgattgaggaagtactttgaggaagttgtgctcatggagcaaaaatatgttttaaatgacagcactaacattaagaccgtgctgaatgacttgtcgaaagaggttggttctaaggtaacaatcggtaacttcatcagaatggaggttggcgaagggattgagagaactgaagccgctgatggtttagaggttgctggtggcgctatgtagattccaggcagagatggttcgaacgagatcattaggatctatatgaaggtgtgggctaggacggagataatgtttaggcaggcactagcgttctgggacctgcgaggctgcctagttgatttgtcagttcctagcttgtttggttacagttttggttgaaccctctctgattgaattacagttcgtgtggacgtataaaaaatcgaaatagagtgggaattgccccttgaactttttgcactgagtctggagtgaattagtgttagtgcaaagtagttgttttagctgtcatttttgtattaattaaactttgctagaatgacttgtgagtttgtaggataccttttgcaggctattcacccatcttttgccatctaggtactatcgccatgctaagggtatttggtttctagggactaatatttaatttctttattttattttattt

SEQ ID NO: 32778 - DNA, 1515 bp, Zea Mays
aacagctaccgactgggctattatttctccccgcgtgctctctctcgccgactaggctattgccgccgccgccctacaccagatgcccagttcttcgtcagccccttctccggcaacgagcacctaacagtatattctgtgagaatggcatggggtcaaggtgctaagaggtccatactagggcttctctttcgttctcagcaccaaactgctcgggcatactcttcttcagcattccagactcaccaattgagcactcatgttccccaagatggagtgtttattaggagattcggctctgaggtgtcttcttcagagcaaatgaaccttattaagcaactcagacaaagaacgagtgctccaatcaaagatgtcaaggcctctctagttacctgcaactgggatattgaggctgcacagaaggacctaaggaagagaggtgttgctcttgctgccaaaaagtcttcacgcactgctgctgaaggtttgctagctatcgcacaagatgacaaaagggctgctgtagttgagcttaactgtgaaactgatttcgtagcaagaaatgatgttttccagtacctggcttcatcattggcaaagatggctttatctgctcagggtcctggtgaattgttcatgccttttggtcctgagcttttagagaacatgcctatcaatctagatcaccctaagctcagtgtggaaacaactgtccaaagtgccgttacagaagttgctgcaatggttggggagaatgtgaaactcagaagaggcttcatgctttccacaactgcacatggtgttgtttcatcttatatgcatacctgccctcagccaggcccaaagttcagggaaatcccaaatggctatggataagatggtggaaggacgattgaggaagtactttgaggaagttgtgctcatggagcaaaaatatgttttaaatgacagcactaacattaagaccgtgctgaatgacttgtcgaaagaggttggttctaaggtaacaatcggtaacttcatcagaatggaggttggcgaagggattgagagaactgaagccgctgatggtttagaggttgctggtggcgctatgtagattccaggcagagatggtgtgggctaggacggagataatgtttaggcaggcactagcgttctgggacctgcgaggctgcctagttgatttgtcagttcctagcttgtttggttacagttttggttgaaccctctctgattgaattacagttcgtgtggacgtataaaaaatcgaaatagagtgggaattgccccttgaactttttgcactgagtctggagtgaattagtgttagtgcaaagtagttgttttagctgtcatttttgtattaattaaactttgctagaatgacttgtgagtttgtaggataccttttgcaggctattcacccatcttttgccatctaggtactatcgccatgctaagggtatttggtttctagggactaatatttaatttctttattttattttattt

SEQ ID NO: 32779 - DNA, 1732 bp, Zea Mays
aacagctaccgactgggctattatttctccccgcgtgctctctctcgccgactaggctattgccgccgccgccctacaccagatgcccagttcttcgtcagccccttctccggcaacgagcacctaacagtatattctgtgagaatggcatggggtcaaggtgctaagaggtccatactagggcttctctttcgttctcagcaccaaactgctcgggcatactcttcttcagcattccagactcaccaattgagcactcatgttccccaagatggagtgtttattaggagattcggctctgaggtgtcttcttcagagcaaatgaaccttattaagcaactcagacaaagaacgagtgctccaatcaaagatgtcaaggcctctctagttacctgcaactgggatattgaggctgcacagaaggacctaaggaagagaggtgttgctcttgctgccaaaaagtcttcacgcactgctgctgaaggtttgctagctatcgcacaagatgacaaaagggctgctgtagttgagcttaactgtgaaactgatttcgtagcaagaaatgatgttttccagtacctggcttcatcattggcaaagatggctttatctgctcagggtcctggtgaattgttcatgccttttggtcctgagcttttagagaacatgcctatcaatctagatcaccctaagctcagtgtggaaacaactgtccaaagtgccgttacagaagttgctgcaatggttggggagaatgtgaaactcagaagaggcttcatgctttccacaactgcacatggtgttgtttcatcttatatgcatacctgccctcagccaggtatgggtcgtatagctggattggtcacactagaaacagaagacagcagtactcttcttgattctgtcaaaagtgttgggtcatctattgcgatgcatattgttgcggcaaagccattattcttatcaaaagaactggtttctgcttcggctttagaaaatgagcgtgaaatacttcgaactcaggcccaaagttcagggaaatcccaaatggctatggataagatggtggaaggacgattgaggaagtactttgaggaagttgtgctcatggagcaaaaatatgttttaaatgacagcactaacattaagaccgtgctgaatgacttgtcgaaagaggttggttctaaggtaacaatcggtaacttcatcagaatggaggttggcgaagggattgagagaactgaagccgctgatggtttagaggttgctggtggcgctatgtagattccaggcagagatggttcgaacgagatcattaggatctatatgaaggtgtgggctaggacggagataatgtttaggcaggcactagcgttctgggacctgcgaggctgcctagttgatttgtcagttcctagcttgtttggttacagttttggttgaaccctctctgattgaattacagttcgtgtggacgtataaaaaatcgaaatagagtgggaattgccccttgaactttttgcactgagtctggagtgaattagtgttagtgcaaagtagttgttttagctgtcatttttgtattaattaaactttgctagaatgacttgtgagtttgtaggataccttttgcaggctattcacccatcttttgccatctaggtactatcgccatgctaagggtatttggtttctagggactaatatttaatttctttattttattttattt

SEQ ID NO: 32780 - DNA, 3809 bp, Zea Mays
cccgtctcgcgtcccgtcgcgccgagcgcaccaccttctcctccctccccttcttccccagggaaaaaacacctcctcgcctgcatacggacgacgcaccacccagccccagcccctgcccctgcccctgcccctgcaaccccgctccaccgcgcccgatctctatcgtcgacaccaccgcctccggcgaggccttttccgctcttgaggtttccacaggttcattccctgctcaatcgggcgccccatttggcaccctctgcccccccacagacccgtagggttgcatttcaggaaacagcgtgtctcttttctggacttgggaatctgagaggatactgtgcagtttaatggcacacactgctgactatatgcacatataatgatgcatgggcaaaccatgcttctctggtctagtggctattgagctgtgctctatgggaggtattgctgaatgtggtgtgagcattgacactaaagcttcaccacgtcgagcagccatagagaaagctcaggacgagctcaggcaggaatatgatgttcgtgaagaacgaaggagagagcttgaatttctggagaagggaggcaatcccttggatttcaaacttggccatgtagcttcccttagtgtacagtccacttctgtgacagaacagatagctgaacaaaatgtgataagtgaggccaaaggtagttctgcatttgctacatcacctcatggggattctgttgaaagtaacgacaagccaggaaattcattgtgccgtgaaggcaatacagccgataatattacgcttttggatggagatgccagcagcatgggtgtggataaaattgtgaaacgtggaacaaagagaactaattcagctcaagctgagcagttcctgcactgtgatggtcagaacaatgcaaaagaagaagattctgggttgtaccgtcttggtccaaagagccaagcgtatgcacgacgtaggtcaaagcctatcagagagaatgcatatagtgtatctgttaggtatccaccaattcctccattaagttctcagcaaaaagatgtgacaggattaatcccagaaaccaagactgaggataatggtgtttcatccattggtgattcaaaaccgactagtcctaactctaaaaatttggtgacaaatgcatcattactgaatgataaggtggaaatggagacagaaaatgttcaagcaattcctgaaggcaatcaagcaccgaaaaatgagttatcaaacagcaacaatggtagtcctgctattgagatttcaccaaacagtgtgccggataattctcgtcttactgtaagtgatcagatggttactgcatttgtttctgtggaatccccagatgctatttcaaaagtagctgcttcaaggatagtttgttctctcccatatatatccaatgaaatattgaaagaagcacaaactcttgagaaggcaggtaataacccatctatggtaagtgtggttgacgttcatgcatatggtatggataacaatggtgcagcaccttactctgctgtgaaaagtgctagtttgaatgaaaatgaagttgatccaattcatgaatatgctgccaaagctgttactgaacatccagaccaaaatgagaatcttgtaccagtgaatgcagatgaaatggctgatgaaggcttgaataagatcctacctgatgacaaggatgacaagaaagattgtcaactggaagttagtagtgggcctgtcattttgaatgacagttctactcctgtctatcctgaatttagcaattccttttatgcaagagatggaacagaagtttctaacaatgcagtagattcaaaaaataacgcagaacagcttgcttcttctaatcagggaaaagggaacatggaggaatgcaaagattctgacggaaacaatgcaagtgaattgagtgttgcccaaaagctagtgtctgttattgtgccccctgcttcagacgcaggcgatgtgagtaattttgtagaaaatgatgttgataaatctagcagagatcaggagaaggtagcaaagaaggaatatgaagattctgtcgtggcaaagaaggatcacgaagatgctatcctcagaagggcacggtatatagaggcaaatattaagagggctggtgaatggtctctctgcaatatttctttagagaagaagcagaagagccactgggattttgttctggaggagatggtctggatggcaaatgacttcacacaggagcgtttgtggaaaaatacagttgcagcacagatgtcccattggatttcttctagaggtcgagcggtatttgaagaagcaagcattcagagaaagcagaaatctgttgctagagttctagccaatggtattatgaacttttggtgttcagtccatactttacgagctagtggtggtattcctaaaccaataaaaatcgagcaaccgaatgagctagaggaaaataagcttggtgggttcaaatccggaaaagcggatgaggagtgtttggagcaagaaaagtcgcgccagtctcctattcagagctttgcacttaggtttcttgagtataacattaatgcatctgaatttctgccattagccgaagcaccatcaactcctgacaggctaaatgattttggcattttgaaagcaaatctcttttatggcgtagcacccggtgcaatgcaggcatacagggagtctatggaccgtctccttatttataataacaagaaaattggtgacactgtactcaaggatgattatgagccatcaacatatgcatctgtcacagatgtccctatggagaatgcatatggagatgacgaaagtgaggcacacacctacttattgcctggagcttataatggtggtttggcatcaaaaaatagtcacaaaaagaagcaccatttgcctcagaggatgaatggcgcaaggtcatatgaaattggtgttgacagtccttacgaaccactgtatttggaaagtaaatcaggaaaccagcaactcttatcgaatggcaaacaaacagacttcctctccattcctataaaacgcatccgcacagcagctaggcagcgggttgtgagtccatttcctgctggtgcttctgggacccctcaattcacaaataaaacggacgcatctagtggagatacaaactcctgtcaagatgatcaaagttcattacatggagggtcattttctaggaagaatgcagatatagagtccactgttgattttgacaggcaattgttgtatgatggtagtgaggtgtcgacaaaatctaaaaagaagaaaaagactaagcacccagggtacaaggcactaccaaatgtgtccgaatcttgttcgttgagggctcctggaaagggcaattatgatcatagatctcagatcgatatgatagctcagtatgagcagaaggattatattaaaaagagacaggagacaaatgggaattttgtggttaatggcctacatgctgctaagaagcctaaattgttgaatcaagcaccagatatttcactggaagctcttaaaccaattggtccaatggcctctcttgctgcatcacaaatgagcaacatggcaaatcctacgagggttataaaaatcagcacccgtggaagaaaaagtaaaggactcaagatgcgagctggtcattcaggtcctggaagtccatggtcaagttttgaggatcaggctcttgttgtccttgtccatgatatgggtgaaaactgggaattggttagtgatgcccttaacagcatcatccaattgaagggctttggatcttaa

SEQ ID NO: 32781 - DNA, 3766 bp, Zea Mays
aaaaacacctcctcgcctgcatacggacgacgcaccacccagccccagcccctgcccctgcccctgcccctgcaaccccgctccaccgcgcccgatctctatcgtcgacaccaccgcctccggcgaggccttttccgctcttgaggtttccacaggttcattccctgctcaatcgggcgccccatttggcaccctctgcccccccacagacccgtagggttgcatttcaggaaacagcgtgtctcttttctggacttgggaatctgagaggatactgtgcagtttaatggcacacactgctgactatatgcacatataatgatgcatgggcaaaccatgcttctctggtctagtggctattgagctgtgctctatgggaggtattgctgaatgtggtgtgagcattgacactaaagcttcaccacgtcgagcagccatagagaaagctcaggacgagctcaggcaggaatatgatgttcgtgaagaacgaaggagagagcttgaatttctggagaagggaggcaatcccttggatttcaaacttggccatgtagcttcccttagtgtacagtccacttctgtgacagaacagatagctgaacaaaatgtgataagtgaggccaaaggtagttctgcatttgctacatcacctcatggggattctgttgaaagtaacgacaagccaggaaattcattgtgccgtgaaggcaatacagccgataatattacgcttttggatggagatgccagcagcatgggtgtggataaaattgtgaaacgtggaacaaagagaactaattcagctcaagctgagcagttcctgcactgtgatggtcagaacaatgcaaaagaagaagattctgggttgtaccgtcttggtccaaagagccaagcgtatgcacgacgtaggtcaaagcctatcagagagaatgcatatagtgtatctgttaggtatccaccaattcctccattaagttctcagcaaaaagatgtgacaggattaatcccagaaaccaagactgaggataatggtgtttcatccattggtgattcaaaaccgactagtcctaactctaaaaatttggtgacaaatgcatcattactgaatgataaggtggaaatggagacagaaaatgttcaagcaattcctgaaggcaatcaagcaccgaaaaatgagttatcaaacagcaacaatggtagtcctgctattgagatttcaccaaacagtgtgccggataattctcgtcttactgtaagtgatcagatggttactgcatttgtttctgtggaatccccagatgctatttcaaaagtagctgcttcaaggatagtttgttctctcccatatatatccaatgaaatattgaaagaagcacaaactcttgagaaggcaggtaataacccatctatggtaagtgtggttgacgttcatgcatatggtatggataacaatggtgcagcaccttactctgctgtgaaaagtgctagtttgaatgaaaatgaagttgatccaattcatgaatatgctgccaaagctgttactgaacatccagaccaaaatgagaatcttgtaccagtgaatgcagatgaaatggctgatgaaggcttgaataagatcctacctgatgacaaggatgacaagaaagattgtcaactggaagttagtagtgggcctgtcattttgaatgacagttctactcctgtctatcctgaatttagcaattccttttatgcaagagatggaacagaagtttctaacaatgcagtagattcaaaaaataacgcagaacagcttgcttcttctaatcagggaaaagggaacatggaggaatgcaaagattctgacggaaacaatgcaagtgaattgagtgttgcccaaaagctagtgtctgttattgtgccccctgcttcagacgcaggcgatgtgagtaattttgtagaaaatgatgttgataaatctagcagagatcaggagaaggtagcaaagaaggaatatgaagattctgtcgtggcaaagaaggatcacgaagatgctatcctcagaagggcacggtatatagaggcaaatattaagagggctggtgaatggtctctctgcaatatttctttagagaagaagcagaagagccactgggattttgttctggaggagatggtctggatggcaaatgacttcacacaggagcgtttgtggaaaaatacagttgcagcacagatgtcccattggatttcttctagaggtcgagcggtatttgaagaagcaagcattcagagaaagcagaaatctgttgctagagttctagccaatggtattatgaacttttggtgttcagtccatactttacgagctagtggtggtattcctaaaccaataaaaatcgagcaaccgaatgagctagaggaaaataagcttggtgggttcaaatccggaaaagcggatgaggagtgtttggagcaagaaaagtcgcgccagtctcctattcagagctttgcacttaggtttcttgagtataacattaatgcatctgaatttctgccattagccgaagcaccatcaactcctgacaggctaaatgattttggcattttgaaagcaaatctcttttatggcgtagcacccggtgcaatgcaggcatacagggagtctatggaccgtctccttatttataataacaagaaaattggtgacactgtactcaaggatgattatgagccatcaacatatgcatctgtcacagatgtccctatggagaatgcatatggagatgacgaaagtgaggcacacacctacttattgcctggagcttataatggtggtttggcatcaaaaaatagtcacaaaaagaagcaccatttgcctcagaggatgaatggcgcaaggtcatatgaaattggtgttgacagtccttacgaaccactgtatttggaaagtaaatcaggaaaccagcaactcttatcgaatggcaaacaaacagacttcctctccattcctataaaacgcatccgcacagcagctaggcagcgggttgtgagtccatttcctgctggtgcttctgggacccctcaattcacaaataaaacggacgcatctagtggagatacaaactcctgtcaagatgatcaaagttcattacatggagggtcattttctaggaagaatgcagatatagagtccactgttgattttgacaggcaattgttgtatgatggtagtgaggtgtcgacaaaatctaaaaagaagaaaaagactaagcacccagggtacaaggcactaccaaatgtgtccgaatcttgttcgttgagggctcctggaaagggcaattatgatcatagatctcagatcgatatgatagctcagtatgagcagaaggattatattaaaaagagacaggagacaaatgggaattttggtgttattgatttatcaacagtggttaatggcctacatgctgctaagaagcctaaattgttgaatcaagcaccagatatttcactggaagctcttaaaccaattggtccaatggcctctcttgctgcatcacaaatgagcaacatggcaaatcctacgagggttataaaaatcagcacccgtggaagaaaaagtaaaggactcaagatgcgagctggtcattcaggtcctggaagtccatggtcaagttttgaggatcaggctcttgttgtccttgtccatgatatgggtgaaaactgggaattggttagtgatgcccttaacagcatcatccaattgaagggctttggatcttaa
